United States Patent Application Publication US 2018/0126003 A1 - sequence listing, part 12

SEQ ID NO: 16425 - DNA, 4395 bp, Artificial Sequence
  derived and/or modified sequence
atgggccgggtgggctactggaccctgctggtgctgcctgccctgctggtgtggaggggccctgcccccagcgctgctgctgagaagggccccccagccctgaacattgctgtgatgctgggccacagccatgatgtgacagagcgggagctgcggaccctgtggggccctgagcaggccgccggcctgcccctggatgtgaatgtggtggccctgctgatgaacagaacagaccccaagagcctcatcacccacgtgtgtgacctgatgtctggggcccgcatccacggcctggtgtttggagatgacacagaccaggaggccgtggcccagatgctggacttcatcagcagccacacctttgtgcccatcctgggcatccacggcggggcctccatgatcatggctgacaaggaccccaccagcaccttcttccagtttggagccagcatccagcagcaggccaccgtgatgctgaagatcatgcaggactatgactggcacgtgttcagcctggtgaccaccatcttccctggctaccgggagttcatcagctttgtgaagaccaccgtggacaacagctttgtgggctgggacatgcagaatgtcatcaccctggacaccagctttgaagatgccaagacccaggtgcagctgaagaagatccacagcagcgtcatcctgctgtactgcagcaaggatgaggccgtgctgatcctgtctgaggcccggagcctgggcctgaccggctatgacttcttctggatcgtgcccagcctggtgtctggcaacacagagctgatccccaaggagttccccagcggcctcatctctgtgtcctatgatgactgggactacagcctggaggcccgggtgagagatggcatcggcatcctgaccacagctgccagctccatgctggagaagttctcctacatccctgaggccaaggccagctgctacggccagatggagaggcctgaggtgcccatgcacaccctgcaccccttcatggtgaatgtgacctgggatggcaaggacctgtccttcacagaggagggctaccaggtgcacccccggctggtggtgattgtgctgaacaaggaccgggagtgggagaaggtgggcaagtgggagaaccacaccctgagcctgcggcatgctgtgtggccccgctacaagagcttcagtgactgtgagccagatgacaaccacctgagcatcgtgaccctggaggaggcccccttcgtcatcgtggaggacatcgaccccctgacagagacctgtgtgaggaacacagtgccctgcaggaagtttgtgaagatcaacaacagcaccaatgaaggcatgaatgtgaagaagtgctgcaagggcttctgcatcgacatcctgaagaagctgagcaggacagtgaagttcacctatgacctgtacctggtgaccaacgggaagcacggcaagaaggtgaacaacgtgtggaatggcatgattggagaggtggtgtaccagagagctgtgatggctgtgggcagcctgaccatcaatgaggagaggtctgaggtggtggacttctctgtgccctttgtggagaccggcatctctgtgatggtgagccgcagcaatggaacagtgagccccagcgccttcctggagcccttcagcgcctctgtgtgggtgatgatgtttgtgatgctgctgattgtgtctgccatcgctgtgtttgtgtttgagtacttcagccctgtgggctacaacagaaacctggccaagggcaaggcccctcatggccccagcttcaccatcggcaaggccatctggctgctgtggggcctggtgttcaacaacagcgtgcctgtgcagaaccccaagggcaccaccagcaagatcatggtgtctgtgtgggccttctttgctgtgatcttcctggccagctacacagccaacctggccgccttcatgatccaggaggagtttgtggaccaggtgacaggcctgagtgacaagaagttccagaggcctcatgactacagcccccccttccgcttcggcaccgtgcccaacggcagcacagagaggaacatccggaacaactacccctacatgcaccagtacatgaccaagttcaaccagaagggcgtggaggatgccctggtgtccctgaagacaggcaagctggatgccttcatctatgatgctgctgtgctgaactacaaggccggcagagatgagggctgcaagctggtgaccatcggcagcggctacatctttgccaccaccggctatggaattgccctgcagaagggcagcccctggaagaggcagattgacctggccctgctgcagtttgtgggagatggagagatggaggagctggagaccctgtggctgaccggcatctgccacaatgagaagaatgaggtgatgagcagccagctggacatcgacaacatggccggggtcttctacatgctggccgccgccatggccctgagcctcatcaccttcatctgggagcacctgttctactggaagctgcgcttctgcttcaccggggtgtgcagcgacaggcctggcctgctcttcagcatcagccggggcatctacagctgcatccacggcgtgcacatcgaggagaagaagaagagcccagacttcaacctgaccggcagccagagcaacatgctgaagctgctgcggagcgccaagaacatcagctccatgagcaacatgaacagcagcaggatggacagccccaagagagctgctgacttcatccagaggggcagcctcatcatggacatggtgtctgacaagggcaacctgatgtacagcgacaacagaagcttccagggcaaggagagcatctttggagacaacatgaatgagctgcagacctttgtggccaaccggcagaaggacaacctgaacaactacgtgttccagggccagcaccccctgaccctgaatgaaagcaaccccaacacagtggaggtggccgtgtccacagagagcaaggccaacagccggccccggcagctgtggaagaagtctgtggacagcatccggcaggacagcctgagccagaaccctgtgtcccagagagatgaggccacagctgagaacagaacccacagcctgaagagcccccgctacctgcctgaggagatggcccacagcgacatcagcgagaccagcaacagagccacctgccaccgggagccagacaacagcaagaaccacaagaccaaggacaacttcaagaggtctgtggccagcaagtaccccaaggactgcagcgaggtggagaggacctacctgaagaccaagagcagcagcccccgggacaagatctacaccattgatggagagaaggagcccggcttccacctggaccccccccagtttgtggagaatgtgaccctgcctgaaaatgtggacttcccagacccctaccaggaccccagcgagaacttcaggaagggggacagcaccctgcccatgaacagaaaccccctgcacaatgaggagggcctgagcaacaatgaccagtacaagctgtacagcaagcacttcaccctgaaggacaagggcagcccccacagcgagaccagcgagcgctaccggcagaacagcacccactgccgcagctgcctgagcaacatgcccacctacagcggccacttcaccatgaggagccccttcaagtgtgatgcctgcctgaggatgggcaacctgtatgacattgatgaggaccagatgctgcaggagactggaaatcctgccaccggggagcaggtgtaccagcaggactgggcccagaacaatgccctgcagctgcagaagaacaagctgcgcatcagccggcagcacagctatgacaacatcgtggacaagccccgggagctggacctgagccggcccagccgcagcatcagcctgaaggaccgggagcggctgctggagggcaacttctacggcagcctcttctctgtgcccagcagcaagctgagcggcaagaagagcagcctcttcccccagggcctggaggacagcaagaggagcaagagcctgctgcctgaccacaccagtgacaaccccttcctgcacagccacagagatgaccagaggctggtgattggccgctgccccagcgacccctacaagcacagcctgcccagccaggccgtgaatgacagctacctgcggagcagcctgcggagcacagccagctactgcagccgggacagccggggccacaatgatgtgtacatcagcgagcacgtgatgccctatgctgccaacaagaacaacatgtacagcaccccccgggtgctgaacagctgcagcaacagaagagtgtacaagaagatgcccagcattgaaagtgatgtgtag

SEQ ID NO: 16426 - DNA, 4395 bp, Artificial Sequence
  derived and/or modified sequence
atgggccgggtgggctactggaccctgctggtgctgcccgccctgctggtttggaggggcccagctccgagtgccgctgccgaaaaaggaccgcctgccttgaatatcgcggtgatgctcggccactcacacgatgtcaccgaaagggaactgcgcactctgtggggcccggagcaggccgccggactgccacttgacgtgaacgtggtcgctttactcatgaatcggaccgatcctaagagcctaatcacccacgtatgcgatctgatgagcggcgcccggatccacggcctggtgtttggagatgataccgatcaagaggcggtagcacagatgcttgattttatctcttcccatacttttgtgcctattcttgggattcacgggggcgcatcaatgatcatggccgataaagatcccacatcgaccttctttcagtttggtgcttccatacagcagcaggccaccgtgatgctgaagatcatgcaggattacgactggcacgtgttctccctagtgactaccatctttccaggttacagagaatttataagttttgtgaagacaactgtggacaattcttttgtggggtgggatatgcaaaacgtgataacccttgatacctcatttgaggatgccaagacgcaggtacagcttaaaaaaatccattcatcagtgattcttctctactgctccaaggacgaagctgtgctgatcctcagcgaagcaaggtcgctgggactgaccgggtatgatttcttctggatcgtcccctccctggtttctggcaacaccgaactaatcccaaaggagttcccgtccggactgatcagcgtgagctatgatgactgggactattctctggaagcacgcgtgagggacggaatcggcatacttaccaccgcagcgtcctctatgctggagaagttctcttacatccctgaggccaaggcctcatgctacggacagatggagagacccgaggtccccatgcacacgctgcaccctttcatggtaaatgtcacttgggatggtaaggacctgagcttcaccgaggaagggtaccaggtccaccctcggcttgtagtgattgtgctgaataaggaccgcgagtgggagaaagtgggtaagtgggagaaccacacattatccctgcggcatgcagtctggccacgttataaaagcttctctgattgtgaacccgacgataatcatttgtcaatcgtgacgctggaagaagcccccttcgtgatagtggaagacatagatcccttaacggagacgtgtgtgagaaataccgtgccgtgtcgtaagttcgtcaaaatcaataatagcacaaacgaaggcatgaatgtgaaaaaatgttgcaaaggtttttgcattgacattctcaagaaactgagtagaacagtcaaatttacatacgacctgtacctggttacaaatggaaaacatggcaagaaggttaataatgtctggaatggaatgattggcgaagtggtctaccagcgcgccgtaatggccgtgggtagcctaacgataaatgaagaacgctctgaagtggtcgacttcagtgtccctttcgtagaaacgggtatcagcgtgatggtgagccgcagcaacggaactgtctcacctagcgcgtttcttgaacctttttccgcatccgtttgggtcatgatgttcgtgatgctgttgatagtgtccgcaattgcagtttttgtgtttgagtactttagcccggtcggctacaatcgaaaccttgctaaggggaaggccccacacggaccctccttcaccattggaaaagccatctggctgctgtggggcctcgtgttcaataacagcgtgcccgtccagaatcctaaaggcaccacttctaagataatggtcagcgtttgggcctttttcgccgtgatttttcttgcttcctacacagcgaatctagcagccttcatgatccaggaggaattcgtcgaccaggttacgggcctgtcagacaagaagtttcagcgtccacacgattactcccccccctttagatttgggactgtgccgaacgggtcaacggagcgcaacataaggaacaactacccgtacatgcaccaatacatgaccaaattcaatcagaagggggtggaagacgccttggtaagcttgaaaaccgggaaactggacgcatttatttacgatgcagccgtgctcaattacaaagccggtagggacgagggctgcaagctggtgaccattggctctgggtacatattcgccactacagggtatggtattgcactgcagaaaggttctccttggaagcgccaaattgacctggctctgcttcagttcgttggggacggtgagatggaggaactcgaaaccctttggctgaccggcatttgtcacaacgagaagaatgaagtaatgtcctcccagctcgacatagataatatggctggagtgttttatatgctcgcagccgccatggccctgtctctgatcacctttatctgggagcaccttttttactggaaattaaggttctgtttcaccggggtctgcagtgaccgcccaggactgctgttttctatctcccgagggatttattcctgtatccatggcgttcatatcgaagagaaaaaaaaatcacccgattttaacctcacaggctctcagagcaatatgctgaagctcctgcgcagtgccaaaaatatatctagcatgagtaacatgaattctagtaggatggacagcccaaagcgggcagccgacttcatccagcgaggctcactcatcatggacatggtgagcgataagggtaacctgatgtacagcgacaacaggagctttcaaggaaaggagtctatttttggggataatatgaacgaactgcaaacgttcgtggccaaccgacagaaagacaacttaaacaactacgttttccaggggcagcacccactgactctgaatgaatctaatccaaacactgtggaggttgccgttagtacagagagcaaggccaattctagacctcgtcagctgtggaagaagagcgtggacagcatcagacaagactccctaagccagaaccctgtgagccaacgggacgaagccacagctgaaaacagaacccactccctcaaatccccgcggtacctgcctgaggagatggctcactcagatatcagtgaaacatctaatcgcgcgacatgtcaccgagagcctgataattcaaagaaccataaaacgaaggacaactttaagcgatccgtagcttctaaatatcccaaggactgctcagaggtggagagaacctatttgaagacgaaaagctcctcacctagagataaaatctatacaatcgacggcgaaaaggagcccggatttcacctggatccccctcagtttgtggagaatgttactctaccagagaatgtcgacttcccagatccataccaggacccctccgagaattttaggaaaggtgactctacacttcccatgaacaggaaccccctacataatgaagaaggactctctaataatgatcagtacaagctgtactctaaacactttaccctgaaggataagggatctccccattctgagacttctgaaagatatcgccagaactctacccattgcagaagttgcctgagcaatatgccaacatatagcgggcacttcaccatgagaagcccattcaagtgcgacgcgtgtttgcgcatgggcaatctttacgacatcgatgaagaccagatgctgcaggagacaggaaatcctgcaactggcgaacaggtgtaccagcaggattgggcccaaaataacgccctgcagttacagaaaaacaaacttaggatttcccggcagcactcatatgacaacattgtggacaaacctcgagaactagatctcagtcgcccctcaaggtcaatatctttaaaggacagggagaggctactggagggaaacttttacggttccctcttctcagtgccatcaagtaagctcagcggcaagaagtcttctctgttcccacaggggctggaggactcgaaaagaagcaaatccctgcttcccgaccacacgtcagataacccctttctccattcacacagagacgaccagcgcctagtcataggacgctgtccgtctgatccttataaacactccctgccaagccaggctgtcaatgactcatatcttaggtcgtcattgcggtccacagcctcttactgcagccgcgattctagaggtcataacgatgtctacatatcggagcatgtaatgccttatgcagcaaacaagaataacatgtactcgactccccgcgtccttaattcctgctccaacaggcgggtgtacaaaaaaatgcccagcattgaatccgatgtctag

SEQ ID NO: 16427 - DNA, 4395 bp, Artificial Sequence
  derived and/or modified sequence
atgggccgggtgggctactggaccctgctggtgctgcccgccctgctggtctggagaggccccgccccaagcgctgccgccgagaaaggcccaccagcattaaacatcgccgtaatgttgggccactcccatgatgttacagagcgagagctccgcactctttggggccccgaacaggccgcaggcttaccccttgatgtcaatgtcgtcgctctgctgatgaatcgcacagaccccaagtcactcattacacacgtctgtgacctcatgagcggagccaggatccatggactggtgttcggcgatgataccgaccaggaagccgtcgcccaaatgctcgatttcattagtagccacacgtttgtgcccatcctaggtattcacgggggggcttccatgattatggctgacaaggacccaacaagcacctttttccaatttggtgccagcatccagcagcaggctaccgtgatgctcaagataatgcaggattatgactggcacgtgttctccctggtgaccactatctttccaggttatcgggagttcatcagcttcgtgaagacaacagtggacaattcgttcgtggggtgggacatgcagaacgtaatcactctcgacactagctttgaagacgccaaaacgcaggtccagctcaagaagatccattcaagtgtcatcttactgtactgctcgaaagacgaagcagttctcatccttagcgaggctcgcagtctgggactaaccggttacgattttttttggatcgtccctagcctcgtgagtggcaatacagaactgattcctaaagagtttcccagcggcctcattagtgtttcttatgacgactgggactatagtctcgaggcgcgtgtccgtgatggcatcggaatccttacaactgcggcttcatctatgttggaaaaattttcctatattcccgaagccaaggcctcttgttatggccagatggaacggcctgaagtgccaatgcacactttgcatccttttatggttaatgtcacctgggatgggaaagatctctcttttaccgaagagggctatcaagttcatccaaggctcgttgttattgtgttgaacaaagatagagagtgggaaaaggtaggcaagtgggagaaccataccttatctctaagacacgccgtgtggcccaggtacaaaagctttagcgactgcgagcccgatgacaatcacctatcgatcgtgaccctggaggaggccccattcgtcatagtggaggatatcgaccccctcactgaaacttgtgtgcgaaacacagttccctgtagaaaattcgtgaagatcaataatagtacaaatgaaggaatgaacgtaaagaagtgttgtaaggggttctgtatcgatatcctgaagaagctgtctagaacagtgaaattcacctacgacttgtatcttgtcacaaatggcaagcatgggaagaaggtgaataacgtctggaacgggatgattggtgaggtggtctatcagagggctgttatggccgtcggctccctgacaatcaatgaagagaggtccgaggtcgtcgacttctccgtgccatttgtcgagactggaatctcagtgatggtgagccgctctaacggtaccgtctcgccttctgctttcctggaacctttttcggcctctgtttgggtgatgatgttcgtaatgctccttatcgtgtctgccattgccgtcttcgtctttgagtacttttcccctgtcggctataatcggaatctggcgaaaggaaaagccccccacggcccttcttttacaatcggaaaggcaatctggcttctgtgggggctcgtctttaacaattccgtgcccgttcaaaatccaaaaggaaccactagtaagatcatggtctcagtgtgggctttcttcgccgtgatctttctggcatcctacactgcaaacctggcggccttcatgatccaagaagagttcgtagatcaagtgacggggttgtccgataagaagttccagcgcccccatgattacagcccccccttccgattcgggactgttcctaacgggtccacggagagaaatattcgaaacaactacccctatatgcatcagtatatgaccaaattcaaccagaagggtgtggaggacgcgctggtaagcctgaagacgggtaaattggatgccttcatctatgacgcagccgtgctcaactataaagcggggagggatgaaggttgtaaactggtcaccatcggatccggctacattttcgcgaccacaggctatgggatcgcactgcagaaaggaagtccatggaaaaggcagattgatctggccctgctccagttcgtgggagatggcgagatggaagagctggaaacactttggctgaccgggatctgccataacgagaagaatgaggtgatgagctcacagctcgacatagacaacatggcaggagtattttatatgcttgctgccgccatggccctgagtctaattaccttcatctgggagcatcttttttactggaagcttcgcttctgtttcacaggtgtttgttccgacaggcccggcctgttattcagcattagcagaggcatttactcatgtattcatggagttcacatcgaggaaaagaaaaagtcccctgatttcaacctcacgggctcgcagagtaacatgctgaagctgttgcggagcgccaagaatatcagttcgatgagtaacatgaactcgtcacggatggacagcccgaagcgggccgcggatttcatccaaaggggaagccttatcatggacatggtttccgacaaggggaacttgatgtactccgacaatcggtcttttcaaggcaaagaatcaattttcggagataatatgaatgaattacaaacctttgtggctaaccgccagaaggacaatctgaataattacgttttccaggggcaacatccattgaccttgaacgagagcaatcctaacaccgtggaagtggctgttagtacagaatctaaagcgaattcccgtcccaggcaactgtggaaaaaatctgttgattccatccgccaagactcactgtcgcagaacccagtctctcagcgggacgaggccactgctgagaatcgaactcactctctcaagagtccgagatatctgcccgaagagatggctcatagcgatattagcgagacctccaaccgagccacttgccacagggagcccgataattccaaaaaccacaaaaccaaagacaattttaagcgctcagtggcttccaaatacccaaaagactgtagcgaggtcgagcggacatacctcaagacgaaaagttcttctccacgcgacaagatctacactatcgatggcgagaaggaaccggggtttcatcttgacccaccccagttcgtagaaaatgtcacactgccggagaatgtggactttccagatccctaccaggacccatctgaaaacttcaggaagggcgactccacactaccaatgaatcggaaccccctgcataatgaagaaggactaagtaacaatgaccagtacaagttgtatagcaagcattttaccttaaaggacaaaggttctccccactctgaaacttcagaacggtatcgccagaacagcacgcactgtagatcctgtttgtcaaacatgcctacttacagcggccatttcacaatgaggtcaccttttaagtgtgatgcttgcctgcgaatgggaaatctctatgacatcgatgaagatcagatgcttcaggagacggggaaccccgccaccggcgagcaggtttatcagcaagactgggctcagaataacgctctccagctccagaaaaacaagctgaggatctcccggcagcactcctatgataacatagtggataaaccccgagaactcgatctgagtcgacccagcaggagcatctcactcaaggatagagagcgtttactcgaaggtaatttttacggatctctgttcagtgtcccctccagtaaactgagcggtaaaaaaagctccctcttccctcaaggcctcgaggattctaaaaggtcaaagtctttacttccagatcatacaagcgataaccccttcctccacagtcacagggatgatcagcggctggtgatcggacggtgtccttctgacccttataagcactctttgccgtcacaggcagtgaatgatagctaccttcgaagcagtctgagatcaaccgcttcttattgctcacgcgactcccgcggccataacgatgtgtacataagtgaacatgtgatgccatacgctgccaataagaacaacatgtacagtacaccgcgggtcctcaattcttgcagtaataggagggtttacaagaaaatgccaagcattgagtccgacgtttag

SEQ ID NO: 16428 - DNA, 4395 bp, Artificial Sequence
  derived and/or modified sequence
atgggccgggtgggctactggaccctgctggtgctgcccgccctgctcgtatggcggggtccagctccctcagccgctgctgagaaaggacctcctgcattaaatattgccgtaatgttggggcacagtcatgatgttacggaacgggagcttagaaccctgtgggggccggagcaggcagcaggcttgccgcttgacgttaatgttgtcgcccttttgatgaacagaactgatccaaaatctcttattactcacgtgtgtgacttgatgagcggtgccaggatccacggtttagtgtttggagatgacaccgaccaggaggctgtggctcagatgttggatttcatctcaagccacaccttcgtccctatacttggtattcacggcggagcctcgatgattatggcagataaagatcccacgtccacgtttttccagttcggcgcttccatacagcaacaggccacagtgatgctaaagatcatgcaagactatgactggcacgtcttttcattagtaacaaccattttcccgggctacagggaatttatatctttcgtcaaaactactgtggataattcgtttgtgggctgggacatgcaaaacgtgatcacactcgatactagcttcgaagacgccaaaactcaggttcaattaaaaaaaattcatagctccgtaatactcctctactgttccaaggatgaagccgtgttaatcctcagcgaagctagatcccttggcctaacgggctacgactttttctggattgtaccctcgctagtttctggcaacactgagctcataccgaaagagttcccatctggcctcatatctgtctcctatgacgactgggactacagcttggaggctagggttagggacgggatcggcatcctgactacagccgctagctcgatgctcgagaagttttcctacatccctgaggcaaaggcctcatgctacggccagatggagcggccagaggtgccaatgcatactctgcatccttttatggtgaacgttacttgggatggtaaagacttatcattcacagaagagggataccaggttcatccacgcctcgtagtgatagtcctcaacaaagatagagaatgggaaaaggttggtaaatgggagaatcataccctcagtctgaggcacgctgtgtggccgcgatataagtcattttcagattgtgagcctgacgataatcatttgtctatcgtcacccttgaagaggcgccttttgtgatcgtcgaggacatcgaccccctgaccgagacatgtgtacgaaacactgtaccctgtaggaaatttgtgaagattaataattccaccaatgaaggaatgaacgtgaagaaatgctgtaaggggttctgcatagatatactgaaaaagttaagtcggaccgttaaattcacgtatgatctgtatctggtgaccaacggcaagcatggaaagaaggtcaacaacgtatggaacgggatgatcggggaggtcgtgtaccaacgcgccgtaatggccgtcggcagtctgaccataaacgaagagcgtagcgaagtggtagatttttccgtcccgtttgtggagaccggcatttcagtgatggtctcacgatctaatgggactgtgtcccctagcgcattcttagagccattctcagcatccgtttgggtcatgatgttcgttatgttactgatcgtcagcgctattgccgttttcgttttcgagtatttctctccagtgggatataaccgcaacctggcgaaggggaaggcgccacacggccccagtttcaccattgggaaggcgatttggttattatggggcctcgtctttaataattccgtgccagtccagaatccgaagggcaccaccagcaaaatcatggtgtcagtctgggcgtttttcgctgtgattttcctcgcaagttacacggccaatctcgctgcgttcatgattcaggaagagttcgtggaccaagtgaccgggctatctgataaaaaattccagagacctcacgactactctccaccttttagatttggaacggtgcccaatggctctaccgagaggaacattcggaacaattacccttatatgcatcaatatatgacaaaattcaaccagaaaggcgtggaggatgctcttgtgagtttaaagaccgggaaactcgatgcttttatctatgatgctgccgttctcaattataaagccgggcgcgatgagggctgcaaattggtgactatcggctccggatacattttcgccactactggttatggcattgccctccaaaagggctcgccctggaaacgccagattgatctggcattgctgcagttcgttggggatggtgagatggaagaactggaaaccctctggctcaccggcatctgccacaatgaaaaaaacgaggtcatgagctcacagttggatatcgataacatggccggagtgttctacatgctggcggcagcaatggccctctccctgattacatttatttgggaacatctgttctactggaagctgcgcttttgcttcactggcgtgtgctccgaccgccctggactgctgttctcaatatcccgtgggatttatagctgtattcacggagtacatatagaagagaagaagaagagccccgactttaatcttaccgggagtcagagtaatatgttgaagctcctgagatcagctaagaacataagctcaatgtccaacatgaacagcagcagaatggactcccctaaaagggcagccgatttcatccagcgcggctctttaataatggacatggtgagcgacaagggtaatctcatgtactctgataacagatcttttcagggcaaggagtctatttttggagataacatgaacgagctccaaacatttgtggcaaaccggcaaaaggataacctcaataattatgtctttcaggggcagcacccattgacactgaacgaaagtaacccaaacaccgtcgaggttgcagtgagtacagaaagcaaagcaaattccagacctcgccaactgtggaaaaagtctgtggacagcattcggcaggactctctgtcccaaaatccagtgtctcagagggacgaagccaccgccgaaaatagaacccactctctaaaaagccctcgctacctcccagaggagatggctcactctgacatatccgaaacatccaatcgcgccacctgccaccgcgagccggataactcaaagaaccataagaccaaggataactttaaaaggagcgttgcatctaaatacccaaaggactgtagcgaagttgagagaacctacttgaagacaaagagctcaagcccccgcgacaagatttatacaatcgatggagagaaggagcccgggttccacctggacccccctcagttcgtggagaatgtcactcttcccgagaacgtggacttccctgacccctaccaggacccgtctgagaacttccgtaagggagactcgactctgccaatgaacagaaatcctctgcacaatgaggagggactaagtaacaacgaccagtacaaactatacagcaagcacttcacactgaaggataaagggtctccacactccgagaccagcgagcggtatagacagaacagcactcactgcaggtcttgcctgtccaatatgcctacttacagtggacactttaccatgcgatccccctttaaatgtgatgcatgcctgagaatgggcaacttatatgacattgacgaagaccaaatgctgcaggaaacggggaatccagctaccggggagcaggtctaccagcaggattgggcccagaacaacgccctgcagttgcaaaaaaacaaactgcgaatttcacgtcagcattcatacgataatattgtagataagccacgtgaactcgatctttctaggccttctaggagcattagcctgaaggacagggaacggctgctcgagggaaacttctacggtagcttgtttagcgttccaagctccaagctctctgggaaaaaaagctcactgttcccacaaggccttgaggattctaaacgatctaagtcattactaccagatcacacatcagacaaccccttcctacactcccatagggacgatcaaagacttgtgattggtagatgcccttcggatccatacaaacattccctgccctctcaggcggttaacgattcatatcttcgaagttctctgcgttctacagcctcttactgttcacgggactcccgcggacataacgacgtgtatatttccgaacatgtgatgccctatgccgccaacaaaaataatatgtactccacaccgcgggttctgaattcttgctcaaaccgtcgcgtttacaagaagatgccttctattgagtcggatgtttag

SEQ ID NO: 16429 - DNA, 4395 bp, Artificial Sequence
  derived and/or modified sequence
atgggaagagtggggtactggactcttctcgtactccctgctttgctggtgtggcggggacccgctccctccgccgctgcagaaaagggacctccagccctcaacatcgctgtgatgctcggccacagccacgacgtgaccgaacgggaactgcggactctctggggacctgaacaagccgcagggctgcctcttgacgtcaacgtggtggccctgttaatgaacaggacggatccaaagtccctgatcactcacgtctgcgacctgatgtcaggcgcaaggattcatggtctggtgttcggggacgataccgaccaggaggctgtagcacagatgctcgacttcatttctagccatactttcgtcccaatactcgggatccatgggggagcatccatgattatggctgacaaggaccccacttcgacgtttttccagttcggggctagcatccaacagcaggctaccgtgatgctcaagataatgcaggactatgattggcatgtgttttctttggtgacgacgatcttcccagggtaccgcgagttcattagcttcgtgaagacgacagtggataatagcttcgtgggctgggacatgcagaatgttatcactctggatacctctttcgaggatgccaagacccaagtccagctgaaaaaaatccactcctcagtcattctattgtactgttctaaggacgaggcggtgctgatcctgtccgaggcacgctccctgggactgacagggtatgattttttctggatcgtgccaagcctcgtgtctggaaacacggaactaatcccgaaggagttcccttctggactcatctccgtaagctacgatgactgggactattccctcgaggccagggtgcgcgatgggatcggcatcttgactaccgctgcctccagtatgttggaaaagttttcttacatcccggaagccaaggccagttgttatggccaaatggagcgccctgaagtgcctatgcacactctgcaccccttcatggttaacgtaacatgggacggcaaggacttatcctttaccgaggaggggtaccaggtgcacccccgtctcgtcgtgatcgtgctgaataaagaccgagaatgggagaaagtgggtaagtgggagaaccatactctatcccttagacatgcggtgtggccaaggtataaatcattctcagattgcgaaccggatgacaatcacctgtccatagtaaccttggaagaagccccttttgttattgtggaggacatagaccccttaacagagacttgcgtcaggaatactgtgccctgcaggaaatttgtcaaaattaacaattccacaaatgaaggcatgaacgtcaagaagtgttgcaaggggttctgcatcgacatcctcaagaagttgagcagaactgttaagttcacttatgacctgtacttagtcactaatggcaagcacgggaagaaggtgaacaacgtgtggaatggaatgattggagaagttgtctatcagagagccgtgatggctgtggggagcttaacaattaatgaggaacgctccgaagtggttgatttctctgtaccatttgtggagaccggcattagtgttatggttagccgatctaatggcaccgtgtctccaagtgcgtttttggagccattttcggcttcagtgtgggtgatgatgtttgtcatgcttctgattgtgtcagccatcgctgtgttcgtgttcgagtattttagcccagtcggctacaatagaaatctcgcaaagggcaaagctccacatgggccttctttcacaattgggaaggctatttggctgttgtggggccttgtattcaacaacagcgtccctgtccagaacccaaaagggactaccagcaagattatggtgagcgtatgggctttttttgcagtgatttttctggcctcctatactgctaacttagctgcatttatgattcaggaggagttcgtggatcaagtcaccggcctctccgataagaagtttcagagacctcatgattactcaccaccctttcggtttgggaccgtgcctaacggctccacagaaagaaacataaggaataactatccgtacatgcaccagtacatgactaagtttaatcagaaaggcgtagaagacgccctggtctctctgaagactggaaagctagacgctttcatctacgatgctgccgtcttgaattacaaagccggacgcgatgaaggatgtaaactggtgacaataggaagcggatacatattcgccacgacagggtatgggattgccctgcagaaaggaagcccatggaaaaggcaaatcgacttggcactcctccagtttgtgggagatggcgagatggaagaactagagaccctgtggctcacaggaatctgtcataacgaaaagaatgaagtgatgagtagccaactggacattgacaatatggcgggagtgttctacatgctcgcagcagctatggccttgtccctgatcacttttatttgggaacatctgttctactggaagctccgcttctgcttcaccggagtgtgctccgatcgacctggtctgctcttctctatcagccgcggtatctattcttgcatccacggtgtacatatcgaggagaaaaagaagagccctgacttcaacttgacagggtcacagagcaacatgctgaaactgttacgcagtgcaaaaaatatctcctccatgagcaatatgaattctagtcgaatggatagccctaaaagggccgcagactttattcagagaggatccctgatcatggatatggtatccgacaagggtaacttaatgtactccgacaatagaagttttcaggggaaggagtccatttttggcgataacatgaatgagctccagacattcgtggccaacagacaaaaggataatctcaataattatgtctttcagggacagcaccccttgaccttgaacgaatcaaaccctaatactgtcgaggtcgccgtttccactgaaagcaaggcaaactcgcgcccacgacagctttggaagaaaagtgtcgattcaattcggcaggattcgctgagccagaaccccgtgtcccagagggacgaggctacagctgaaaatcgtacccactctctgaaatccccccgttatctgcccgaagaaatggcacactctgacatctcggaaacaagtaacagggctacctgccacagggagcccgacaactctaaaaatcacaaaaccaaggataattttaaaaggtccgttgccagtaaatatcctaaggactgttccgaggtggagcgtacttatttgaaaaccaagtcttcctcccccagggacaagatctatacaattgacggagaaaaagagccaggattccatctagacccaccccagtttgtcgagaatgtgactctgccagaaaatgtcgactttcccgacccctaccaagacccttctgaaaacttccgtaaaggagacagcaccctgccgatgaaccgaaatcccttacacaacgaagagggcctcagtaacaacgatcagtataaactatatagcaagcatttcactctgaaggataagggcagtcctcacagtgaaacaagcgaacgctacagacagaactccacccactgtcggtcgtgtctgtcaaatatgccaacctactcaggacacttcaccatgagatccccatttaaatgcgacgcctgtctacgcatgggcaacctatatgacatcgatgaagatcagatgctccaagagaccggaaaccccgctacaggggagcaggtgtaccagcaggactgggctcagaataacgcgctacagctgcagaagaacaagctacgtatcagccgtcagcatagttacgacaatatcgttgataagccaagggagcttgacctctcgcgcccatctcgcagtatctctttgaaagacagagaaagactccttgagggcaatttttacgggtctctcttctccgtccccagctcaaagctctcgggcaaaaagtcgtctctgttcccccagggactggaggattctaagagaagtaagtcgctgctgcccgatcatacaagtgataaccctttccttcattcccaccgggatgaccagcgtctggtgatagggcgatgccctagcgacccctacaaacacagtctgccttcacaagccgttaatgatagttatctgaggagctcacttagatccaccgcctcatactgttccagagactcccgtgggcataatgacgtgtacattagcgagcacgtgatgccctatgctgctaataaaaataacatgtatagcacccctcgcgtcttgaacagttgcagtaacaggcgagtttacaagaaaatgccatctattgaatccgacgtttag

SEQ ID NO: 16430 - DNA, 4394 bp, Artificial Sequence
  derived and/or modified sequence
atggggcgagtgggctattggacacttctggtacttccggcactcttagtgtggcggggtcctgcaccaagcgcagcagccgagaaaggccctcctgcattgaatatcgcggtaatgttgggacactcacatgatgtgacagaaagagaactccgaaccctctggggcccagagcaggctgctggtctgcctctggacgtaaatgtggtggctctgcttatgaatcggactgatccaaagagcctaattacacatgtgtgcgacctgatgagtggagccaggatccacggcctggttttcggggacgatacagaccaggaggcagtggcccaaatgctcgatttcatttcgagccatacatttgtgccaattttaggaattcacggaggcgcaagcatgatcatggctgataaggatccaactagcaccttcttccagttcggagcttccatccagcagcaggcaaccgtgatgttaaagatcatgcaagattacgattggcacgtcttctctcttgtgactaccattttccccggatatcgagaattcatctcattcgtgaaaactacagtagataacagcttcgtcgggtgggatatgcagaatgtgattaccctcgacacatcttttgaggacgccaaaacgcaagtgcaattgaagaagatccacagtagtgtaatactcctctattgcagtaaagatgaagcagtgctcatcctgtccgaggcccgttctcttggcctgacggggtacgatttcttttggattgtaccttcactcgtcagtggaaataccgaactgatccccaaggagttcccttcgggactgatatccgtgagctacgatgattgggactattcccttgaagcacgtgttagagatggcatcggcattctgaccaccgccgctagctcaatgctagagaaattcagctacatccccgaggcgaaagcctcttgctacggccagatggaaagacctgaagtgcctatgcataccctgcatccatttatggtgaacgtgacttgggatggaaaagatctgtccttcaccgaagagggctatcaggtgcatccccgtctcgtggtgatagtgctgaacaaggaccgcgaatgggaaaaggttggaaagtgggagaatcatacactgagcctgcgtcacgcagtgtggcccagatataagagcttctccgactgtgagcctgatgacaatcatctcagcatagtgacactggaggaagctccatttgtaattgtggaagacatcgacccattgacagagacatgtgtccgcaacaccgttccatgtcgcaagttcgtgaagattaataattccactaatgaaggcatgaatgtcaaaaagtgttgcaaaggattctgtattgatattctcaagaagttgtcccggaccgtgaaattcacctatgacttatatctcgtgaccaatggaaaacatgggaagaaggtgaataacgtatggaacgggatgatcggagaagttgtgtaccagagggctgttatggccgttggaagcctcactataaatgaggaaagaagcgaagtcgttgatttttccgtcccttttgtggagactggaatctcagttatggtgtcgagatccaatggcacggtaagtcccagcgccttcttggaacctttttccgccagtgtatgggtgatgatgttcgtgatgctcctcattgtatctgccatcgctgtatttgtcttcgagtattttagccccgtcggttacaaccggaacttggccaagggtaaggcaccccatggtccctcattcacaattggtaaagctatctggctactgtggggattagttttcaataattcggtgccggtgcaaaatccaaaggggacaacatccaaaatcatggtctccgtctgggcattttttgctgtcattttcctcgctagttacactgcaaacctcgctgcctttatgatacaggaagaattcgtcgatcaggtgacaggcctgtccgacaaaaagtttcagaggccccatgattattctccacccttccgcttcggtaccgtgcctaacggttccacagaacgcaatatccgcaacaactatccctacatgcaccagtatatgactaaatttaaccagaaaggagtggaagatgcgttggtatctcttaaaaccggaaagttggatgccttcatctatgatgccgctgtgctcaactacaaggcgggaagagatgagggttgcaaactggtcaccatcggttcgggctacatctttgccaccactggctacggaatcgccctgcaaaagggtagtccgtggaagaggcagatcgacttggcccttttacagttcgtgggagatggcgagatggaggagttagagacgctgtggctgactgggatttgccacaatgaaaagaacgaggtaatgtcctcacaacttgacatagataacatggctggcgtgttctacatgctggctgccgctatggctctcagtcttatcacctttatctgggaacatttattctactggaaattgcgtttttgttttactggagtctgcagcgaccgccctgggctactatttagcatatctcgaggaatctacagttgcattcacggagtgcacatcgaggagaagaaaaaaagtccagatttcaatctaactggcagccaaagcaatatgctgaagcttctgcgatcagccaaaaacatctcgtcaatgtctaatatgaactcatcacgcatggatagcccaaagcgcgctgctgactttatccaaagggggagcctaattatggatatggtaagcgataaaggcaatctcatgtatagcgacaatcggtccttccaagggaaagaaagcatctttggggataacatgaatgagcttcagactttcgtggctaatcggcaaaaagataacttgaataactacgtgtttcagggtcagcacccactgactctgaatgagagtaacccgaacactgtcgaggtcgccgtatccacagagtccaaggccaattctcgcccacgccagctgtggaagaaaagcgtggatagcatccggcaggactcactgtcccagaatcccgtgagccagcgggacgaggcgacagccgagaaccgcactcacagcctcaagagcccacgctacttgcctgaggaaatggcccatagcgacatcagcgagacttctaatcgcgcaacctgccaccgcgaacctgataacagtaagaatcacaaaactaaggacaactttaaacggagcgtcgcctctaagtaccccaaggattgctccgaagtggaacggacatacctcaagactaagtcatctagccctcgcgacaaaatctacacaattgacggcgagaaagaaccaggctttcacttggatccaccgcaatttgtggagaatgtgacattgcctgaaaacgtcgactttcccgatccttaccaagacccaagcgaaaactttcgcaagggtgattctaccctgccgatgaaccgcaatcccttacacaacgaggaggggctcagcaacaatgatcaatataagttatattctaaacatttcacactaaaggacaagggcagtccccactctgaaacctccgagagatatcgccagaattcaacccactgtagatcgtgtctaagtaatatgcccacatattccggtcactttaccatgcggtccccttttaagtgcgacgcatgcctccgcatgggcaatctgtatgacattgatgaggatcaaatgctgcaagaaactggcaatcccgcaactggagaacaggtataccagcaagactgggcccagaacaacgccctacagttgcaaaaaaacaagttacggatatctcggcagcattcctatgacaatattgtggataaacctcgggaactcgacctcagccgtccatctagatctatctctctgaaggacagggaaaggctactggaagggaatttctatgggtccctgttcagcgtaccttctagcaagctgtccggcaaaaagagttcactttttccgcagggactcgaggatagtaagcgcagtaaatctctgttgcctgaccacacctctgacaatcctttccttcactcccatcgagacgaccagagactagtcattggaaggtgtcctagcgatccttacaagcacagcctgcctagccaggctgtgaatgattcctacttaaggtcaagtctccggagcaccgcctcctattgttcaagagacagcaggggacacaacgatgtatacatttcagagcatgtgatgccctacgctgcaaacaaaaataatatgtactctacgccacgcgttctcaattcctgctctaataggcgcgtgtacaagaaaatgccttccattgaaagtgacgtcta

SEQ ID NO: 16431 - DNA, 4395 bp, Artificial Sequence
  derived and/or modified sequence
atgggacgggtgggatactggaccctgctcgtgctaccagccctgctggtctggcggggtccagccccaagcgccgcagctgagaagggccctccagccctcaacattgccgtgatgttgggccacagccacgatgttaccgaaagggagttaaggaccctgtggggaccggagcaggccgcagggctgcccctggacgtcaatgtcgtcgcactgcttatgaaccggacagatccgaagagtcttattacccacgtctgtgatcttatgagcggggcacggatccatggactcgtatttggcgacgacactgaccaggaggcagtcgctcagatgctcgactttatcagcagccacacattcgtgcccatccttgggattcatgggggagccagtatgatcatggctgacaaagaccctacttccactttctttcaatttggtgcatcgattcagcagcaggccaccgtgatgttgaagattatgcaagactatgactggcacgtgttttctctggtcaccactatttttccaggctatagggagtttatctcctttgtgaagaccactgttgacaattccttcgtgggttgggacatgcagaacgttatcacgcttgataccagcttcgaggatgccaaaacccaagtgcagttgaagaaaatccactcgtcggtcatattgctatactgcagcaaggacgaggccgtcttgatcttaagcgaagcacggagccttggcctaacgggctatgactttttttggatcgtcccatccttagtgagcgggaacacagagttgatccctaaagagtttccttccggccttatctccgtctcgtacgatgactgggactattctcttgaagcgagagtgagagacggtatcggcattctcactactgccgcatccagcatgctggaaaaattttcgtacattccagaggccaaagccagctgctatgggcagatggaacgaccagaagtccctatgcacactcttcaccccttcatggtcaatgttacctgggacgggaaagatttgagtttcaccgaagagggataccaagtccatcctcgtctggtcgtgattgtgttaaacaaggatcgcgagtgggagaaagttggaaaatgggagaatcataccctgagtctgagacacgccgtgtggccaaggtacaaaagcttcagtgattgtgagcccgatgacaaccacctgtctatagtcaccctggaggaagcacctttcgtcatcgttgaggacattgacccgctgaccgagacatgtgtgcggaacaccgttccttgtaggaagtttgtgaaaattaacaatagtactaatgaagggatgaatgtgaagaagtgctgtaaggggttctgtatcgatattttaaagaaattgagcaggacggtcaaattcacatacgacctgtatctggtgaccaacggcaaacacgggaagaaggttaacaacgtatggaatggaatgattggcgaagtcgtgtaccagagagctgtgatggccgttgggagcttaaccattaacgaggaacgatccgaggtcgtggacttttcggtcccctttgtggagacgggcatctctgttatggtctccagaagcaatggcacagtttccccttccgccttcttggaaccattcagtgctagcgtctgggtgatgatgttcgttatgctcctgatagtctctgctatcgccgtgtttgtcttcgaatacttctctcctgtgggatacaataggaaccttgcaaagggaaaagcccctcacggcccatccttcaccatcggcaaggccatctggcttctgtggggactggtgtttaacaacagtgttccggtgcagaatcctaaaggtacgacgtccaaaatcatggtatctgtatgggcatttttcgcggtgatctttctcgcatcatatacagccaatcttgccgctttcatgatacaggaggaatttgttgaccaggtgacaggcctgtccgacaaaaagttccagcgacctcacgactactcccccccattcagatttggtaccgttcccaacggatcaaccgagaggaacatcaggaacaattacccttatatgcatcaatatatgacaaaattcaaccagaaaggcgtggaggacgcccttgttagtctcaaaaccgggaagctggacgcgttcatctacgacgcagctgttctgaattataaagcgggaagggacgagggatgtaaattagttacaatagggtctggctacatctttgcaactactggctacggcattgcactacagaagggctctccttggaagcggcagatcgacctggcattgctccagtttgtgggagacggggagatggaggaacttgagacattgtggcttaccggcatttgtcacaatgagaagaacgaggtgatgtcttctcagctggacatcgacaacatggcgggtgtattctacatgttagccgcagctatggcactgtcactaatcactttcatttgggaacacttattctattggaagctgaggttttgttttacaggtgtgtgcagcgatcgcccaggactcctttttagtattagtcgcggtatttactcatgcatccacggggtgcacattgaggagaagaaaaagagccctgatttcaatctgactgggtcccagtcaaacatgctcaaactgctccgatccgctaagaacatttcatctatgagcaatatgaattcatcgagaatggactcaccaaaacgtgcagccgactttattcaaagggggtcactgattatggacatggtctcggacaaaggcaatttgatgtattcagataaccgcagtttccaagggaaagagtcaatatttggcgacaacatgaatgagctgcagacatttgttgccaaccggcaaaaggacaatctcaacaattatgtcttccagggccagcacccattaactctgaacgaatcaaatcctaacactgtggaagtcgccgtgtctaccgagtccaaggctaactccaggccaaggcagctgtggaaaaaaagcgtcgactctatcaggcaagactccctgagccagaaccccgtgagccagagggacgaggccaccgctgaaaataggacacattcactgaaaagtccccgatacctgcccgaagaaatggcccactctgacatcagcgaaacttcaaaccgtgctacctgtcacagggaaccggataacagcaaaaatcacaagaccaaggataatttcaaacgcagtgtggcctccaagtaccctaaagattgctctgaggtggagcgaacatacctaaaaacgaagtcctcaagcccccgagacaagatatacacgatcgatggtgagaaggagcccggattccacctcgatccccctcaattcgtggaaaatgttactctgccagagaacgtagatttcccagatccgtatcaagatcccagtgaaaactttcggaagggcgattccactctgcccatgaatcgaaaccccctccacaacgaggagggcctgagcaacaacgatcagtacaagttatatagtaagcactttacactcaaagataaagggtcgccacactctgaaaccagtgagcggtacagacagaattccacccattgcaggtcttgtctcagcaacatgcccacctatagcggtcactttaccatgcgcagcccttttaagtgcgacgcctgcctccgaatgggaaatctttacgacattgatgaagatcagatgctccaggaaaccggaaaccccgctactggtgaacaagtgtatcagcaagactgggctcagaataatgctctccagctacaaaagaataagttaagaatatctcggcagcattcctatgataacatagtcgataagccacgagaattggatctgagtcgaccttctcgctccataagcctgaaggatagggagaggctgctcgagggaaatttctatggaagcctgttttcagtgccttcttccaagctgtctgggaagaagagctccctctttccacagggactggaggacagcaagaggtcaaaatccctactccctgatcacactagtgataatccgtttctgcacagtcatcgagacgaccaaaggttggtcattggaaggtgtccgagcgacccctacaaacacagtctgccatcacaggccgttaacgacagttacctgaggagcagcctcagatctacggccagttattgtagccgggattctagggggcacaacgatgtctatattagcgaacatgtcatgccttacgccgcaaacaagaataatatgtactcaacgcctcgcgtgctgaatagctgttctaaccgcagggtttataaaaaaatgccaagcattgagagcgatgtgtag

SEQ ID NO: 16432 - DNA, 4395 bp, Artificial Sequence
  derived and/or modified sequence
atgggcagagtgggctactggaccctgctggtgctgcccgccctgctggtgtggagaggccccgcccccagcgccgccgccgagaagggcccccccgccctgaacatcgccgtgatgctgggccacagccacgacgtgaccgagagagagctgagaaccctgtggggccccgagcaggccgccggcctgcccctggacgtgaacgtggtggccctgctgatgaacagaaccgaccccaagagcctgatcacccacgtgtgcgacctgatgagcggcgccagaatccacggcctggtgttcggcgacgacaccgaccaggaggccgtggcccagatgctggacttcatcagcagccacaccttcgtgcccatcctgggcatccacggcggcgccagcatgatcatggccgacaaggaccccaccagcaccttcttccagttcggcgccagcatccagcagcaggccaccgtgatgctgaagatcatgcaggactacgactggcacgtgttcagcctggtgaccaccatcttccccggctacagagagttcatcagcttcgtgaagaccaccgtggacaacagcttcgtgggctgggacatgcagaacgtgatcaccctggacaccagcttcgaggacgccaagacccaggtgcagctgaagaagatccacagcagcgtgatcctgctgtactgcagcaaggacgaggccgtgctgatcctgagcgaggccagaagcctgggcctgaccggctacgacttcttctggatcgtgcccagcctggtgagcggcaacaccgagctgatccccaaggagttccccagcggcctgatcagcgtgagctacgacgactgggactacagcctggaggccagagtgagagacggcatcggcatcctgaccaccgccgccagcagcatgctggagaagttcagctacatccccgaggccaaggccagctgctacggccagatggagagacccgaggtgcccatgcacaccctgcaccccttcatggtgaacgtgacctgggacggcaaggacctgagcttcaccgaggagggctaccaggtgcaccccagactggtggtgatcgtgctgaacaaggacagagagtgggagaaggtgggcaagtgggagaaccacaccctgagcctgagacacgccgtgtggcccagatacaagagcttcagcgactgcgagcccgacgacaaccacctgagcatcgtgaccctggaggaggcccccttcgtgatcgtggaggacatcgaccccctgaccgagacctgcgtgagaaacaccgtgccctgcagaaagttcgtgaagatcaacaacagcaccaacgagggcatgaacgtgaagaagtgctgcaagggcttctgcatcgacatcctgaagaagctgagcagaaccgtgaagttcacctacgacctgtacctggtgaccaacggcaagcacggcaagaaggtgaacaacgtgtggaacggcatgatcggcgaggtggtgtaccagagagccgtgatggccgtgggcagcctgaccatcaacgaggagagaagcgaggtggtggacttcagcgtgcccttcgtggagaccggcatcagcgtgatggtgagcagaagcaacggcaccgtgagccccagcgccttcctggagcccttcagcgccagcgtgtgggtgatgatgttcgtgatgctgctgatcgtgagcgccatcgccgtgttcgtgttcgagtacttcagccccgtgggctacaacagaaacctggccaagggcaaggccccccacggccccagcttcaccatcggcaaggccatctggctgctgtggggcctggtgttcaacaacagcgtgcccgtgcagaaccccaagggcaccaccagcaagatcatggtgagcgtgtgggccttcttcgccgtgatcttcctggccagctacaccgccaacctggccgccttcatgatccaggaggagttcgtggaccaggtgaccggcctgagcgacaagaagttccagagaccccacgactacagcccccccttcagattcggcaccgtgcccaacggcagcaccgagagaaacatcagaaacaactacccctacatgcaccagtacatgaccaagttcaaccagaagggcgtggaggacgccctggtgagcctgaagaccggcaagctggacgccttcatctacgacgccgccgtgctgaactacaaggccggcagagacgagggctgcaagctggtgaccatcggcagcggctacatcttcgccaccaccggctacggcatcgccctgcagaagggcagcccctggaagagacagatcgacctggccctgctgcagttcgtgggcgacggcgagatggaggagctggagaccctgtggctgaccggcatctgccacaacgagaagaacgaggtgatgagcagccagctggacatcgacaacatggccggcgtgttctacatgctggccgccgccatggccctgagcctgatcaccttcatctgggagcacctgttctactggaagctgagattctgcttcaccggcgtgtgcagcgacagacccggcctgctgttcagcatcagcagaggcatctacagctgcatccacggcgtgcacatcgaggagaagaagaagagccccgacttcaacctgaccggcagccagagcaacatgctgaagctgctgagaagcgccaagaacatcagcagcatgagcaacatgaacagcagcagaatggacagccccaagagagccgccgacttcatccagagaggcagcctgatcatggacatggtgagcgacaagggcaacctgatgtacagcgacaacagaagcttccagggcaaggagagcatcttcggcgacaacatgaacgagctgcagaccttcgtggccaacagacagaaggacaacctgaacaactacgtgttccagggccagcaccccctgaccctgaacgagagcaaccccaacaccgtggaggtggccgtgagcaccgagagcaaggccaacagcagacccagacagctgtggaagaagagcgtggacagcatcagacaggacagcctgagccagaaccccgtgagccagagagacgaggccaccgccgagaacagaacccacagcctgaagagccccagatacctgcccgaggagatggcccacagcgacatcagcgagaccagcaacagagccacctgccacagagagcccgacaacagcaagaaccacaagaccaaggacaacttcaagagaagcgtggccagcaagtaccccaaggactgcagcgaggtggagagaacctacctgaagaccaagagcagcagccccagagacaagatctacaccatcgacggcgagaaggagcccggcttccacctggaccccccccagttcgtggagaacgtgaccctgcccgagaacgtggacttccccgacccctaccaggaccccagcgagaacttcagaaagggcgacagcaccctgcccatgaacagaaaccccctgcacaacgaggagggcctgagcaacaacgaccagtacaagctgtacagcaagcacttcaccctgaaggacaagggcagcccccacagcgagaccagcgagagatacagacagaacagcacccactgcagaagctgcctgagcaacatgcccacctacagcggccacttcaccatgagaagccccttcaagtgcgacgcctgcctgagaatgggcaacctgtacgacatcgacgaggaccagatgctgcaggagaccggcaaccccgccaccggcgagcaggtgtaccagcaggactgggcccagaacaacgccctgcagctgcagaagaacaagctgagaatcagcagacagcacagctacgacaacatcgtggacaagcccagagagctggacctgagcagacccagcagaagcatcagcctgaaggacagagagagactgctggagggcaacttctacggcagcctgttcagcgtgcccagcagcaagctgagcggcaagaagagcagcctgttcccccagggcctggaggacagcaagagaagcaagagcctgctgcccgaccacaccagcgacaaccccttcctgcacagccacagagacgaccagagactggtgatcggcagatgccccagcgacccctacaagcacagcctgcccagccaggccgtgaacgacagctacctgagaagcagcctgagaagcaccgccagctactgcagcagagacagcagaggccacaacgacgtgtacatcagcgagcacgtgatgccctacgccgccaacaagaacaacatgtacagcacccccagagtgctgaacagctgcagcaacagaagagtgtacaagaagatgcccagcatcgagagcgacgtgtag

SEQ ID NO: 16433 - protein, 1233 aa, Artificial Sequence
  derived and/or modified sequence
MGGALGPALLLTSLFGAWAGLGPGQGEQGMTVAVVFSSSGPPQAQFRARLTPQSFLDLPLEIQPLTVGVNTTNPSSLLTQICGLLGAAHVHGIVFEDNVDTEAVAQILDFISSQTHVPILSISGGSAVVLTPKEPGSAFLQLGVSLEQQLQVLFKVLEEYDWSAFAVITSLHPGHALFLEGVRAVADASHVSWRLLDVVTLELGPGGPRARTQRLLRQLDAPVFVAYCSREEAEVLFAEAAQAGLVGPGHVWLVPNLALGSTDAPPATFPVGLISVVTESWRLSLRQKVRDGVAILALGAHSYWRQHGTLPAPAGDCRVHPGPVSPAREAFYRHLLNVTWEGRDFSFSPGGYLVQPTMVVIALNRHRLWEMVGRWEHGVLYMKYPVWPRYSASLQPVVDSRHLTVATLEERPFVIVESPDPGTGGCVPNTVPCRRQSNHTFSSGDVAPYTKLCCKGFCIDILKKLARVVKFSYDLYLVTNGKHGKRVRGVWNGMIGEVYYKRADMAIGSLTINEERSEIVDFSVPFVETGISVMVARSNGTVSPSAFLEPYSPAVWVMMFVMCLTVVAITVFMFEYFSPVSYNQNLTRGKKSGGPAFTIGKSVWLLWALVFNNSVPIENPRGTTSKIMVLVWAFFAVIFLASYTANLAAFMIQEQYIDTVSGLSDKKFQRPQDQYPPFRFGTVPNGSTERNIRSNYRDMHTHMVKFNQRSVEDALTSLKMGKLDAFIYDAAVLNYMAGKDEGCKLVTIGSGKVFATTGYGIAMQKDSHWKRAIDLALLQFLGDGETQKLETVWLSGICQNEKNEVMSSKLDIDNMAGVFYMLLVAMGLALLVFAWEHLVYWKLRHSVPNSSQLDFLLAFSRGIYSCFSGVQSLASPPRQASPDLTASSAQASVLKMLQAARDMVTTAGVSSSLDRATRTIENWGGGRRAPPPSPCPTPRSGPSPCLPTPDPPPEPSPTGWGPPDGGRAALVRRAPQPPGRPPTPGPPLSDVSRVSRRPAWEARWPVRTGHCGRHLSASERPLSPARCHYSSFPRADRSGRPFLPLFPELEDLPLLGPEQLARREALLHAAWARGSRPRHASLPSSVAEAFARPSSLPAGCTGPACARPDGHSACRRLAQAQSMCLPIYREACQEGEQAGAPAWQHRQHVCLHAHAHLPFCWGAVCPHLPPCASHGSWLSGAWGPLGHRGRTLGLGTGYRDSGGLDEISRVARGTQGFPGPCTWRRISSLESEV

SEQ ID NO: 16434 - protein, 1336 aa, Artificial Sequence
  derived and/or modified sequence
MRGAGGPRGPRGPAKMLLLLALACASPFPEEAPGPGGAGGPGGGLGGARPLNVALVFSGPAYAAEAARLGPAVAAAVRSPGLDVRPVALVLNGSDPRSLVLQLCDLLSGLRVHGVVFEDDSRAPAVAPILDFLSAQTSLPIVAVHGGAALVLTPKEKGSTFLQLGSSTEQQLQVIFEVLEEYDWTSFVAVTTRAPGHRAFLSYIEVLTDGSLVGWEHRGALTLDPGAGEAVLSAQLRSVSAQIRLLFCAREEAEPVFRAAEEAGLTGSGYVWFMVGPQLAGGGGSGAPGEPPLLPGGAPLPAGLFAVRSAGWRDDLARRVAAGVAVVARGAQALLRDYGFLPELGHDCRAQNRTHRGESLHRYFMNITWDNRDYSFNEDGFLVNPSLVVISLTRDRTWEVVGSWEQQTLRLKYPLWSRYGRFLQPVDDTQHLTVATLEERPFVIVEPADPISGTCIRDSVPCRSQLNRTHSPPPDAPRPEKRCCKGFCIDILKRLAHTIGFSYDLYLVTNGKHGKKIDGVWNGMIGEVFYQRADMAIGSLTINEERSEIVDFSVPFVETGISVMVARSNGTVSPSAFLEPYSPAVWVMMFVMCLTVVAVTVFIFEYLSPVGYNRSLATGKRPGGSTFTIGKSIWLLWALVFNNSVPVENPRGTTSKIMVLVWAFFAVIFLASYTANLAAFMIQEEYVDTVSGLSDRKFQRPQEQYPPLKFGTVPNGSTEKNIRSNYPDMHSYMVRYNQPRVEEALTQLKAGKLDAFIYDAAVLNYMARKDEGCKLVTIGSGKVFATTGYGIALHKGSRWKRPIDLALLQFLGDDEIEMLERLWLSGICHNDKIEVMSSKLDIDNMAGVFYMLLVAMGLSLLVFAWEHLVYWRLRHCLGPTHRMDFLLAFSRGMYSCCSAEAAPPPAKPPPPPQPLPSPAYPAPRPAPGPAPFVPRERASVDRWRRTKGAGPPGGAGLADGFHRYYGPIEPQGLGLGLGEARAAPRGAAGRPLSPPAAQPPQKPPPSYFAIVRDKEPAEPPAGAFPGFPSPPAPPAAAATAVGPPLCRLAFEDESPPAPARWPRSDPESQPLLGPGAGGAGGTGGAGGGAPAAPPPCRAAPPPCPYLDLEPSPSDSEDSESLGGASLGGLEPWWFADFPYPYAERLGPPPGRYWSVDKLGGWRAGSWDYLPPRSGPAAWHCRHCASLELLPPPRHLSCSHDGLDGGWWAPPPPPWAAGPLPRRRARCGCPRSHPHRPRASHRTPAAAAPHHHRHRRAAGGWDLPPPAPTSRSLEDLSSCPRAAPARRLTGPSRHARRCPHAAHWGPPLPTASHRRHRGGDLGTRRGSAHFSSLESEV

SEQ ID NO: 16435 - DNA, 375 bp, Artificial Sequence
  derived and/or modified sequence
atgaccccccagggccggggcaccgtggccgccgccgccgtggccgcgacggctagtattgcaggcgcacccacccaatacccccctggtcggggtacccctcccccgccagtcgggcgcgcgacccctccaccagggatcatggcaccccctccagggatgcgcccaccaatgggcccgcctattggcctgccccccgcgcgcggcacacccataggaatgcctcctccagggatgcgccctccaccacccggaattcggggcgaggcctttctgcttgcattggtttgctggtacgggtggcctctggacttcggaatgagtgactatgccgcgtatctcaagaaaacttgcttccaggacctattcaactag

SEQ ID NO: 16436 - DNA, 4011 bp, Artificial Sequence
  derived and/or modified sequence
atgagaggcgcaggcggacctaggggcccccggggcccagctaagatgctcctgcttctggctctggcttgtgcatcacctttccccgaagaagcaccaggtccagggggggcaggtgggccaggggggggcctggggggagctaggccgcttaatgtcgctctggtattttccggccctgcttacgccgcagaggctgccaggctgggacccgctgtcgctgctgccgttcggagtcccgggttggacgttagacccgtggccctggtcctgaatggcagtgatcctcgctctttagtgctgcagctgtgtgacttgctgtccggattaagagtgcacggtgtggtattcgaggacgattcgcgggccccggcagttgctcctatccttgatttccttagcgcccagacaagtctaccaattgtggccgtacatggaggagcagctttagttttgactcccaaggaaaaagggtcgacttttctccaattgggatcatcgactgagcaacagctccaggttatttttgaagtcctggaggagtatgattggactagctttgtggcagtcacaactagggccccaggccaccgagcctttttgtcgtacattgaggttctgactgatgggtcactcgttggatgggagcacagaggagccctaaccctggacccaggagcaggcgaagctgtgctctcagctcagctcaggagcgtgtcagctcagataagactccttttttgcgctcgagaagaggccgagccagtgttcagagccgctgaggaagccgggctcaccggcagcggctatgtatggttcatggttggtccacagctcgccggcggagggggtagcggagccccgggcgagccccctttgctgccaggaggtgcccctctgccagctgggctgttcgccgtccggagtgctggctggagagacgatctggccaggagggtggctgccggtgtggctgttgtcgcccgcggtgcccaggccttgctgagagactacggcttcctgcctgagttaggacacgactgtagggcccagaatcgtactcaccgcggggagtctctccaccgctatttcatgaacattacctgggataacagagactatagcttcaacgaggacggattcctggtcaacccctctcttgtagtgatttcactgacgcgcgaccggacatgggaagttgtgggatcttgggaacagcagactttgcgtctgaagtatcctctgtggtctcgttatggacggttcctgcaacccgtggatgatacacagcatctcaccgtcgcaacactcgaagaacgaccatttgtgatcgtggaacccgcggaccccataagtggcacctgcatcagagacagcgtaccctgccgatctcagctcaacagaactcactctccacccccagacgcacctcgtccggagaagaggtgttgtaagggattctgcattgatatcctgaaacggctcgcccataccatcgggttctcttacgatttgtacctggtgaccaatgggaagcacgggaagaaaatagatggcgtttggaatgggatgatcggggaggttttctaccagcgggcagatatggccatcggttccttgactatcaatgaagagagatcagagattgtcgacttttccgtgcccttcgtcgagacagggattagcgtgatggtggctagatctaatggaaccgtgtcccctagtgcgtttcttgaaccttattctccagcggtgtgggtgatgatgtttgttatgtgtttgacggttgtcgcggtgaccgtttttatcttcgaatatctctctccagtaggatacaaccgttcccttgcaactggtaaacggcctggcgggtcaacattcacgattggcaagtccatttggctgctatgggcgctcgtcttcaacaacagtgtcccagtggaaaatcctcggggaacaacaagcaagattatggtactagtatgggctttctttgctgtaatttttcttgcctcctataccgcaaatctggccgcctttatgattcaggaagaatacgtcgataccgtttctgggctttccgatagaaagttccaaaggccccaagagcagtacccccctcttaaatttggaacggtgcctaacggctcaacagagaagaacatacgatctaattaccccgatatgcattcctacatggtgcgatacaatcaacccagggttgaagaagctctcacccagctgaaagccggaaagcttgacgccttcatctacgacgctgccgttctgaattacatggcacgaaaggacgagggatgcaaactggtaaccatcggatcaggaaaagttttcgcgactactgggtacggaatagcactccataaaggatctcggtggaaacggcccatagatctggctctgctccagtttttaggggacgacgaaattgagatgctcgagcggctgtggttgtctgggatctgtcacaatgacaagattgaagtcatgagttctaagctggacatcgacaatatggctggagttttctatatgctgctggtggccatgggcttatccctgctcgtgtttgcatgggaacacctggtttattggcgacttcggcactgcttaggaccaacccaccgaatggacttcttgttggccttcagccggggaatgtattcttgttgctcggcagaagcagccccccctccggccaaaccccccccacccccacagcctctgccctctcctgcctaccccgcacctagacctgcaccaggccccgctcccttcgtccctcgcgagcgcgcttctgtggatcgttggcgccggaccaaaggtgccgggcccccgggtggggccggcctggccgatggattccatcgttactacgggcccatcgaaccccaggggttaggcctcggtctgggagaagccagagccgccccccgaggagcggcgggtaggcccctctccccacctgcagcccagcccccgcagaaacctcctcctagttacttcgccattgtgcgagataaggaaccggcggagccaccagcaggtgctttccccgggtttccctccccacctgccccccccgccgcagccgctaccgccgtgggtccacctctgtgcagactggctttcgaggatgaaagccctcctgctcctgcgcgatggcctcgttcggaccccgagagccagccactgctcgggcctggcgcagggggcgctgggggcacaggtggcgccggaggcggggcacctgcagccccacctccatgcagggcagctccaccgccctgcccttatctagatctcgagccctccccgtccgatagtgaggactccgagtcactcggcggcgcctcactggggggcctggagccctggtggtttgcggactttccttacccctatgccgagcgactgggtcccccacctgggcgctattggtcagtggataagcttgggggttggcgggccggctcctgggactacctgcctcccaggagtggacctgctgcgtggcactgtaggcattgtgcctccctggagcttctgccacctccccgacacctgtcctgttcccatgatggactggatgggggctggtgggcccccccccctcctccatgggcagcaggacctctacctcggcgaagggcgaggtgtggatgtccaaggtcgcatccgcacagaccccgggcgagtcacagaacgccagccgctgcagcaccccatcatcatcgccaccgccgggcggctggcgggtgggacctgcctccgccggcaccaacctcccggagcctcgaggacctctccagctgcccgcgcgcggcccccgctcggcggttaaccggaccctccagacacgccaggcgatgtccacacgccgcgcactggggaccgcctctgcctacggcgagccacagaagacacagaggaggcgacctcggaacccgacggggatccgctcacttctcttctctggagtcagaggtgtag

SEQ ID NO: 16437 - DNA, 5092 bp, Artificial Sequence
  derived and/or modified sequence
ggacgccgggttccggtcctggcccccccgccatccccccaacagaacagggtcatgaaaagaggccgcccggcggggcccgcaggcgatgcgcggcgccggtggcccccgcggccctcggggccccgctaagatgctgctgctgctggcgctggcctgcgccagcccgttcccggaggaggcgccggggccgggcggggccggtgggcccggcggcggcctcggcggggcgcggccgctcaacgtggcgctcgtgttctcggggcccgcgtacgcggccgaggcggcacgcctgggcccggccgtggcggcggcggtgcgcagcccgggcctagacgtgcggcccgtggcgctggtgctcaacggctcggacccgcgcagcctcgtgctgcagctctgcgacctgctgtcggggttgcgcgtgcacggcgtggtcttcgaagacgactcgcgcgcgcccgccgtcgcgcccatcctcgacttcctgtcggcgcagacctcgctgcccatcgtggccgtgcacggcggcgccgcgctcgtgctcacgcccaaggagaagggctccaccttcctgcagctgggctcttccaccgagcaacagcttcaggtcatctttgaggtgctggaggagtatgactggacgtcctttgtagccgtgaccactcgtgcccctggccaccgggccttcctgtcctacattgaggtgctgactgacggtagtctggtgggctgggagcaccgcggagcgctgacgctggaccctggggcgggcgaggccgtgctcagtgcccagctccgcagtgtcagcgcgcagatccgcctgctcttctgcgcccgagaggaggccgagcccgtgttccgcgcagctgaggaggctggcctcactggatctggctacgtctggttcatggtggggccccagctggctggaggcgggggctctggggcccctggtgagccccctcttctgccaggaggcgcccccctgcctgccgggctgtttgcagtgcgctcggctggctggcgggatgacctggctcggcgagtggcagctggcgtggccgtagtggccagaggtgcccaggccctgctgcgtgattatggtttccttcctgagctcggccacgactgtcgcgcccagaaccgcacccaccgcggcgagagtctgcataggtacttcatgaacatcacgtgggataaccgggattactccttcaatgaggacggcttcctagtgaacccctccctggtggtcatctccctcaccagagacaggacgtgggaggtggtgggcagctgggagcagcagacgctccgcctcaagtacccgctgtggtcccgctatggtcgcttcctgcagccagtggacgacacgcagcacctcacggtggccacgctggaggaaaggccgtttgtcatcgtggagcctgcagaccctatcagcggcacctgcatccgagactccgtcccctgccggagccagctcaaccgaacccacagccctccaccggatgccccccgcccggaaaagcgctgctgcaagggtttctgcatcgacattctgaagcggctggcgcataccatcggcttcagctacgacctctacctggtcaccaatggcaagcacggaaagaagatcgatggcgtctggaacggcatgatcggggaggtgttctaccagcgcgcagacatggccatcggctccctcaccatcaacgaggagcgctccgagatcgtggacttctccgtccccttcgtggagaccggcatcagcgtcatggtggcgcgcagcaatggcacggtgtccccctcggccttcctcgagccctacagccccgccgtgtgggtgatgatgttcgtcatgtgcctcactgtggtcgccgtcactgttttcatcttcgagtacctcagtcctgttggttacaaccgcagcctggccacgggcaagcgccctggcggttcaaccttcaccattgggaaatccatctggctgctctgggccctggtgttcaataattcggtgcccgtggagaacccccggggaaccaccagcaaaatcatggtgctggtgtgggccttcttcgccgtcatcttcctcgccagctacacagccaacctggccgccttcatgatccaggaggagtacgtggatactgtgtctgggctcagtgaccgcaagttccagaggccccaggagcagtacccgcccctgaagtttgggaccgtgcccaacggctccacggagaagaacatccgcagcaactatcccgacatgcacagctacatggtgcgctacaaccagccccgcgtagaggaagcgctcactcagctcaaggcagggaagctggacgccttcatctacgatgctgcagtgctcaattacatggcccgcaaggacgagggctgcaagcttgtcaccatcggctccggcaaggtcttcgccacgacaggctatggcatcgccctgcacaagggctcccgctggaagcggcccatcgacctggcgttgctgcagttcctgggggatgatgagatcgagatgctggagcggctgtggctctctgggatctgccacaatgacaaaatcgaggtgatgagcagcaagctggacatcgacaacatggcgggcgtcttctacatgctcctggtggccatgggcctgtccctgctggtcttcgcctgggagcacctggtgtactggcgcctgcggcactgcctggggcccacccaccgcatggacttcctgctggccttctccaggggcatgtacagctgctgcagcgctgaggccgccccaccgcccgccaagcccccgccgccgccacagcccctgcccagccccgcgtaccccgcgccgcggccggctcccgggcccgcacctttcgtgccccgcgagcgcgcctcagtggaccgctggcgccggaccaagggcgcggggccgccggggggcgcgggcctggccgacggcttccaccgctactacggccccatcgagccgcagggcctaggcctcggcctgggcgaagcgcgcgcggcaccgcggggcgcagccgggcgcccgctgtccccgccggccgctcagcccccgcagaagccgccgccctcctatttcgccatcgtacgcgacaaggagccagccgagccccccgccggcgccttccccggcttcccgtcgccgcccgcgccccccgccgccgcggccaccgccgtcgggccgccactctgccgcttggccttcgaggacgagagcccgccggcgcccgcgcggtggccgcgctcggaccccgagagccaacccctgctggggccaggcgcgggcggcgcggggggcacggggggcgcaggcggaggagccccggccgctccgcccccgtgccgcgccgcgccgcccccgtgcccttacctcgatctcgagccgtcgccgtcggactcggaggactcggagagcctgggcggcgcgtcgctgggcggcctggagccctggtggttcgccgacttcccttacccgtatgccgagcgcctcgggccgccgcccggccgctactggtcggtcgacaagctcgggggctggcgcgccgggagctgggactacctgcccccgcgcagcggtccggccgcctggcactgtcggcactgcgccagcctggagctgctgccgccgccgcgccatctcagctgctcgcacgatggcctggacggcggctggtgggcgccaccgcctccaccctgggccgccgggcccctgccccgacgccgggcccgctgcgggtgcccgcggtcgcacccgcaccgcccgcgggcctcgcaccgcacgcccgccgccgccgcgccccaccaccacaggcaccggcgcgccgctgggggctgggacctcccgccgcccgcgcccacctcgcgctcgctcgaggacctcagctcgtgccctcgcgccgcccctgcgcgcaggcttaccgggccctcccgccacgctcgcaggtgtccgcacgccgcgcactgggggccgccgctgcccacagcttcccaccggagacaccggggcggggacctgggcacccgcaggggctcggcgcacttctctagcctcgagtccgaggtatgacgcggccccgggggccccaccgcccccttggtcagcgcaggccacggcccgagggggcgcccgcagtggacaggacccgcgtgggttgggaaggaaagcagtggaactggccggaccccgcctggagcagcgtcctgcgccccctggttctggaggaaccgcaagccggagaggatttggtccctcaactatcacccagcctgagaacgagggggcgggggccttggagcccaccggacttttttttaaacccgacaagggctttttaacgtcaccagatggggcgggaggtggggggttcacgccactcccgcgtcccacctccacgcccggggccgtggcccccacatcactgtgcagctccccggccccagccgcgcctccggggaagcccgtttttaacctttcatccattgggactcaaaactgtgagacgcgttcgccaaactgtgaccccagaccttggccccgccacacagaaacccctgacccagactgtgacatccgactcctaaaatggtcatccgactccagactgtgacccctgaccccaaactgtgacccgaaccccagactgtgccccgaccagactgtgacccttgacatcaaaccgtgacaccccctcctcctcttccaccctcggtcgcttttccctactctgacctaggacacgtccccaacggaagccccgccttcccttgcaccgcgatgaacccaacctccctgaagccaaaacttcccaccctgccgcacctccggaccaccccacttgccaccaagcacatcctctccaaatccaacccttatttgcgacccttcagtgatgacccagcagacctccaaaaagcctcctctgcccagatctccagccgggtctggggctgggttgcggaggggagggtctgggagtccacacttctccaccaacttcccttcccactctcttattccacattgcagtgtttggaataaaccatgtttttatgcctcctc

SEQ ID NO: 16438 - DNA, 4011 bp, Artificial Sequence
  derived and/or modified sequence
atgagaggagctgggggcccccggggcccccggggccctgccaagatgctgctgctgctggccctggcctgtgccagccccttccctgaggaggcccctggccctggaggagctgggggccctgggggcggcctgggcggggcccggcccctgaatgtggccctggtgttcagcggccctgcctatgctgctgaggccgcccggctgggccctgctgtggccgctgctgtgcgcagccctggcctggatgtgcggcctgtggccctggtgctgaatggaagtgaccccaggagcctggtgctgcagctgtgtgacctgctgagcggcctgcgggtgcatggagtggtgtttgaagatgacagccgggccccagctgtggcccccatcctggacttcctgagcgcccagaccagcctgcccatcgtggccgtgcatggaggagctgccctggtgctgacccccaaggagaagggcagcaccttcctgcagctgggcagcagcacagagcagcagctgcaggtgatctttgaggtgctggaggagtatgactggaccagctttgtggccgtgaccacccgggcccctggccaccgggccttcctgagctacatcgaggtgctgacagatggcagcctggtgggctgggagcacagaggagccctgaccctggaccctggagctggggaggccgtgctgagcgcccagctgcggtctgtgtctgcccagatccggctgctcttctgtgcccgggaggaggccgagcctgtgttccgggctgctgaggaggccggcctgaccggcagcggctacgtgtggttcatggtgggcccccagctggccggcggcggcggcagcggggcccctggagagccccccctgctgcctggaggagcccccctgcctgctggcctgtttgctgtgcgctctgctggctggagagatgacctggcccggcgggtggccgccggcgtggccgtggtggcccggggggcccaggccctgctgcgggactatggcttcctgcctgagctgggccatgactgccgggcccagaacagaacccacagaggagagagcctgcaccgctacttcatgaacatcacctgggacaacagagactacagcttcaatgaagatggcttcctggtgaaccccagcctggtggtgatcagcctgacccgggacaggacctgggaggtggtgggctcctgggagcagcagaccctgcggctgaagtaccccctgtggagccgctatggccgcttcctgcagcctgtggatgacacccagcacctgactgtggccaccctggaggagcggcccttcgtcatcgtggagcctgctgaccccatcagcggcacctgcatccgggacagcgtgccctgccgcagccagctgaacagaacccacagccccccaccagatgcccccaggcctgagaagcgctgctgcaagggcttctgcatcgacatcctgaagaggctggcccacaccatcggcttctcctatgacctgtacctggtgaccaacgggaagcacggcaagaagattgatggagtgtggaatggcatgattggagaggtgttctaccagagagctgacatggccatcggcagcctgaccatcaatgaggagaggagtgaaattgtggacttctctgtgccctttgtggagaccggcatctctgtgatggtggcccggagcaatggaacagtgagccccagcgccttcctggagccctacagccctgctgtgtgggtgatgatgtttgtgatgtgcctgactgtggtggccgtgaccgtcttcatctttgagtacctgagccctgtgggctacaacagaagcctggccaccgggaagaggcctgggggcagcaccttcaccatcggcaagagcatctggctgctgtgggccctggtgttcaacaacagcgtgcctgtggagaacccccggggcaccaccagcaagatcatggtgctggtgtgggccttctttgctgtgatcttcctggccagctacacagccaacctggccgccttcatgatccaggaggagtatgtggacacagtgtctggcctgagtgacaggaagttccagaggccccaggagcagtacccacccctgaagtttggcaccgtgcccaacggcagcacagagaagaacatccgcagcaactacccagacatgcacagctacatggtgcgctacaaccagccccgggtggaggaggccctgacccagctgaaggccggcaagctggatgccttcatctatgatgctgctgtgctgaactacatggccaggaaggatgagggctgcaagctggtgaccatcggcagcggcaaggtgtttgccaccaccggctatggaattgccctgcacaagggcagccgctggaagaggcccatcgacctggccctgctgcagttcctgggagatgatgaaattgagatgctggagcggctgtggctgagcggcatctgccacaatgacaagattgaggtgatgagcagcaagctggacatcgacaacatggccggggtcttctacatgctgctggtggccatgggcctgagcctgctggtgtttgcctgggagcacctggtgtactggaggctgcggcactgcctgggccccacccacaggatggacttcctgctggccttcagccggggcatgtacagctgctgcagcgctgaggccgcccctcctccagccaagcccccacctccaccccagcccctgcccagccctgcctacccagcccccaggcctgcccctggccctgccccctttgtgccccgggagcgggcctctgtggaccgctggaggaggaccaagggagctggccccccaggaggagctggcctggctgatggcttccaccgctactacggccccatcgagccccagggcctgggcctgggcctgggggaggcccgggccgcccccagaggagctgctggccggcccctgagccccccagctgcccagcccccccagaagcccccacccagctactttgccatcgtgcgggacaaggagcctgctgagcccccagctggggccttccctggcttccccagccccccagcccctcctgctgctgctgccacagctgtgggcccccccctgtgccgcctggcctttgaagatgagagccccccagccccagcccgctggcccaggagtgaccctgagagccagcccctgctgggccctggggccggcggggccggcggcaccggcggggccggcggcggggccccagctgcccccccaccctgccgggccgcccccccaccctgcccctacctggacctggagcccagccccagcgacagcgaggacagcgagagcctgggcggggccagcctgggcggcctggagccctggtggtttgctgacttcccctacccctatgcagagcggctgggccccccacctggccgctactggagcgtggacaagctgggcggctggagggctggctcctgggactacctgccccccaggagcggccctgctgcctggcactgccgccactgtgccagcctggagctgctgcccccacccaggcacctgagctgcagccatgatggcctggatggcggctggtgggcccctcctcctccaccctgggccgccggccccctgccccggcggcgggcccgctgtggctgccccaggagccacccccaccggccccgggccagccacaggaccccagctgctgctgccccccaccaccaccgccaccggcgggctgctgggggctgggacctgcccccaccagcccccaccagccgcagcctggaggacctgagcagctgccccagggctgccccagcccggcggctgaccggccccagcagacatgcccggcgctgcccccacgccgcccactggggcccccccctgcccacagccagccacagaagacacagaggaggagacctgggcacccggcggggcagcgcccacttcagcagcctggagagcgaggtgtag

SEQ ID NO: 16439 - DNA, 4011 bp, Artificial Sequence
  derived and/or modified sequence
atgcggggcgccggcggcccccggggcccccggggccccgccaagatgttactattgctcgcactggcctgcgctagcccttttccagaagaggccccaggacccggcggggctggcggacccggggggggccttggcggtgccagacccttaaacgtcgcactcgtgtttagcggacctgcatatgcggccgaggctgcgcgacttggtcctgctgtggccgccgccgttcgcagccctggcttggacgtgcgccccgtggcacttgtattaaacggttctgacccacgctcactggtgctccagctgtgcgacctcctgagcggtctaagagtacatggtgtggtattcgaggacgattcaagggcacctgccgtggcccctatacttgattttctgagcgctcagacaagcctacctatagttgcggttcacggcggagctgccctcgttctgacaccaaaggaaaaagggtcaacatttttgcagttaggatcatcaactgaacagcagctgcaggttatatttgaagtgctggaggagtacgactggaccagcttcgtggctgtgaccacacgtgctccaggccaccgggcatttttgtcttacatcgaggtgttgaccgacggatccttagtgggctgggaacataggggggcccttacactcgaccctggcgctggcgaagcagtcctcagcgctcagttgaggtccgtttccgcccagatcagactgctgttctgtgccagggaggaggccgagcctgtatttagagccgcagaggaggccggtcttaccggcagcggctacgtgtggtttatggttggtccccagctagctggaggcggcggatctggagcgccaggggaacccccactgcttccagggggagccccactgccagctggacttttcgcggtcagatctgctggatggcgcgacgacctggcgagaagagtagccgccggagttgccgtagttgctcgcggtgcccaagccctgttgcgagactacggttttctccctgaactgggccacgattgcagggctcagaatcgaactcatcgcggcgaatctctccaccgatattttatgaacatcacctgggacaatcgggactacagctttaacgaggatgggttcctggtgaatccatctctcgtcgttatctcgctgacccgcgaccgaacctgggaagttgtgggatcatgggagcagcaaactctgagactgaaatatcccctgtggtcaaggtatggacggttcctccagcctgtggacgacacacaacacctgaccgttgccaccctggaagagaggccatttgtgatagttgagcccgctgatcctatctcagggacgtgcattagggatagtgtgccctgtcgatcccaactcaatcgaacacattctcctcccccagatgcaccaagaccagagaagaggtgttgtaaaggattttgcatcgatattctgaagcggctggcccacaccattggcttctcatacgacttatatttggttacaaacgggaaacatggaaaaaagatcgatggagtttggaacggaatgataggggaagtcttttaccaaagggctgatatggctatcggcagtttaactatcaacgaggagcggtcggaaatcgtcgatttttcagtgccttttgtcgagactggcattagcgtgatggtggcaaggtctaatgggacagtgtccccttccgcttttctagagccatacagtccagccgtttgggttatgatgtttgtaatgtgccttacagtcgtggcagtgacagtgttcatttttgagtacctttcacccgttgggtacaacagatctctcgccaccggaaaaagacctggcggctctacattcacaatcggaaaatcaatttggttgctttgggcccttgtattcaataatagcgtgcccgttgaaaacccccgaggtaccacatctaagatcatggtcctggtctgggcattcttcgcagtcatcttccttgcgtcatatactgcgaacctagctgcattcatgattcaagaagagtatgtggacactgttagcggcctgagtgatagaaaatttcagcgaccgcaggaacagtatccgcccttgaagttcggtacggtgccaaacggctccacagaaaagaatatacgtagcaactatccagacatgcattcgtacatggtgcgctacaatcagccgagggtggaggaggctttaacccagttgaaagccggaaagcttgacgctttcatctatgacgcggctgttctcaactatatggccagaaaagacgagggttgcaaactcgttactataggctctgggaaagtattcgctacaacaggttacgggattgcgctccataaaggatctcgctggaagagacctatcgacctggccctgctccagtttctgggtgatgacgagattgagatgctggagcgcctgtggctgagcgggatctgccacaacgataagattgaagtgatgtcctcaaagttggacatcgataatatggccggggtattctacatgctgctcgttgccatggggctttcactgctggtctttgcctgggagcatctcgtctattggagacttcgccactgtctgggaccaacccacagaatggattttctgctggccttttcaaggggaatgtatagttgctgttcagcggaggccgcccccccaccggccaaacccccccccccacctcaacccttgccatcaccagcttacccagctcccaggcccgcccccgggccggctccatttgtgccaagagaacgcgcaagcgtcgacaggtggcgacgtaccaagggagccgggccgccagggggggccgggctggccgacgggtttcatagatactacggcccaatcgagccacaaggactggggctgggcctgggggaggcccgggctgcccctaggggtgccgctgggcgtcctctatcaccgcccgccgcccagccgcctcagaaaccccccccttcttactttgcaatcgttcgggataaagaaccagcagaaccccccgccggcgctttccctgggttcccaagcccgcctgccccgcctgccgcggccgcgactgccgttggacctccactgtgcagactcgcctttgaggacgagtcaccccccgcccctgcaagatggcctaggagcgatcctgaatctcaacctctgttgggcccaggcgctggcggtgctggtggaacggggggagctgggggcggagcccctgctgcaccacctccatgtagggcagctccaccgccatgtccgtacctggatctagagccgagtccgtctgatagcgaagactcagaaagccttggcggagcttcactcggcggactggagccatggtggtttgcggacttcccgtacccgtatgccgagcgcctgggcccacctcctggtcgatactggagcgtggacaagctgggtggttggagggccggatcctgggattatttacctccgcgctcaggccccgccgcatggcactgtcgccactgcgcctcgttagagctgcttccacccccaaggcatctctcttgcagtcacgacgggcttgacggcggctggtgggcacctcctccaccgccatgggctgccgggcctttgccgcgtaggcgggccagatgtgggtgtccccggtcccaccctcacagacctagagcctcacataggacccccgctgccgctgccccacaccaccacagacatagaagagccgcggggggctgggacttaccacctccagcccctaccagtagatccttggaggatctctcttcgtgcccccgagcggctccagcacggcgccttactgggcccagtagacacgctcggaggtgtcctcacgccgcccactggggcccccccttgccaacagccagccaccgccgtcatagggggggcgatctgggcaccagaagaggcagcgcccactttagctctttggagtctgaggtttag

SEQ ID NO: 16440 - DNA, 4011 bp, Artificial Sequence
  derived and/or modified sequence
atgaggggggcagggggacccaggggtccgcgagggccagcgaagatgctgctcctcctcgcccttgcttgtgcctctcccttccccgaggaggcacctggtcccggtggtgccggaggtcctggagggggtctaggcggtgcacgcccactgaatgtggccctagtcttctcagggccagcttacgcagccgaagctgccagattggggccagccgtcgcggcagccgtcaggtcccccggactcgacgtgcgaccagtggcactggtgcttaacgggtcagacccaaggtccctcgtgctgcagctgtgcgatctgctgagcggcctacgcgtgcacggagtcgtgtttgaagatgactccagagcacctgcagtggccccaattctggacttcctatcggctcagacatcacttcctattgtcgcagttcacggcggagccgcactcgtactgacgccaaaggaaaagggatcgacattcctgcagctgggctcgtctactgagcagcagctccaggtgatcttcgaggttttagaagagtacgactggacctcctttgtagccgtgaccactcgagcgccaggtcacagagccttcttgagctacattgaggtgctgaccgatggctctctcgtgggctgggagcacagaggcgcattgaccctcgacccgggagcaggagaagctgtcctctccgctcagctgagatccgtctcagcccagatcaggctcctgttctgtgccagagaagaggccgaaccagttttccgcgctgcggaagaagccggactaactggctctggatacgtctggtttatggtgggtcctcagctagcaggaggcggtggaagtggcgctccgggtgagcccccactgctccccggtggcgcaccgcttcctgccggtctctttgccgtgcgctccgctgggtggcgcgatgacttggccaggcgggttgctgcaggggtggctgtagtggctaggggcgcacaagcactgctacgagactacggattccttcctgagctggggcatgactgccgggctcaaaacagaacccacaggggcgaaagcctgcaccgctactttatgaatattacatgggataacagggactatagctttaacgaggatgggttcctcgtgaacccttctctggtcgtaatttcactcactcgggatcgaacatgggaggttgttggctcttgggagcagcaaaccctccgcttgaaataccccctatggtctcggtatggccgattccttcagccagttgacgacacccagcatctaaccgtagcgactcttgaggaacgcccatttgttatcgtggaacccgcagatcccataagtggtacctgtatccgggactctgtgccttgccggtcgcagctgaatcggactcacagcccccctccggacgcccctagacccgagaaacgctgctgtaagggattctgcatcgatatcctcaaaaggctagcccacacaattggcttctcttatgacctttacctagtgaccaacggcaaacacggcaaaaaaatagacggcgtctggaatggaatgataggggaggtcttctaccagcgggcagacatggcgatcggctcactgactattaatgaggaacgctccgagatcgtggatttctctgtgccatttgtggaaactgggatatctgttatggtggccagaagcaacggaacggtgtcccccagtgcattcctcgagccatattcccctgccgtgtgggtcatgatgttcgtgatgtgcctgaccgtcgtagccgttacagtgtttattttcgaatacctgtcccctgtaggttataaccggagcttagccacaggcaagcggccaggcggatctacgttcacaatcgggaagtccatctggttgctctgggcccttgtctttaataactccgttcccgttgagaatcctcgtggaaccacatcaaaaattatggtgctggtgtgggcttttttcgcagtgattttcctggccagctatacagccaacttagccgctttcatgatccaggaggagtatgtcgataccgtatcgggcctaagtgaccgaaaattccagagaccgcaagaacaatatcctccactgaagtttggtaccgtccctaacggtagtacagagaagaatataagaagcaactatcccgacatgcattcttacatggtgcgctacaatcagccaagagtggaagaagccctcactcagctgaaggccggtaagctggacgcttttatatatgatgctgctgtactcaattacatggcacgcaaggatgaagggtgcaagctggttaccatcggctcgggaaaggtcttcgcgacgactggctacggaattgcccttcataaaggcagcagatggaaacgcccaatagacctggccctgctgcagtttctgggtgacgatgagatcgagatgctggagaggctttggctgagtgggatttgccataacgataaaatagaggtgatgagcagtaagttggacatcgacaatatggctggcgttttttacatgctactcgtggcaatggggctgtccttactggtgttcgcatgggagcacctggtttattggagactccgacattgcttggggcctacacatcgcatggattttcttctcgctttcagccgcggtatgtacagctgctgctcggctgaagccgcaccgccaccggcaaagccaccacctccaccacagcccctgccctcacccgcttatcctgctcctaggcccgcaccaggccctgccccattcgtgccgcgtgaacgagcctcagtggaccggtggcgtcgaactaagggtgctggcccacctggaggggctgggctggccgacggcttccacagatattacgggcctatcgaaccccagggtttaggcctgggcctaggggaggcaagggccgctccgagaggtgccgcagggagacccctgagcccacctgccgcacagcctcctcagaagccacccccttcatatttcgctattgttcgggacaaagaaccagccgagcccccagctggtgcttttcccggtttcccatccccgccagctcctcctgcggcagccgcaaccgcagttggccctccgctttgccgcctggctttcgaggatgaaagccctcccgctcccgctcgatggcccaggagcgaccctgagtctcagcccctgctgggacccggagcaggcggagccggaggcaccggcggagccggtggaggcgctcctgcggcacctccaccctgccgcgctgcaccacccccttgtccatatctggaccttgaaccatcccctagtgacagtgaggactccgagagtttgggcggagcctctttaggcggactggaaccgtggtggtttgcggacttcccatacccttatgccgagcgactgggtcccccacccggtaggtactggtctgttgacaaattaggcggatggagggcgggatcatgggattacctgccacctcgctcaggtcccgctgcttggcactgtagacattgcgccagcctcgaactactgcctccacctcggcatttaagctgttctcatgacgggctcgacggcggatggtgggccccacccccacctccatgggctgccggtcctctgcctcgccgtagggcgagatgcggctgccctcgctcccatcctcaccgaccgagagcatctcatcgaacccccgctgccgctgctccccaccaccacaggcaccgcagggcggctggaggatgggatctgcctccccctgctccaactagtcgatcactggaagatttatcctcttgcccgagggctgcgccagctaggcgtttaactggaccatccaggcacgcacggaggtgtcctcacgctgcccattgggggcctcctttgcctactgcctcacacagaagacatcgcggaggggacctgggcactagacgagggtctgctcatttttcctcattggaaagtgaggtgtag

SEQ ID NO: 16441 - DNA, 4011 bp, Artificial Sequence
  derived and/or modified sequence
atgagaggcgccggcggccccagaggccccagaggccccgccaagatgctgctgctgctggccctggcctgcgccagccccttccccgaggaggcccccggccccggcggcgccggcggccccggcggcggcctgggcggcgccagacccctgaacgtggccctggtgttcagcggccccgcctacgccgccgaggccgccagactgggccccgccgtggccgccgccgtgagaagccccggcctggacgtgagacccgtggccctggtgctgaacggcagcgaccccagaagcctggtgctgcagctgtgcgacctgctgagcggcctgagagtgcacggcgtggtgttcgaggacgacagcagagcccccgccgtggcccccatcctggacttcctgagcgcccagaccagcctgcccatcgtggccgtgcacggcggcgccgccctggtgctgacccccaaggagaagggcagcaccttcctgcagctgggcagcagcaccgagcagcagctgcaggtgatcttcgaggtgctggaggagtacgactggaccagcttcgtggccgtgaccaccagagcccccggccacagagccttcctgagctacatcgaggtgctgaccgacggcagcctggtgggctgggagcacagaggcgccctgaccctggaccccggcgccggcgaggccgtgctgagcgcccagctgagaagcgtgagcgcccagatcagactgctgttctgcgccagagaggaggccgagcccgtgttcagagccgccgaggaggccggcctgaccggcagcggctacgtgtggttcatggtgggcccccagctggccggcggcggcggcagcggcgcccccggcgagccccccctgctgcccggcggcgcccccctgcccgccggcctgttcgccgtgagaagcgccggctggagagacgacctggccagaagagtggccgccggcgtggccgtggtggccagaggcgcccaggccctgctgagagactacggcttcctgcccgagctgggccacgactgcagagcccagaacagaacccacagaggcgagagcctgcacagatacttcatgaacatcacctgggacaacagagactacagcttcaacgaggacggcttcctggtgaaccccagcctggtggtgatcagcctgaccagagacagaacctgggaggtggtgggcagctgggagcagcagaccctgagactgaagtaccccctgtggagcagatacggcagattcctgcagcccgtggacgacacccagcacctgaccgtggccaccctggaggagagacccttcgtgatcgtggagcccgccgaccccatcagcggcacctgcatcagagacagcgtgccctgcagaagccagctgaacagaacccacagccccccccccgacgcccccagacccgagaagagatgctgcaagggcttctgcatcgacatcctgaagagactggcccacaccatcggcttcagctacgacctgtacctggtgaccaacggcaagcacggcaagaagatcgacggcgtgtggaacggcatgatcggcgaggtgttctaccagagagccgacatggccatcggcagcctgaccatcaacgaggagagaagcgagatcgtggacttcagcgtgcccttcgtggagaccggcatcagcgtgatggtggccagaagcaacggcaccgtgagccccagcgccttcctggagccctacagccccgccgtgtgggtgatgatgttcgtgatgtgcctgaccgtggtggccgtgaccgtgttcatcttcgagtacctgagccccgtgggctacaacagaagcctggccaccggcaagagacccggcggcagcaccttcaccatcggcaagagcatctggctgctgtgggccctggtgttcaacaacagcgtgcccgtggagaaccccagaggcaccaccagcaagatcatggtgctggtgtgggccttcttcgccgtgatcttcctggccagctacaccgccaacctggccgccttcatgatccaggaggagtacgtggacaccgtgagcggcctgagcgacagaaagttccagagaccccaggagcagtacccccccctgaagttcggcaccgtgcccaacggcagcaccgagaagaacatcagaagcaactaccccgacatgcacagctacatggtgagatacaaccagcccagagtggaggaggccctgacccagctgaaggccggcaagctggacgccttcatctacgacgccgccgtgctgaactacatggccagaaaggacgagggctgcaagctggtgaccatcggcagcggcaaggtgttcgccaccaccggctacggcatcgccctgcacaagggcagcagatggaagagacccatcgacctggccctgctgcagttcctgggcgacgacgagatcgagatgctggagagactgtggctgagcggcatctgccacaacgacaagatcgaggtgatgagcagcaagctggacatcgacaacatggccggcgtgttctacatgctgctggtggccatgggcctgagcctgctggtgttcgcctgggagcacctggtgtactggagactgagacactgcctgggccccacccacagaatggacttcctgctggccttcagcagaggcatgtacagctgctgcagcgccgaggccgcccccccccccgccaagccccccccccccccccagcccctgcccagccccgcctaccccgcccccagacccgcccccggccccgcccccttcgtgcccagagagagagccagcgtggacagatggagaagaaccaagggcgccggcccccccggcggcgccggcctggccgacggcttccacagatactacggccccatcgagccccagggcctgggcctgggcctgggcgaggccagagccgcccccagaggcgccgccggcagacccctgagcccccccgccgcccagcccccccagaagcccccccccagctacttcgccatcgtgagagacaaggagcccgccgagccccccgccggcgccttccccggcttccccagcccccccgccccccccgccgccgccgccaccgccgtgggcccccccctgtgcagactggccttcgaggacgagagcccccccgcccccgccagatggcccagaagcgaccccgagagccagcccctgctgggccccggcgccggcggcgccggcggcaccggcggcgccggcggcggcgcccccgccgccccccccccctgcagagccgccccccccccctgcccctacctggacctggagcccagccccagcgacagcgaggacagcgagagcctgggcggcgccagcctgggcggcctggagccctggtggttcgccgacttcccctacccctacgccgagagactgggccccccccccggcagatactggagcgtggacaagctgggcggctggagagccggcagctgggactacctgccccccagaagcggccccgccgcctggcactgcagacactgcgccagcctggagctgctgcccccccccagacacctgagctgcagccacgacggcctggacggcggctggtgggccccccccccccccccctgggccgccggccccctgcccagaagaagagccagatgcggctgccccagaagccacccccacagacccagagccagccacagaacccccgccgccgccgccccccaccaccacagacacagaagagccgccggcggctgggacctgcccccccccgcccccaccagcagaagcctggaggacctgagcagctgccccagagccgcccccgccagaagactgaccggccccagcagacacgccagaagatgcccccacgccgcccactggggcccccccctgcccaccgccagccacagaagacacagaggcggcgacctgggcaccagaagaggcagcgcccacttcagcagcctggagagcgaggtgtag

SEQ ID NO: 16442 - protein, 872 aa, Artificial Sequence [sequence omitted]

SEQ ID NO: 16443 - DNA, 2619 bp, Artificial Sequence
  derived and/or modified sequence
atgggatctctgctcgccctgttagctctgctcttactgtggggcgccgtcgccgaagggccagccaagaaagttcttaccttagaaggggatctggtcctcgggggtctgttccctgtgcaccagaagggcggcccggcggaagactgcgggcccgtgaatgagcaccgcggcatacagcgcctggaagccatgctgtttgccctggataggatcaacagggatccccatttgctccccggagtgcgtcttggggctcacattctggactcttgcagcaaagacacgcacgccctggagcaggctctggattttgttagggcgagtttgtctcggggagcagacggctcaagacacatctgcccagacggaagctatgccacacacggagacgcccccacagcaatcaccggcgttatcgggggaagctactccgatgtctctatccaagtggctaatctcttacggctgtttcagatacctcagatctcctatgccagtacctcagccaaactcagcgataaatcacgctatgactattttgcacgaactgtcccccctgatttttttcaagccaaggccatggccgagattctgcgcttcttcaattggacttacgtgtccacggtcgcttccgagggcgactacggcgagaccggtatcgaggcattcgagctggaggctcgcgctcggaacatatgcgttgctactagcgaaaaagtgggccgagccatgagcagagcagccttcgaaggggtggtgcgtgctctgttgcagaagccttccgctagggtagctgtgttatttacacgctctgaagacgctcgggagctgttagccgcctcccaacgtctaaatgcttcctttacttgggtcgcaagcgatgggtggggagcccttgaatcagtagtagccgggtcagaaggggccgcggaaggggctataaccatcgagctggcctcctacccaatctcagacttcgcttcctattttcagagtctagacccctggaataattcaagaaacccttggttccgtgaattttgggaacagcgtttccgctgctcatttaggcagcgagactgcgccgcccattccctgcgggctgttccttttgagcaggaatctaagatcatgtttgtcgtgaacgccgtctacgcgatggctcacgccttgcacaacatgcatagagcactgtgccccaacacaacccgcctgtgtgacgccatgagacccgtgaacggtcgacgtctgtataaggactttgttctgaatgtgaagtttgatgcccctttccgcccagctgatacacacaacgaagtacggtttgacagatttggtgacggcatcggcagatacaatatatttacatacttaagggccggctcaggccgctaccgttaccagaaagtcgggtattgggctgaaggccttactctagacaccagtttgatcccttgggcaagcccttcagccggacctttgcccgcctcgcgttgctctgagccctgcttgcagaatgaggtgaaatccgtccagccgggcgaagtttgttgctggttgtgcattccttgccagccttatgagtacaggcttgacgaattcacttgtgcggattgcggattgggttattggcccaatgcatccctgactggatgtttcgagctaccgcaagagtacatccggtggggagatgcctgggctgtcggaccagtgaccattgcctgcttaggggccctcgcaaccctgttcgttctaggggttttcgtacggcataacgccacccctgtggttaaggcttcgggccgggagctttgttacatcctcctcggcggcgtgttcctgtgttactgtatgacatttatcttcatcgccaaacctagtacggctgtgtgcaccctcaggcggctaggactgggcacagcattttctgtatgttactctgcactgttaacaaaaaccaatcgcattgcccgcatcttcggaggtgccagagagggcgctcagcgcccccggtttatctcgcctgccagccaggtggctatttgcctggcattaatcagtgggcagctcctgattgtggttgcctggttggtggttgaggcaccagggaccggcaaagagacagctccagagagaagagaagtggtcacgctgcggtgcaaccatagagacgctagcatgttgggatcactcgcatacaacgtgcttcttattgccctgtgcacactctacgcttttaagactaggaaatgcccagaaaactttaatgaagccaaatttataggcttcactatgtacaccacctgcattatatggctcgctttcctgcccatcttttatgtgacaagtagtgattacagagtgcagacaacgactatgtgtgtgtcggtctccctatccggttcagttgtactcgggtgcttatttgcacctaagctgcatatcatactttttcagcctcaaaaaaacgtcgtcagtcatcgggctcctacatctcgctttgggtctgccgccgccagggcttcttcttcactaggtcagggatcaggctcccagttcgtgccaactgtgtgcaatggccgcgaagttgtcgatagcacgacttcttccctctag

SEQ ID NO: 16444 - DNA, 3151 bp, Artificial Sequence
  derived and/or modified sequence
gcgcagagccagcgagccagcgagcgagcgagcgggagccggagcctcgcgccccccgctccactccgattctctccgcgccagagccagcgcgccaggagctgggtcccttcgcatctctcttcttgtctgtcctttcctggtccctgtttcctcctctctttgccttcgctgcttctaatctcatcccctggagacccaggtctgcgggacccatccatcccctttggggccatgggatcgctgcttgcgctcctggcactgctgctgctgtggggtgctgtggctgagggcccagccaagaaggtgctgaccctggagggagacttggtgctgggtgggctgttcccagtgcaccagaagggcggcccagcagaggactgtggtcctgtcaatgagcaccgtggcatccagcgcctggaggccatgctttttgcactggaccgcatcaaccgtgacccgcacctgctgcctggcgtgcgcctgggtgcacacatcctcgacagttgctccaaggacacacatgcgctggagcaggcactggactttgtgcgtgcctcactcagccgtggtgctgatggctcacgccacatctgccccgacggctcttatgcgacccatggtgatgctcccactgccatcactggtgttattggcggttcctacagtgatgtctccatccaggtggccaacctcttgaggctatttcagatcccacagattagctacgcctctaccagtgccaagctgagtgacaagtcccgctatgactactttgcccgcacagtgcctcctgacttcttccaagccaaggccatggctgagattctccgcttcttcaactggacctatgtgtccactgtggcgtctgagggcgactatggcgagacaggcattgaggcctttgagctagaggctcgtgcccgcaacatctgtgtggccacctcggagaaagtgggccgtgccatgagccgcgcggcctttgagggtgtggtgcgagccctgctgcagaagcccagtgcccgcgtggctgtcctgttcacccgttctgaggatgcccgggagctgcttgctgccagccagcgcctcaatgccagcttcacctgggtggccagtgatggttggggggccctggagagtgtggtggcaggcagtgagggggctgctgagggtgctatcaccatcgagctggcctcctaccccatcagtgactttgcctcctacttccagagcctggacccttggaacaacagccggaacccctggttccgtgaattctgggagcagaggttccgctgcagcttccggcagcgagactgcgcagcccactctctccgggctgtgccctttgagcaggagtccaagatcatgtttgtggtcaatgcagtgtacgccatggcccatgcgctccacaacatgcaccgtgccctctgccccaacaccacccggctctgtgacgcgatgcggccagttaacgggcgccgcctctacaaggactttgtgctcaacgtcaagtttgatgccccctttcgcccagctgacacccacaatgaggtccgctttgaccgctttggtgatggtattggccgctacaacatcttcacctatctgcgtgcaggcagtgggcgctatcgctaccagaaggtgggctactgggcagaaggcttgactctggacaccagcctcatcccatgggcctcaccctcagccggccccctgcccgcctctcgctgcagtgagccctgcctccagaatgaggtgaagagtgtgcagccgggcgaagtctgctgctggctctgcattccgtgccagccctatgagtaccgattggacgaattcacttgcgctgattgtggcctgggctactggcccaatgccagcctgactggctgcttcgaactgccccaggagtacatccgctggggcgatgcctgggctgtgggacctgtcaccatcgcctgcctcggtgccctggccaccctctttgtgctgggtgtctttgtgcggcacaatgccacaccagtggtcaaggcctcaggtcgggagctctgctacatcctgctgggtggtgtcttcctctgctactgcatgaccttcatcttcattgccaagccatccacggcagtgtgtaccttacggcgtcttggtttgggcactgccttctctgtctgctactcagccctgctcaccaagaccaaccgcattgcacgcatcttcggtggggcccgggagggtgcccagcggccacgcttcatcagtcctgcctcacaggtggccatctgcctggcacttatctcgggccagctgctcatcgtggtcgcctggctggtggtggaggcaccgggcacaggcaaggagacagcccccgaacggcgggaggtggtgacactgcgctgcaaccaccgcgatgcaagtatgttgggctcgctggcctacaatgtgctcctcatcgcgctctgcacgctttatgccttcaagactcgcaagtgccccgaaaacttcaacgaggccaagttcattggcttcaccatgtacaccacctgcatcatctggctggcattcctgcccatcttctatgtcacctccagtgactaccgggtacagaccaccaccatgtgcgtgtcagtcagcctcagcggctccgtggtgcttggctgcctctttgcgcccaagctgcacatcatcctcttccagccgcagaagaacgtggttagccaccgggcacccaccagccgctttggcagtgctgctgccagggccagctccagccttggccaagggtctggctcccagtttgtccccactgtttgcaatggccgtgaggtggtggactcgacaacgtcatcgctttgaagaccccatactcccgccctgacacagctgctcctgggaacctagtgcagacccacgtccagggccaggaggaagttggctggagcactgcaataatttattacccaccctatgtctgcccccaaagtcacttacccacctccttaccccagctcttcagactcagaagtcaggagccttggccaggagcctctgcagtggccactaactgcccttgtagctgtgtttcctcctggccaggcccagggctcagagaggagcaagccagggttcactctgccctggacccgggtggctg

SEQ ID NO: 16445 - DNA, 2619 bp, Artificial Sequence
  derived and/or modified sequence
atgggcagcctgctggccctgctggccctgctgctgctgtggggcgctgtggccgagggccctgccaagaaggtgctgaccctggagggggacctggtgctgggcggcctcttccctgtgcaccagaagggcggccctgctgaggactgtggccctgtgaatgagcaccggggcatccagaggctggaggccatgctgtttgccctggaccgcatcaacagagacccccacctgctgcccggggtgcggctgggcgcccacatcctggacagctgcagcaaggacacccacgccctggagcaggccctggactttgtgcgggccagcctgagcagaggagcagatggcagccgccacatctgcccagatggcagctatgccacccatggagatgcccccacagccatcactggagtcatcggcggcagctacagtgatgtgtccatccaggtggccaacctgctgcggctcttccagatcccccagatctcctatgccagcaccagcgccaagctgagtgacaagagccgctatgactactttgccaggacagtgcccccagacttcttccaggccaaggccatggccgagatcctgcgcttcttcaactggacctacgtgtccacagtggccagcgagggggactatggagaaacaggaattgaggcctttgagctggaggcccgggccaggaacatctgtgtggccaccagcgagaaggtgggccgggccatgagccgggccgcctttgagggcgtggtgcgggccctgctgcagaagcccagcgcccgggtggccgtgctcttcaccaggagtgaagatgcccgggagctgctggccgccagccagaggctgaatgccagcttcacctgggtggccagtgatggctggggcgccctggagagcgtggtggccggcagcgagggcgctgctgagggcgccatcaccatcgagctggccagctaccccatcagtgactttgccagctacttccagagcctggacccctggaacaacagcaggaacccctggttccgggagttctgggagcagcgcttccgctgcagcttccggcagagggactgtgccgcccacagcctgcgggctgtgccctttgagcaggagagcaagatcatgtttgtggtgaatgctgtgtatgccatggcccacgccctgcacaacatgcaccgggccctgtgccccaacaccacccggctgtgtgatgccatgaggcctgtgaatggccggcggctgtacaaggactttgtgctgaatgtgaagtttgatgcccccttccggcctgctgacacccacaatgaggtgcgctttgacagatttggagatggcatcggccgctacaacatcttcacctacctgcgggccggcagcggccgctaccgctaccagaaggtgggctactgggccgagggcctgaccctggacaccagcctcatcccctgggccagccccagcgctggccccctgcctgccagccgctgcagcgagccctgcctgcagaatgaggtgaagtctgtgcagcccggggaggtgtgctgctggctgtgcatcccctgccagccctatgagtaccgcctggatgagttcacctgtgccgactgtggcctgggctactggcccaatgccagcctgaccggctgctttgagctgccccaggagtacatccgctggggagatgcctgggccgtgggccctgtgaccatcgcctgcctgggcgccctggccaccctgtttgtgctgggcgtgtttgtgcgccacaatgccacccctgtggtgaaggccagcggccgggagctgtgctacatcctgctgggcggcgtcttcctgtgctactgcatgaccttcatcttcatcgccaagcccagcacagctgtgtgcaccctgcggcggctgggcctgggcacagccttctctgtgtgctacagcgccctgctgaccaagaccaacagaattgcccgcatctttggaggagcccgggagggcgcccagaggccccgcttcatcagccctgccagccaggtggccatctgcctggccctgatcagcggccagctgctgattgtggtggcctggctggtggtggaggcccctggcaccgggaaggagacagcccctgagcggcgggaggtggtgaccctgcgctgcaaccacagagatgcctccatgctgggcagcctggcctacaacgtgctgctgattgccctgtgcaccctgtatgccttcaagaccaggaaatgtcctgagaacttcaatgaggccaagttcatcggcttcaccatgtacaccacctgcatcatctggctggccttcctgcccatcttctacgtgaccagcagtgactacagagtgcagaccaccaccatgtgtgtgtctgtgtccctgagcggctctgtggtgctgggctgcctgtttgcccccaagctgcacatcatcctcttccagccccagaagaatgtggtgagccaccgggcccccaccagcagatttggatctgctgctgcccgggccagcagcagcctgggccagggcagcggcagccagtttgtgcccaccgtgtgcaatggccgggaggtggtggacagcaccaccagcagcctgtag

SEQ ID NO: 16446 - DNA, 2619 bp, Artificial Sequence
  derived and/or modified sequence
atgggcagcctgctggccctgctggccctgctgctgctgtggggcgccgtcgctgaaggcccggccaagaaggtcctgacactcgagggcgacctcgttttagggggcctgttcccagtgcatcaaaagggaggccccgctgaggattgtggccccgtgaatgagcatcggggaattcagagactagaggcgatgttatttgctctggaccggatcaaccgagacccccacctgctgcccggcgtccgacttggggcccacatcctggatagctgcagcaaagacactcacgctctggagcaggcgctggattttgttagggccagcctgagcaggggagccgatggttcccggcacatatgccctgatggaagctatgctacacacggggatgctccgacagcaatcacaggcgtgattggtggatcttattctgatgtcagtatacaggtcgcgaacttgctgaggctattccaaatcccacagattagttacgctagcacatctgcaaaattgtcagacaaaagccgatacgactactttgctcgcaccgtgccacctgacttcttccaggctaaggctatggcagagatcctgcgctttttcaattggacgtatgtgagcactgtagcctctgagggagattacggagagaccgggatcgaagcctttgaactggaggctagagcacgcaacatctgcgtggcaacttctgagaaggttgggcgggctatgtcacgtgcagcgttcgaaggggtggtccgggcactgctgcagaaaccttctgcccgggttgccgtgctgttcactagatccgaggacgctcgtgaactgctggctgcttcgcagcgcctgaatgcgagctttacttgggtggcgtccgacggctggggagctcttgagagcgtcgtcgcaggttctgaaggggcggctgaaggtgctattacaattgaactggcctcctatcccatctcggactttgcctcgtactttcagtccctcgatccttggaataattcacgcaatccttggttccgcgagttttgggagcagcgttttcgctgctcattccgccagagggactgcgcagcccattcactgcgcgcggtcccctttgaacaggagtccaaaataatgtttgttgtcaacgcagtatatgccatggctcacgcactccacaatatgcaccgagccctgtgcccgaacactacacggttatgcgacgcaatgagaccggtgaatggcaggaggctttacaaagatttcgttctcaatgttaaatttgatgctccttttcggcctgccgacactcacaacgaagttcgctttgatcggtttggggacggaatcggccggtataatatattcacatatctcagagccgggagcggccgttataggtatcaaaaagtcgggtactgggccgagggcctcactctggatacatctctgatcccttgggctagcccaagcgcaggccctctgcccgccagtaggtgctcagaaccatgtctgcaaaatgaggtaaagtctgtccaacctggcgaagtgtgctgctggttatgtatcccttgccagccatatgagtataggctggatgagttcacatgtgcagactgcggattaggctattggccgaacgcctccctgacaggctgctttgagctaccacaggaatatattcgttggggtgatgcatgggccgtgggcccggtcaccatcgcctgtctgggggcactcgccaccctgttcgtgcttggtgtgttcgtccgccataacgcgaccccggttgtgaaagcctccgggcgagaactgtgttacatcctgctcggcggagttttcctctgttactgtatgacattcatattcatagccaagcccagtaccgcggtgtgtaccctccggcgtctcggtctggggaccgcgttttccgtgtgctatagcgccctcttgacaaagaccaatcggattgcccgcatattcggcggcgctagagaaggagcccagcggccccgatttatctcacccgcttcccaggtggccatctgtctggcccttatctcaggacagctcctgatcgtagtggcttggctggtcgttgaggcaccgggcacgggcaaggagacagcccccgaaaggcgcgaagtggttacactccgatgtaatcacagggatgcttccatgctgggctccctagcttacaacgttctcctgattgccctttgcactctgtatgccttcaaaactcgcaagtgccctgaaaatttcaatgaggctaaattcattggatttactatgtacacgacgtgtatcatttggctcgcgtttttgccaatcttttatgtgacttcctcagattatagagtgcagaccacaaccatgtgcgtttctgtgtctctttctggatctgtggttttgggctgcctgttcgccccaaaattgcacattatcctgttccaaccgcaaaagaacgttgtgagccacagagctcccacatcacggttcggctctgccgccgctcgtgcgtcatcgtcgttaggccaagggagtggttcacaattcgtgcccactgtgtgtaatggccgagaggtagtagattcgacaacaagttccctgtag

SEQ ID NO: 16447 - DNA, 2619 bp, Artificial Sequence
  derived and/or modified sequence
atgggatctctgctggcccttctagctctgttgctactttggggcgctgtggctgagggaccagcaaaaaaggtgctcactctcgagggggacctggtcttggggggactgtttccagtgcatcagaaaggcggacctgccgaagattgcggcccagtaaacgagcacaggggaattcagcgcctcgaggctatgttgtttgccttagaccgtattaatagggacccccatctcctgcctggcgttcgcctgggagcacatatactggatagctgttcaaaggacactcatgccctcgaacaggccctggatttcgttagagcttctctgtcacgaggcgctgatggcagcagacatatctgtccagatggatcgtacgccacccacggggacgctcctaccgccatcaccggggtcataggtgggtcgtactcagatgtatccattcaagtggcaaatctgctgaggctgtttcaaattcctcagatttcttacgcaagtaccagtgccaagctctctgataagtctaggtatgactactttgctcgcacagtcccacccgacttctttcaggccaaggcaatggccgagattctcaggttcttcaactggacatacgtgtcaaccgtggcttctgaaggcgattacggagagactggtattgaagcttttgagttggaagcaagagcgcgaaatatttgtgtggccacttctgagaaggtgggcagggccatgagcagggcagccttcgaaggagtggtgcgggctctccttcagaaaccctcagcccgagtagccgtcctcttcactaggtccgaggatgcacgagagttgctagctgcttcccagagacttaatgcgagcttcacctgggttgccagcgatgggtggggggctttggaatctgtggttgccggatctgaaggcgcagctgagggggcaataaccatagaacttgctagctatcctatcagtgatttcgcctcttactttcagagtttggatccctggaacaattccagaaacccatggtttcgcgagttttgggagcaacggtttagatgctcttttcgacagagggactgcgcagcacactccttacgagctgtgccattcgaacaggaaagcaaaatcatgtttgtagttaacgccgtgtatgcaatggcccatgccttgcacaacatgcacagggcactatgccctaataccacccggttgtgcgatgctatgcgcccagtgaacggcaggcggctgtacaaagactttgtgctgaacgttaagtttgatgccccttttcgccctgcagatacccataatgaggtgaggtttgaccgctttggcgacggaatcggaagatataacatttttacgtatctgcgggctgggtcagggagataccggtaccagaaagtaggatactgggcagaaggcctaaccttagacacctccctcatcccttgggcgtcgccaagtgccggaccgctgcccgcttctcggtgtagcgaaccatgcttgcagaacgaagtgaaatcagtacagccaggcgaagtctgttgctggttgtgcataccttgccagccatatgaatataggctggatgaattcacttgcgcagattgcgggctgggttactggcccaatgcttccctgacaggatgtttcgagctgcctcaagagtacatccggtggggagatgcatgggccgtggggccagtcactatcgcctgcctgggcgcactagcaactcttttcgtcttgggcgtgtttgtgagacacaatgccacgcctgttgtaaaggcaagcgggagggagctctgctacatcctccttggaggggtgttcctctgttattgtatgacattcatcttcatcgccaagccttcaactgccgtgtgcaccctgagaagactaggactgggcacagctttctccgtttgctattcagccttgttgacaaagactaatagaatcgcaaggatcttcgggggagctagggaaggagcacagcgccctaggtttataagtcctgcctcgcaggttgcaatttgtcttgccctgatctcaggccagctattgattgtggttgcctggcttgtggtggaggcccctggtacaggcaaggagacagccccagagaggagagaagtggtgactcttagatgtaatcaccgcgacgccagcatgctgggctctctggcttacaacgtcttgttaatcgcactgtgcactctctatgcttttaaaactcgcaagtgccccgagaattttaacgaagccaaatttataggcttcacaatgtacactacctgtatcatttggctggccttcctgccgatcttctacgtaactagttcagattatagggtgcaaactacaacgatgtgcgtatcggtgtccttgtcgggctccgtcgtgctgggctgtctcttcgcacctaaactacacatcatcctcttccagcctcagaagaacgtcgtatcacacagggcacccacatcaaggttcggaagtgcagccgctcgagccagtagtagcctgggtcaggggtccggatcccagttcgttcctacagtctgtaacggcagagaggtggttgacagcaccacaagctctctgtag

SEQ ID NO: 16448 - DNA, 2619 bp, Artificial Sequence
  derived and/or modified sequence
atgggcagcctgctggccctgctggccctgctgctgctgtggggcgccgtggccgagggccccgccaagaaggtgctgaccctggagggcgacctggtgctgggcggcctgttccccgtgcaccagaagggcggccccgccgaggactgcggccccgtgaacgagcacagaggcatccagagactggaggccatgctgttcgccctggacagaatcaacagagacccccacctgctgcccggcgtgagactgggcgcccacatcctggacagctgcagcaaggacacccacgccctggagcaggccctggacttcgtgagagccagcctgagcagaggcgccgacggcagcagacacatctgccccgacggcagctacgccacccacggcgacgcccccaccgccatcaccggcgtgatcggcggcagctacagcgacgtgagcatccaggtggccaacctgctgagactgttccagatcccccagatcagctacgccagcaccagcgccaagctgagcgacaagagcagatacgactacttcgccagaaccgtgccccccgacttcttccaggccaaggccatggccgagatcctgagattcttcaactggacctacgtgagcaccgtggccagcgagggcgactacggcgagaccggcatcgaggccttcgagctggaggccagagccagaaacatctgcgtggccaccagcgagaaggtgggcagagccatgagcagagccgccttcgagggcgtggtgagagccctgctgcagaagcccagcgccagagtggccgtgctgttcaccagaagcgaggacgccagagagctgctggccgccagccagagactgaacgccagcttcacctgggtggccagcgacggctggggcgccctggagagcgtggtggccggcagcgagggcgccgccgagggcgccatcaccatcgagctggccagctaccccatcagcgacttcgccagctacttccagagcctggacccctggaacaacagcagaaacccctggttcagagagttctgggagcagagattcagatgcagcttcagacagagagactgcgccgcccacagcctgagagccgtgcccttcgagcaggagagcaagatcatgttcgtggtgaacgccgtgtacgccatggcccacgccctgcacaacatgcacagagccctgtgccccaacaccaccagactgtgcgacgccatgagacccgtgaacggcagaagactgtacaaggacttcgtgctgaacgtgaagttcgacgcccccttcagacccgccgacacccacaacgaggtgagattcgacagattcggcgacggcatcggcagatacaacatcttcacctacctgagagccggcagcggcagatacagataccagaaggtgggctactgggccgagggcctgaccctggacaccagcctgatcccctgggccagccccagcgccggccccctgcccgccagcagatgcagcgagccctgcctgcagaacgaggtgaagagcgtgcagcccggcgaggtgtgctgctggctgtgcatcccctgccagccctacgagtacagactggacgagttcacctgcgccgactgcggcctgggctactggcccaacgccagcctgaccggctgcttcgagctgccccaggagtacatcagatggggcgacgcctgggccgtgggccccgtgaccatcgcctgcctgggcgccctggccaccctgttcgtgctgggcgtgttcgtgagacacaacgccacccccgtggtgaaggccagcggcagagagctgtgctacatcctgctgggcggcgtgttcctgtgctactgcatgaccttcatcttcatcgccaagcccagcaccgccgtgtgcaccctgagaagactgggcctgggcaccgccttcagcgtgtgctacagcgccctgctgaccaagaccaacagaatcgccagaatcttcggcggcgccagagagggcgcccagagacccagattcatcagccccgccagccaggtggccatctgcctggccctgatcagcggccagctgctgatcgtggtggcctggctggtggtggaggcccccggcaccggcaaggagaccgcccccgagagaagagaggtggtgaccctgagatgcaaccacagagacgccagcatgctgggcagcctggcctacaacgtgctgctgatcgccctgtgcaccctgtacgccttcaagaccagaaagtgccccgagaacttcaacgaggccaagttcatcggcttcaccatgtacaccacctgcatcatctggctggccttcctgcccatcttctacgtgaccagcagcgactacagagtgcagaccaccaccatgtgcgtgagcgtgagcctgagcggcagcgtggtgctgggctgcctgttcgcccccaagctgcacatcatcctgttccagccccagaagaacgtggtgagccacagagcccccaccagcagattcggcagcgccgccgccagagccagcagcagcctgggccagggcagcggcagccagttcgtgcccaccgtgtgcaacggcagagaggtggtggacagcaccaccagcagcctgtag

SEQ ID NO: 16449 - protein, 879 aa, Artificial Sequence
  derived and/or modified sequence
MKMLTRLQVLTLALFSKGFLLSLGDHNFLRREIKIEGDLVLGGLFPINEKGTGTEECGRINEDRGIQRLEAMLFAIDEINKDDYLLPGVKLGVHILDTCSRDTYALEQSLEFVRASLTKVDEAEYMCPDGSYAIQENIPLLIAGVIGGSYSSVSIQVANLLRLFQIPQISYASTSAKLSDKSRYDYFARTVPPDFYQAKAMAEILRFFNWTYVSTVASEGDYGETGIEAFEQEARLRNICIATAEKVGRSNIRKSYDSVIRELLQKPNARVVVLFMRSDDSRELIAAASRANASFTWVASDGWGAQESIIKGSEHVAYGAITLELASQPVRQFDRYFQSLNPYNNHRNPWFRDFWEQKFQCSLQNKRNHRRVCDKHLAIDSSNYEQESKIMFVVNAVYAMAHALHKMQRTLCPNTTKLCDAMKILDGKKLYKDYLLKINFTAPFNPNKDADSIVKFDTFGDGMGRYNVFNFQNVGGKYSYLKVGHWAETLSLDVNSIHWSRNSVPTSQCSDPCAPNEMKNMQPGDVCCWICIPCEPYEYLADEFTCMDCGSGQWPTADLTGCYDLPEDYIRWEDAWAIGPVTIACLGFMCTCMVVTVFIKHNNTPLVKASGRELCYILLFGVGLSYCMTFFFIAKPSPVICALRRLGLGSSFAICYSALLTKTNCIARIFDGVKNGAQRPKFISPSSQVFICLGLILVQIVMVSVWLILEAPGTRRYTLAEKRETVILKCNVKDSSMLISLTYDVILVILCTVYAFKTRKCPENFNEAKFIGFTMYTTCIIWLAFLPIFYVTSSDYRVQTTTMCISVSLSGFVVLGCLFAPKVHIILFQPQKNVVTHRLHLNRFSVSGTGTTYSQSSASTYVPTVCNGREVLDSTTSSL

SEQ ID NO: 16450 - protein, 751 aa, Artificial Sequence
  derived and/or modified sequence
MSQSPGAGSPPPLPPRSAPVPARSCRCEVANLLRLFQIPQISYASTSAKLSDKSRYDYFARTVPPDFYQAKAMAEILRFFNWTYVSTVASEGDYGETGIEAFEQEARLRNICIATAEKVGRSNIRKSYDSVIRELLQKPNARVVVLFMRSDDSRELIAAASRANASFTWVASDGWGAQESIIKGSEHVAYGAITLELASQPVRQFDRYFQSLNPYNNHRNPWFRDFWEQKFQCSLQNKRNHRRVCDKHLAIDSSNYEQESKIMFVVNAVYAMAHALHKMQRTLCPNTTKLCDAMKILDGKKLYKDYLLKINFTAPFNPNKDADSIVKFDTFGDGMGRYNVFNFQNVGGKYSYLKVGHWAETLSLDVNSIHWSRNSVPTSQCSDPCAPNEMKNMQPGDVCCWICIPCEPYEYLADEFTCMDCGSGQWPTADLTGCYDLPEDYIRWEDAWAIGPVTIACLGFMCTCMVVTVFIKHNNTPLVKASGRELCYILLFGVGLSYCMTFFFIAKPSPVICALRRLGLGSSFAICYSALLTKTNCIARIFDGVKNGAQRPKFISPSSQVFICLGLILVQIVMVSVWLILEAPGTRRYTLAEKRETVILKCNVKDSSMLISLTYDVILVILCTVYAFKTRKCPENFNEAKFIGFTMYTTCIIWLAFLPIFYVTSSDYRVQTTTMCISVSLSGFVVLGCLFAPKVHIILFQPQKNVVTHRLHLNRFSVSGTGTTYSQSSASTYVPTVCNGREVLDSTTSSL

SEQ ID NO: 16451 - protein, 471 aa, Artificial Sequence
  derived and/or modified sequence
MRRTNHEPEPGCRLTAAAATAVSSSSCQELSVRAPFNPNKDADSIVKFDTFGDGMGRYNVFNFQNVGGKYSYLKVGHWAETLSLDVNSIHWSRNSVPTSQCSDPCAPNEMKNMQPGDVCCWICIPCEPYEYLADEFTCMDCGSGQWPTADLTGCYDLPEDYIRWEDAWAIGPVTIACLGFMCTCMVVTVFIKHNNTPLVKASGRELCYILLFGVGLSYCMTFFFIAKPSPVICALRRLGLGSSFAICYSALLTKTNCIARIFDGVKNGAQRPKFISPSSQVFICLGLILVQIVMVSVWLILEAPGTRRYTLAEKRETVILKCNVKDSSMLISLTYDVILVILCTVYAFKTRKCPENFNEAKFIGFTMYTTCIIWLAFLPIFYVTSSDYRVQTTTMCISVSLSGFVVLGCLFAPKVHIILFQPQKNVVTHRLHLNRFSVSGTGTTYSQSSASTYVPTVCNGREVLDSTTSSL

SEQ ID NO: 16452 - DNA, 2640 bp, Artificial Sequence
  derived and/or modified sequence
atgaagatgctgacgaggctgcaggtcttaacattggctctgtttagcaagggatttttgctcagtctcggggaccataattttctgaggcgggaaatcaaaatcgaaggcgacctggtcctgggaggcctgttccccatcaacgagaaaggaaccggaacggaggaatgtggcaggattaacgaagaccggggaatccaaaggctcgaggccatgctgttcgccatcgatgaaattaacaaagacgattacctgctacccggcgttaaactgggtgtccatattctggatacttgcagccgagatacttatgccttggaacagagtctcgagtttgtgcgcgctagcctgaccaaggtcgacgaagccgagtacatgtgtcccgatggcagctatgcgattcaggaaaacattcctctgctgatcgctggagttatcggcgggagctactccagcgtgtctattcaggtcgcaaatcttttacggttatttcagatcccccaaatcagttatgcaagcactagcgccaagctgtccgataaaagtcggtatgactactttgctcggactgttcccccggacttctatcaagctaaagcaatggcggagattctgaggttctttaactggacctacgtgagtactgtggcgtccgagggcgattatggcgagacgggaatcgaagcatttgaacaggaggcacggttacgaaacatctgcattgcaactgccgagaaagtgggtaggtcaaatatccgcaagtcttacgactccgtgattcgcgagctcctccagaaaccaaatgcgagagtggtcgtcctgttcatgagatccgacgacagtcgagagcttatagcagccgccagccgtgcgaatgcctctttcacatgggtggcctccgatgggtggggcgcccaggaaagcattatcaaaggtagcgagcatgtggcctatggggccataaccctggaattggcgtcacaaccagtccggcaatttgatagatatttccaatctctaaatccatacaacaaccaccgaaacccatggtttagagacttctgggagcaaaagttccagtgcagcctacaaaataaacgaaatcatcgcagggtgtgcgataagcacttagcaattgactccagtaattatgaacaggagagcaagataatgtttgtagtaaacgccgtctacgctatggcccatgccttgcataagatgcagcgaaccctgtgtccaaacacgactaaactttgcgacgccatgaaaatactggacgggaaaaaactgtacaaggactacttactgaaaatcaactttacggcgccctttaatccaaacaaggacgctgactccattgttaagtttgatacattcggggacggcatggggcgctataacgtgtttaactttcagaatgtcggtggtaagtacagctacttgaaagtaggacattgggctgaaaccctgagcctggacgtgaattcaattcactggagcaggaactccgtaccaactagccagtgctctgacccctgcgcacccaatgagatgaaaaacatgcagcctggggatgtgtgctgttggatctgtattccttgcgagccgtacgaatacttggctgacgaatttacttgcatggattgtggatcagggcagtggcctacagccgatttaaccggatgttacgatctgcccgaggactacatcaggtgggaggacgcatgggctatcgggccagttactatcgcttgtttgggtttcatgtgtacctgtatggtcgtgactgtttttattaagcacaacaataccccattggtgaaagcctcaggcagagaactgtgctacatcctgctgtttggggttggtctgagctattgtatgacattttttttcatcgccaaaccaagtcccgtgatttgtgccctccgtagactcggcttaggctcttcatttgctatctgttacagtgccctcctgacgaagaccaattgtattgccaggatcttcgatggcgtcaagaacggtgcccagcgtccgaagtttatttctccaagctcacaggtatttatctgtttaggcttgatcctcgttcagattgttatggtatccgtatggttgattctagaagctccgggcactcgccggtacacactggctgagaaacgcgagaccgtcatactgaaatgtaatgttaaggattcttcaatgctcatcagtctgacatatgacgttatcttggtgatactgtgtactgtgtatgccttcaaaacccggaaatgcccggaaaattttaacgaggctaaatttataggatttaccatgtacacaacatgtatcatctggttagctttcctgccaattttttacgtgacatcttctgactatagggtgcaaaccacgacaatgtgcataagcgtgtccctctccggtttcgtggtcctgggctgtctgtttgctcctaaggtgcatataattctttttcagcctcagaaaaacgtcgtgacccaccgcctacacctcaaccgattctccgttagcggaactgggacaacttacagccagtccagcgcctccacttatgtcccgacggtgtgtaacggtcgagaggtgttggatagcaccaccagtagcctgtag

SEQ ID NO: 16453 - DNA, 2256 bp, Artificial Sequence
  derived and/or modified sequence
atgagccagtcacccggtgctggctcccctccccctctgccacccaggtctgcccctgtcccagcaagaagctgtcgatgcgaggtcgccaatttgttaagactattccagataccacagatcagctatgcctctacttccgccaaacttagtgacaaatcccgctatgattacttcgcccgaaccgtgcctccagacttttatcaggcaaaggctatggctgagatccttaggttcttcaattggacttatgtcagcaccgtggccagtgagggtgattacggggaaacaggcatcgaagctttcgagcaggaggctcggctacggaatatttgcatcgccacagccgaaaaggtcggccgttccaacatcaggaagtcgtacgattcagttatcagggaattgctgcagaagcctaacgcgcgggtggttgtgctatttatgcggtcagatgattcccgcgaactgatagctgcagcgtcgagagctaatgctagctttacttgggtggccagcgacggttggggcgctcaagaaagcattatcaagggctcggagcacgtggcctatggcgcgattaccctcgagctcgcctctcagcccgtgaggcaatttgatcgatactttcagtcactcaatccctataataatcaccggaatccttggtttcgcgacttttgggagcaaaagtttcagtgtagccttcaaaacaagagaaatcataggagggtgtgcgataagcacctggcaattgactcttcaaactacgagcaggagtccaaaatcatgttcgtagtcaatgctgtttatgcaatggcccatgcactgcacaaaatgcagcgtacgctgtgtcccaataccaccaagctgtgcgatgcaatgaaaattctggacgggaagaaattgtacaaggactacttgctgaagataaatttcacagcaccattcaatcctaataaagatgcggattccatcgtcaagttcgatactttcggagacggcatgggtcgctacaacgtgttcaacttccaaaatgtaggagggaaatactcttatttgaaagtggggcactgggcagaaactctgtccctggatgtgaacagcatacattggtcacgtaattccgtgcccacttcgcagtgctcagatccttgcgcccccaacgaaatgaagaatatgcagcccggagatgtgtgttgctggatctgtataccatgtgagccatacgagtacctggctgacgaattcacttgtatggactgcggaagtggccagtggcccaccgccgatctgactggttgctacgatctccctgaagactacatcaggtgggaagacgcttgggcaattggccctgtgactatcgcttgtttggggtttatgtgtacatgcatggttgtcacagtctttatcaagcacaacaatacccctctggtgaaggcttctggacgggagctatgttacatcttgttgttcggtgttgggctgtcttactgtatgacatttttttttatcgccaaaccatcacctgttatttgtgcactccgaagactggggctgggcagctcatttgcaatttgttactctgccctgctcacgaaaactaactgtattgcgcgtatatttgatggcgtcaagaatggagcccagaggccgaagttcatctccccctcctctcaggtattcatctgtcttggtctgatcctggtgcagattgtcatggtgtccgtctggttgattcttgaggcccccggtacaagaagatataccctggcggaaaaacgggagaccgttatcctcaaatgcaatgtgaaagactcctctatgctgatttccctaacatatgatgttatactggtgatcctgtgcactgtctacgcattcaaaactcggaagtgcccagaaaacttcaatgaggctaaatttatcggcttcacaatgtatacgacatgtatcatatggttggcgttccttccaatcttttacgtcacaagctccgattaccgggtgcagactacgaccatgtgcattagcgtatcactatccgggtttgtggtgttgggttgtctgtttgcccccaaggttcacattattctgtttcaaccacaaaaaaacgttgtcactcatagactccatctgaatcgcttcagcgtgtctggcactgggactacgtacagtcaaagctctgcctcgacttacgtccccaccgtgtgtaatggacgggaggtactggattctactacaagttctctgtag

SEQ ID NO: 16454 - DNA, 1416 bp, Artificial Sequence
  derived and/or modified sequence
atgaggcggaccaaccatgagcctgaaccggggtgccgcctcaccgctgcggccgccaccgctgtgagctcttcgtcctgccaggaactgagtgtaagggctcccttcaatcctaataaggatgccgactccatcgtcaaatttgacacgtttggcgatggaatgggccgctataacgtgttcaacttccagaatgttggcggtaaatattcttacttaaaagtaggccactgggcagagaccctctccctagacgtgaattcgattcactggtcacgcaattctgttcctacatcacagtgcagcgacccatgtgccccaaacgagatgaagaatatgcagcctggggatgtttgctgctggatttgcataccttgcgagccttacgagtatcttgccgacgagtttacatgcatggattgcgggtctggacaatggcctacagccgacttgaccgggtgctacgaccttcccgaggactatataagatgggaggacgcttgggccatcggcccagttactatcgcatgcctgggttttatgtgcacatgtatggtggtaacggtgtttatcaagcataataacacacccttagtcaaggccagcggaagggagctttgctacatattactattcggcgtggggctctcctactgtatgactttttttttcattgccaagccgagccctgtgatctgtgcacttcggcggctcggactgggcagcagctttgccatttgttattccgcacttttgaccaaaactaattgcatagcccgtatctttgacggtgtcaagaatggcgctcaacggcctaaatttatcagtccttcgtcacaagtgttcatttgcctcggtctgattctagtgcaaatcgtgatggtgtccgtctggctcattctggaagcccccggaacaagaagatacacgcttgctgaaaaaagggagacggtcattctgaagtgtaatgtaaaggacagtagcatgttgatcagcttaacgtacgacgttatacttgtgattttgtgtacagtatatgctttcaagacccgaaagtgcccagaaaacttcaatgaggcgaagttcatcggtttcacaatgtacaccacatgcataatatggctcgccttcttgcctattttctacgtcaccagtagcgactaccgggtccaaaccacgactatgtgcatcagcgtgtcactgagcggcttcgtggtgttgggatgtcttttcgcccccaaagtgcatataatcctgtttcagccccagaaaaatgtcgtgacccaccggctgcacctgaacaggttctcagtgtcaggtactgggaccacatacagtcagtcttccgctagcacatacgtgcccacagtttgcaacggtcgagaagtcttagattccactacttcaagtctgtag

SEQ ID NO: 16455 - DNA, 4268 bp, Artificial Sequence
  derived and/or modified sequence
gtgcagttgagtcgcgagtacggctgagctgcgtaccggcctccctggctctcacactccctctctgctcccgctctcctaatctcctctggcatgcggtcagccccctgcccagggaccacaggagagttcttgtaaggactgttagtccctgcttacctgaaagccaagcgctctagcagagctttaaagttggagccgccaccctccctaccgccccatgccccttcaccccactccgaaattcaccgacctttgcatgcactgcctaaggatttcagagtgaggcaaagcagtcggcaaatctaccctggcttttcgtataaaaatcctctcgtctaggtaccctggctcactgaagactctgcagatatacccttataagagggagggtgggggagggaaaagaacgagagagggaggaaagaatgaaaaggagaggatgccaggaggtccgtgcttctgccaagagtcccaattagatgcgacggcttcagcctggtcaaggtgaaggaaagttgcttccgcgcctaggaagtgggtttgcctgataagagaaggaggaggggactcggctgggaagagctcccctcccctccgcggaagaccactgggtcccctctttccccaacctcctccctctcttctactccacccctccgttttcccactccccactgactcggatgcctggatgttctgccaccgggcagtggtccagcgtgcagccgggagggggcaggggcagggggcactgtgacaggaagctgcgcgcacaagttggccatttcgagggcaaaataagttctcccttggatttggaaaggacaaagccagtaagctacctcttttgtgtcggatgaggaggaccaaccatgagccagagcccgggtgcaggctcaccgccgccgctgccaccgcggtcagctccagttcctgccaggagttgtcggtgcgaggaattttgtgacaggctctgttagtctgttcctcccttatttgaaggacaggccaaagatccagtttggaaatgagagaggactagcatgacacattggctccaccattgatatctcccagaggtacagaaacaggattcatgaagatgttgacaagactgcaagttcttaccttagctttgttttcaaagggatttttactctctttaggggaccataactttctaaggagagagattaaaatagaaggtgaccttgttttagggggcctgtttcctattaacgaaaaaggcactggaactgaagaatgtgggcgaatcaatgaagaccgagggattcaacgcctggaagccatgttgtttgctattgatgaaatcaacaaagatgattacttgctaccaggagtgaagttgggtgttcacattttggatacatgttcaagggatacctatgcattggagcaatcactggagtttgtcagggcatctttgacaaaagtggatgaagctgagtatatgtgtcctgatggatcctatgccattcaagaaaacatcccacttctcattgcaggggtcattggtggctcttatagcagtgtttccatacaggtggcaaacctgctgcggctcttccagatccctcagatcagctacgcatccaccagcgccaaactcagtgataagtcgcgctatgattactttgccaggaccgtgccccccgacttctaccaggccaaagccatggctgagatcttgcgcttcttcaactggacctacgtgtccacagtagcctccgagggtgattacggggagacagggatcgaggccttcgagcaggaagcccgcctgcgcaacatctgcatcgctacggcggagaaggtgggccgctccaacatccgcaagtcctacgacagcgtgatccgagaactgttgcagaagcccaacgcgcgcgtcgtggtcctcttcatgcgcagcgacgactcgcgggagctcattgcagccgccagccgcgccaatgcctccttcacctgggtggccagcgacggctggggcgcgcaggagagcatcatcaagggcagcgagcatgtggcctacggcgccatcaccctggagctggcctcccagcctgtccgccagttcgaccgctacttccagagcctcaacccctacaacaaccaccgcaacccctggttccgggacttctgggagcaaaagtttcagtgcagcctccagaacaaacgcaaccacaggcgcgtctgcgacaagcacctggccatcgacagcagcaactacgagcaagagtccaagatcatgtttgtggtgaacgcggtgtatgccatggcccacgctttgcacaaaatgcagcgcaccctctgtcccaacactaccaagctttgtgatgctatgaagatcctggatgggaagaagttgtacaaggattacttgctgaaaatcaacttcacggctccattcaacccaaataaagatgcagatagcatagtcaagtttgacacttttggagatggaatggggcgatacaacgtgttcaatttccaaaatgtaggtggaaagtattcctacttgaaagttggtcactgggcagaaaccttatcgctagatgtcaactctatccactggtcccggaactcagtccccacttcccagtgcagcgacccctgtgcccccaatgaaatgaagaatatgcaaccaggggatgtctgctgctggatttgcatcccctgtgaaccctacgaatacctggctgatgagtttacctgtatggattgtgggtctggacagtggcccactgcagacctaactggatgctatgaccttcctgaggactacatcaggtgggaagacgcctgggccattggcccagtcaccattgcctgtctgggttttatgtgtacatgcatggttgtaactgtttttatcaagcacaacaacacacccttggtcaaagcatcgggccgagaactctgctacatcttattgtttggggttggcctgtcatactgcatgacattcttcttcattgccaagccatcaccagtcatctgtgcattgcgccgactcgggctggggagttccttcgctatctgttactcagccctgctgaccaagacaaactgcattgcccgcatcttcgatggggtcaagaatggcgctcagaggccaaaattcatcagccccagttctcaggttttcatctgcctgggtctgatcctggtgcaaattgtgatggtgtctgtgtggctcatcctggaggccccaggcaccaggaggtatacccttgcagagaagcgggaaacagtcatcctaaaatgcaatgtcaaagattccagcatgttgatctctcttacctacgatgtgatcctggtgatcttatgcactgtgtacgccttcaaaacgcggaagtgcccagaaaatttcaacgaagctaagttcataggttttaccatgtacaccacgtgcatcatctggttggccttcctccctatattttatgtgacatcaagtgactacagagtgcagacgacaaccatgtgcatctctgtcagcctgagtggctttgtggtcttgggctgtttgtttgcacccaaggttcacatcatcctgtttcaaccccagaagaatgttgtcacacacagactgcacctcaacaggttcagtgtcagtggaactgggaccacatactctcagtcctctgcaagcacgtatgtgccaacggtgtgcaatgggcgggaagtcctcgactccaccacctcatctctgtgattgtgaattgcagttcagttcttgtgtttttagactgttagacaaaagtgctcacgtgcagctccagaatatggaaacagagcaaaagaacaaccctagtacctttttttagaaacagtacgataaattatttttgaggactgtatatagtgatgtgctagaactttctaggctgagtctagtgcccctattattaacaattcccccagaacatggaaataaccattgtttacagagctgagcattggtgacagggtctgacatggtcagtctactaaaaaacaaaaaaaaaaaacaaaaaaaaaaaaacaaaagaaaaaaataaaaatacggtggcaatattatgtaaccttttttcctatgaagttttttgtaggtccttgttgtaactaatttaggatgagtttctatgttgtatattaaagttacattatgtgtaacagattgattttctcagcacaaaataaaaagcatctgtattaatgtaaagatactgagaataaaaccttcaaggttttccagcatggtg

SEQ ID NO: 16456 - DNA, 2685 bp, Artificial Sequence
  derived and/or modified sequence
gtgcagccgggagggggcaggggcagggggcactgtgacaggaagctgcgcgcacaagttggccatttcgagggcaaaataagttctcccttggatttggaaaggacaaagccagtaagctacctcttttgtgtcggatgaggaggaccaaccatgagccagagcccgggtgcaggctcaccgccgccgctgccaccgcggtcagctccagttcctgccaggagttgtcggtgcgaggtggcaaacctgctgcggctcttccagatccctcagatcagctacgcatccaccagcgccaaactcagtgataagtcgcgctatgattactttgccaggaccgtgccccccgacttctaccaggccaaagccatggctgagatcttgcgcttcttcaactggacctacgtgtccacagtagcctccgagggtgattacggggagacagggatcgaggccttcgagcaggaagcccgcctgcgcaacatctgcatcgctacggcggagaaggtgggccgctccaacatccgcaagtcctacgacagcgtgatccgagaactgttgcagaagcccaacgcgcgcgtcgtggtcctcttcatgcgcagcgacgactcgcgggagctcattgcagccgccagccgcgccaatgcctccttcacctgggtggccagcgacggctggggcgcgcaggagagcatcatcaagggcagcgagcatgtggcctacggcgccatcaccctggagctggcctcccagcctgtccgccagttcgaccgctacttccagagcctcaacccctacaacaaccaccgcaacccctggttccgggacttctgggagcaaaagtttcagtgcagcctccagaacaaacgcaaccacaggcgcgtctgcgacaagcacctggccatcgacagcagcaactacgagcaagagtccaagatcatgtttgtggtgaacgcggtgtatgccatggcccacgctttgcacaaaatgcagcgcaccctctgtcccaacactaccaagctttgtgatgctatgaagatcctggatgggaagaagttgtacaaggattacttgctgaaaatcaacttcacggctccattcaacccaaataaagatgcagatagcatagtcaagtttgacacttttggagatggaatggggcgatacaacgtgttcaatttccaaaatgtaggtggaaagtattcctacttgaaagttggtcactgggcagaaaccttatcgctagatgtcaactctatccactggtcccggaactcagtccccacttcccagtgcagcgacccctgtgcccccaatgaaatgaagaatatgcaaccaggggatgtctgctgctggatttgcatcccctgtgaaccctacgaatacctggctgatgagtttacctgtatggattgtgggtctggacagtggcccactgcagacctaactggatgctatgaccttcctgaggactacatcaggtgggaagacgcctgggccattggcccagtcaccattgcctgtctgggttttatgtgtacatgcatggttgtaactgtttttatcaagcacaacaacacacccttggtcaaagcatcgggccgagaactctgctacatcttattgtttggggttggcctgtcatactgcatgacattcttcttcattgccaagccatcaccagtcatctgtgcattgcgccgactcgggctggggagttccttcgctatctgttactcagccctgctgaccaagacaaactgcattgcccgcatcttcgatggggtcaagaatggcgctcagaggccaaaattcatcagccccagttctcaggttttcatctgcctgggtctgatcctggtgcaaattgtgatggtgtctgtgtggctcatcctggaggccccaggcaccaggaggtatacccttgcagagaagcgggaaacagtcatcctaaaatgcaatgtcaaagattccagcatgttgatctctcttacctacgatgtgatcctggtgatcttatgcactgtgtacgccttcaaaacgcggaagtgcccagaaaatttcaacgaagctaagttcataggttttaccatgtacaccacgtgcatcatctggttggccttcctccctatattttatgtgacatcaagtgactacagagtgcagacgacaaccatgtgcatctctgtcagcctgagtggctttgtggtcttgggctgtttgtttgcacccaaggttcacatcatcctgtttcaaccccagaagaatgttgtcacacacagactgcacctcaacaggttcagtgtcagtggaactgggaccacatactctcagtcctctgcaagcacgtatgtgccaacggtgtgcaatgggcgggaagtcctcgactccaccacctcatctctgtgattgtgaattgcagttcagttcttgtgtttttagactgttagacaaaagtgctcacgtgcagctccagaatatggaaacagagcaaaagaacaaccctagtacctttttttagaaacagtacgataaattatttttgaggactgtatatagtgatgtgctagaactttctaggctgagtctagtgcccctattattaacaattcccccagaacatggaaataaccattgtttacagagctgagcattggtgacagggtctgacatggtcagtctact

SEQ ID NO: 16457 - DNA, 2045 bp, Artificial Sequence
  derived and/or modified sequence
aattagatgcgacggcttcagcctggtcaaggtgaaggaaagttgcttccgcgcctaggaagtgggtttgcctgataagagaaggaggaggggactcggctgggaagagctcccctcccctccgcggaagaccactgggtcccctctttccccaacctcctccctctcttctactccacccctccgttttcccactccccactgactcggatgcctggatgttctgccaccgggcagtggtccagcgtgcagccgggagggggcaggggcagggggcactgtgacaggaagctgcgcgcacaagttggccatttcgagggcaaaataagttctcccttggatttggaaaggacaaagccagtaagctacctcttttgtgtcggatgaggaggaccaaccatgagccagagcccgggtgcaggctcaccgccgccgctgccaccgcggtcagctccagttcctgccaggagttgtcggtgcgagctccattcaacccaaataaagatgcagatagcatagtcaagtttgacacttttggagatggaatggggcgatacaacgtgttcaatttccaaaatgtaggtggaaagtattcctacttgaaagttggtcactgggcagaaaccttatcgctagatgtcaactctatccactggtcccggaactcagtccccacttcccagtgcagcgacccctgtgcccccaatgaaatgaagaatatgcaaccaggggatgtctgctgctggatttgcatcccctgtgaaccctacgaatacctggctgatgagtttacctgtatggattgtgggtctggacagtggcccactgcagacctaactggatgctatgaccttcctgaggactacatcaggtgggaagacgcctgggccattggcccagtcaccattgcctgtctgggttttatgtgtacatgcatggttgtaactgtttttatcaagcacaacaacacacccttggtcaaagcatcgggccgagaactctgctacatcttattgtttggggttggcctgtcatactgcatgacattcttcttcattgccaagccatcaccagtcatctgtgcattgcgccgactcgggctggggagttccttcgctatctgttactcagccctgctgaccaagacaaactgcattgcccgcatcttcgatggggtcaagaatggcgctcagaggccaaaattcatcagccccagttctcaggttttcatctgcctgggtctgatcctggtgcaaattgtgatggtgtctgtgtggctcatcctggaggccccaggcaccaggaggtatacccttgcagagaagcgggaaacagtcatcctaaaatgcaatgtcaaagattccagcatgttgatctctcttacctacgatgtgatcctggtgatcttatgcactgtgtacgccttcaaaacgcggaagtgcccagaaaatttcaacgaagctaagttcataggttttaccatgtacaccacgtgcatcatctggttggccttcctccctatattttatgtgacatcaagtgactacagagtgcagacgacaaccatgtgcatctctgtcagcctgagtggctttgtggtcttgggctgtttgtttgcacccaaggttcacatcatcctgtttcaaccccagaagaatgttgtcacacacagactgcacctcaacaggttcagtgtcagtggaactgggaccacatactctcagtcctctgcaagcacgtatgtgccaacggtgtgcaatgggcgggaagtcctcgactccaccacctcatctctgtgattgtgaattgcagttcagttcttgtgtttttagactgttagacaaaagtgctcacgtgcagctccagaatatggaaacagagcaaaagaacaaccctagtacctttttttagaaacagtacgataaattatttttgaggactgtatatagtgatgtgctagaactttctaggctgagtctagtgcccctattattaacaattcccccagaacatggaaataaccattgtttacagagctgagcatt

SEQ ID NO: 16458 - DNA, 2640 bp, Artificial Sequence
  derived and/or modified sequence
atgaagatgctgacccggctgcaggtgctgaccctggccctcttcagcaagggcttcctgctgagcctgggggaccacaacttcctgcggcgggagatcaagattgaaggagacctggtgctgggcggcctcttccccatcaatgagaagggcaccggcacagaggagtgtggccgcatcaatgaagatcggggcatccagaggctggaggccatgctgtttgccattgatgagatcaacaaggatgactacctgctgcccggggtgaagctgggcgtgcacatcctggacacctgcagccgggacacctacgccctggagcagagcctggagtttgtgcgggccagcctgaccaaggtggatgaagctgagtacatgtgcccagatggcagctatgccatccaggagaacatccccctgctgattgctggggtcatcggcggcagctacagctctgtgtccatccaggtggccaacctgctgcggctcttccagatcccccagatctcctatgccagcaccagcgccaagctgagtgacaagagccgctatgactactttgccaggacagtgcccccagacttctaccaggccaaggccatggccgagatcctgcgcttcttcaactggacctacgtgtccacagtggccagcgagggggactatggagaaacaggaattgaggcctttgagcaggaggcccggctgaggaacatctgcatcgccacagctgagaaggtgggccgcagcaacatcaggaagagctatgacagcgtcatccgggagctgctgcagaagcccaatgcccgggtggtggtgctcttcatgagaagtgatgacagccgggagctgattgctgctgccagccgggccaatgccagcttcacctgggtggccagtgatggctggggcgcccaggagagcatcatcaagggcagcgagcacgtggcctacggggccatcaccctggagctggccagccagcctgtgcggcagtttgaccgctacttccagagcctgaacccctacaacaaccacaggaacccctggttccgggacttctgggagcagaagttccagtgcagcctgcagaacaagaggaaccaccggcgggtgtgtgacaagcacctggccatcgacagcagcaactatgagcaggagagcaagatcatgtttgtggtgaatgctgtgtatgccatggcccacgccctgcacaagatgcagaggaccctgtgccccaacaccaccaagctgtgtgatgccatgaagatcctggatggcaagaagctgtacaaggactacctgctgaagatcaacttcaccgcccccttcaaccccaacaaggatgctgacagcatcgtgaagtttgacacctttggagatggcatgggccgctacaacgtgttcaacttccagaatgtgggcggcaagtacagctacctgaaggtgggccactgggccgagaccctgagcctggatgtgaacagcatccactggagcagaaattctgtgcccaccagccagtgcagcgacccctgtgccccaaatgagatgaagaacatgcagcctggagatgtgtgctgctggatctgcatcccctgtgagccctatgagtacctggctgatgagttcacctgcatggactgtggcagcggccagtggcccacagctgacctgaccggctgctatgacctgcctgaggactacatccgctgggaggatgcctgggccatcggccctgtgaccatcgcctgcctgggcttcatgtgcacctgcatggtggtgaccgtcttcatcaagcacaacaacacccccctggtgaaggccagcggccgggagctgtgctacatcctgctgtttggagtgggcctgagctactgcatgaccttcttcttcatcgccaagcccagccctgtgatctgtgccctgcggcggctgggcctgggcagcagctttgccatctgctacagcgccctgctgaccaagaccaactgcatcgcccgcatctttgatggagtgaagaatggagcccagaggcccaagttcatcagccccagcagccaggtgttcatctgcctgggcctcatcctggtgcagatcgtgatggtgtctgtgtggctgatcctggaggcccctggcacccggcgctacaccctggccgagaagcgggagaccgtcatcctgaagtgcaatgtgaaggacagctccatgctgatcagcctgacctatgatgtgatcctggtgatcctgtgcaccgtgtatgccttcaagaccaggaagtgcccagagaacttcaatgaggccaagttcatcggcttcaccatgtacaccacctgcatcatctggctggccttcctgcccatcttctacgtgaccagcagtgactacagagtgcagaccaccaccatgtgcatctctgtgtccctgagcggctttgtggtgctgggctgcctgtttgcccccaaggtgcacatcatcctcttccagccccagaagaatgtggtgacccaccggctgcacctgaaccgcttctctgtgtctggaacaggcaccacctacagccagagcagcgccagcacctacgtgcccaccgtgtgcaatggccgggaggtgctggacagcaccaccagcagcctgtag

SEQ ID NO: 16459 - DNA, 2256 bp, Artificial Sequence
  derived and/or modified sequence
atgagccagagccctggagctggcagccccccacccctgccccccaggtctgcccctgtgcctgcccggagctgccgctgtgaggtggccaacctgctgcggctcttccagatcccccagatctcctatgccagcaccagcgccaagctgagtgacaagagccgctatgactactttgccaggacagtgcccccagacttctaccaggccaaggccatggccgagatcctgcgcttcttcaactggacctacgtgtccacagtggccagcgagggggactatggagaaacaggaattgaggcctttgagcaggaggcccggctgaggaacatctgcatcgccacagctgagaaggtgggccgcagcaacatcaggaagagctatgacagcgtcatccgggagctgctgcagaagcccaatgcccgggtggtggtgctcttcatgagaagtgatgacagccgggagctgattgctgctgccagccgggccaatgccagcttcacctgggtggccagtgatggctggggcgcccaggagagcatcatcaagggcagcgagcacgtggcctacggggccatcaccctggagctggccagccagcctgtgcggcagtttgaccgctacttccagagcctgaacccctacaacaaccacaggaacccctggttccgggacttctgggagcagaagttccagtgcagcctgcagaacaagaggaaccaccggcgggtgtgtgacaagcacctggccatcgacagcagcaactatgagcaggagagcaagatcatgtttgtggtgaatgctgtgtatgccatggcccacgccctgcacaagatgcagaggaccctgtgccccaacaccaccaagctgtgtgatgccatgaagatcctggatggcaagaagctgtacaaggactacctgctgaagatcaacttcaccgcccccttcaaccccaacaaggatgctgacagcatcgtgaagtttgacacctttggagatggcatgggccgctacaacgtgttcaacttccagaatgtgggcggcaagtacagctacctgaaggtgggccactgggccgagaccctgagcctggatgtgaacagcatccactggagcagaaattctgtgcccaccagccagtgcagcgacccctgtgccccaaatgagatgaagaacatgcagcctggagatgtgtgctgctggatctgcatcccctgtgagccctatgagtacctggctgatgagttcacctgcatggactgtggcagcggccagtggcccacagctgacctgaccggctgctatgacctgcctgaggactacatccgctgggaggatgcctgggccatcggccctgtgaccatcgcctgcctgggcttcatgtgcacctgcatggtggtgaccgtcttcatcaagcacaacaacacccccctggtgaaggccagcggccgggagctgtgctacatcctgctgtttggagtgggcctgagctactgcatgaccttcttcttcatcgccaagcccagccctgtgatctgtgccctgcggcggctgggcctgggcagcagctttgccatctgctacagcgccctgctgaccaagaccaactgcatcgcccgcatctttgatggagtgaagaatggagcccagaggcccaagttcatcagccccagcagccaggtgttcatctgcctgggcctcatcctggtgcagatcgtgatggtgtctgtgtggctgatcctggaggcccctggcacccggcgctacaccctggccgagaagcgggagaccgtcatcctgaagtgcaatgtgaaggacagctccatgctgatcagcctgacctatgatgtgatcctggtgatcctgtgcaccgtgtatgccttcaagaccaggaagtgcccagagaacttcaatgaggccaagttcatcggcttcaccatgtacaccacctgcatcatctggctggccttcctgcccatcttctacgtgaccagcagtgactacagagtgcagaccaccaccatgtgcatctctgtgtccctgagcggctttgtggtgctgggctgcctgtttgcccccaaggtgcacatcatcctcttccagccccagaagaatgtggtgacccaccggctgcacctgaaccgcttctctgtgtctggaacaggcaccacctacagccagagcagcgccagcacctacgtgcccaccgtgtgcaatggccgggaggtgctggacagcaccaccagcagcctgtag

SEQ ID NO: 16460 - DNA, 1416 bp, Artificial Sequence
  derived and/or modified sequence
atgaggaggaccaaccacgagcctgagcccggctgccgcctgacagctgctgctgccacagctgtgagcagcagcagctgccaggagctgtctgtgcgggcccccttcaaccccaacaaggatgctgacagcatcgtgaagtttgacacctttggagatggcatgggccgctacaacgtgttcaacttccagaatgtgggcggcaagtacagctacctgaaggtgggccactgggccgagaccctgagcctggatgtgaacagcatccactggagcagaaattctgtgcccaccagccagtgcagcgacccctgtgccccaaatgagatgaagaacatgcagcctggagatgtgtgctgctggatctgcatcccctgtgagccctatgagtacctggctgatgagttcacctgcatggactgtggcagcggccagtggcccacagctgacctgaccggctgctatgacctgcctgaggactacatccgctgggaggatgcctgggccatcggccctgtgaccatcgcctgcctgggcttcatgtgcacctgcatggtggtgaccgtcttcatcaagcacaacaacacccccctggtgaaggccagcggccgggagctgtgctacatcctgctgtttggagtgggcctgagctactgcatgaccttcttcttcatcgccaagcccagccctgtgatctgtgccctgcggcggctgggcctgggcagcagctttgccatctgctacagcgccctgctgaccaagaccaactgcatcgcccgcatctttgatggagtgaagaatggagcccagaggcccaagttcatcagccccagcagccaggtgttcatctgcctgggcctcatcctggtgcagatcgtgatggtgtctgtgtggctgatcctggaggcccctggcacccggcgctacaccctggccgagaagcgggagaccgtcatcctgaagtgcaatgtgaaggacagctccatgctgatcagcctgacctatgatgtgatcctggtgatcctgtgcaccgtgtatgccttcaagaccaggaagtgcccagagaacttcaatgaggccaagttcatcggcttcaccatgtacaccacctgcatcatctggctggccttcctgcccatcttctacgtgaccagcagtgactacagagtgcagaccaccaccatgtgcatctctgtgtccctgagcggctttgtggtgctgggctgcctgtttgcccccaaggtgcacatcatcctcttccagccccagaagaatgtggtgacccaccggctgcacctgaaccgcttctctgtgtctggaacaggcaccacctacagccagagcagcgccagcacctacgtgcccaccgtgtgcaatggccgggaggtgctggacagcaccaccagcagcctgtag

SEQ ID NO: 16461 - DNA, 2640 bp, Artificial Sequence
  derived and/or modified sequence
atgaagatgctgacccggctgcaggtgctgaccctggccctgttcagtaaaggcttcctgctctccttgggggaccacaacttcttgaggagggagattaagattgagggtgacctagtgctggggggactattccccatcaatgaaaaggggactggtactgaagagtgcggccggatcaacgaggaccgaggaatacagaggctcgaggcgatgctcttcgccattgacgaaattaacaaggacgattacctgttgcccggggtgaaactgggcgtacacattctggacacttgttccagagacacgtacgccctcgagcaaagtctggaattcgtgcgcgcatcactgaccaaagtagatgaggcagaatacatgtgtccggacggtagttacgccatccaggagaatatacccctgttgatcgcgggagttatcggcgggtcttactccagcgtcagtattcaggtggcaaatctcctccgcctgtttcaaattccccaaatctcttatgcctcaacatccgccaaactctctgacaagtcacggtatgactacttcgcacgcacagtgcctcccgacttctaccaagccaaagcaatggccgaaatcctgagatttttcaattggacctatgttagtaccgtcgcctcggaaggagattatggggagacaggtatagaggcgtttgagcaggaagcacggctcagaaatatatgcatcgcaaccgcagaaaaagtggggcgatctaatattcgaaaaagctatgacagcgtgatcagagagctcctacagaagcctaatgcccgcgtggtggtgttattcatgaggagcgacgacagccgggagcttattgcggcagcctcgcgtgccaatgccagttttacatgggtggctagcgacggctggggggcgcaggagtcaataatcaaaggttccgagcacgtggcctatggggcaatcacattagagttggcatctcagccagtgcgacagtttgacaggtattttcagtccctcaatccatacaataatcaccgaaatccctggtttcgcgatttttgggaacagaaattccagtgttctctacagaacaagcgtaatcacagaagggtttgtgacaaacacctggccatcgactctagtaattacgagcaggagagcaaaattatgtttgttgtgaacgccgtgtatgccatggcgcatgctctacacaagatgcagcgaacactatgccccaacactacgaagctgtgcgatgcaatgaaaattctggacggaaagaagctgtataaagactatttattaaagatcaattttaccgcccccttcaaccccaacaaggacgcagattcaattgtaaaatttgatacatttggggacggcatgggaaggtataatgtgtttaatttccaaaatgtgggaggtaagtactcgtaccttaaggtcggccattgggctgagaccctgtctctcgacgtcaacagtattcattggtctcgcaatagtgtgccaacaagccagtgttctgacccttgcgcccctaacgagatgaagaacatgcaacccggggacgtgtgctgctggatatgtattccatgcgaaccctatgaatacctggctgatgagtttacatgtatggactgtgggtccggtcagtggcccactgcagacctcaccggctgttatgatctgcccgaggattacatccggtgggaggacgcttgggccatcgggcccgtgactatagcttgtcttggattcatgtgcacttgtatggtggtgacagtattcatcaagcacaacaacacccccctggtgaaggcttccgggagagagctttgctacattcttctctttggcgttggcttgtcctattgcatgacgttttttttcattgctaagccttcacctgttatatgcgctcttcgtagactcgggttggggtcatctttcgcaatctgttactccgctctactgactaaaacgaactgcatcgctaggatttttgacggggtcaaaaatggcgcacaaaggcccaagtttatctcccccagtagccaggtgttcatctgcctggggctcattctggtgcagatcgtcatggtgtccgtctggctaattctggaggccccgggaacccgccggtatactctcgccgagaaacgcgaaacagttatcctaaaatgcaacgttaaagactcatcaatgctcattagcctcacctatgacgtgatcttggtgatattgtgcacagtgtacgcattcaaaactcggaaatgcccagaaaatttcaacgaagccaaatttatcggcttcacaatgtatactacatgcataatatggctcgcatttttgcctatattctacgtcaccagctccgattatcgggttcagaccactaccatgtgcatcagtgtatctctctctgggttcgttgtcttgggatgcctgtttgccccaaaagtgcatatcatcctgttccagccccaaaagaacgtcgtgacgcacaggctccaccttaataggttttccgtcagcggcacaggcacaacatacagccaatcttcggcttctacttacgtaccaactgtctgtaacggaagagaggtcctggacagtactaccagtagcctgtag

SEQ ID NO: 16462 - DNA, 2256 bp, Artificial Sequence
  derived and/or modified sequence
atgagccagagccccggcgccggcagccccccccccctgccccccagatctgcccctgtaccagcacggagctgtaggtgcgaggtggccaacctcttacgcctgtttcagattccccagatttcttatgcttctacttctgccaagctgagcgacaaaagccggtacgactatttcgcacgcacagtgccccccgacttttaccaggccaaagccatggccgagatcctgcggttttttaactggacgtacgtgtctaccgttgcatcggaaggggactatggagaaactggaatcgaagcctttgagcaggaggcccgcttgcgcaatatctgcattgcaactgcggaaaaggtggggcggtcaaacattagaaagtcttacgacagtgttattagggaactgttgcaaaaacctaacgcaagagtcgtggtcctgtttatgaggtccgatgattcaagggagctcatcgctgccgctagccgggcaaatgcttcttttacctgggtcgcctcagatggctggggggctcaggagagcatcataaaaggttccgaacacgtagcatatggagctatcacattggagttagcctcacagcctgttagacagttcgatagatacttccagagtctgaacccatataacaaccaccggaatccttggtttcgggatttttgggagcagaaattccagtgttcactgcagaataagcggaatcacagacgagtctgtgataaacatttggccatcgattcttctaactacgagcaggagtcaaagattatgttcgtggtcaacgctgtgtatgcaatggcacatgccttgcataagatgcagaggaccctctgcccaaatactaccaagctctgtgatgcaatgaaaatcctcgacgggaagaagctgtacaaagactatctgttgaagataaactttacagctccttttaatccgaacaaagacgccgatagcatagtcaaattcgacacattcggagacggaatgggacgctacaatgtcttcaatttccagaatgtcggagggaagtattcctaccttaaagtcgggcactgggccgagacgctgagtcttgatgtgaattccatccactggtcacggaactccgtgccaacttcccagtgctccgatccctgtgccccgaatgagatgaaaaacatgcagcccggggacgtctgctgttggatatgtatcccttgcgagccatatgagtacttagccgatgaatttacctgtatggactgcggttcaggccagtggccaactgcagatttgacaggctgttacgatctgcccgaggactatattcgctgggaggatgcctgggccatcggcccagtaactatcgcttgcctggggtttatgtgcacctgtatggtggttacggtgtttatcaagcacaacaacacacccctggtcaaagcttctgggcgggaattatgctacattctgctgttcggtgtgggcctctcatactgcatgacatttttcttcatagccaagccctctccagtgatctgcgcgcttagacgattgggcctcgggtcctcgttcgctatttgttattcggccctgttgaccaaaacaaattgtatcgcaagaatcttcgatggcgtcaagaacggagctcagcgtcctaaatttatcagcccatcatctcaggtcttcatatgccttggccttatcttagtgcaaatcgtcatggtgtctgtgtggcttatcctggaagctccagggaccagacgatataccttggccgagaagcgcgagaccgtgatactgaagtgtaacgtaaaagacagctccatgctcatcagccttacttatgatgtcattctggtgattttatgcaccgtttacgcattcaaaacaaggaagtgccctgaaaatttcaacgaggctaagttcattggattcaccatgtacacaacatgtatcatttggttggctttcctccccattttctatgtaacctcatccgattatagagtacagactacaacaatgtgtatcagcgttagcctgagcggcttcgtcgtcctaggatgcctgtttgcaccgaaagttcacatcatccttttccagccccagaagaatgtggtaacccaccgactgcacttaaacaggttttccgtttcaggcacaggaacgacttatagtcaaagttcagcaagcacatatgttcctactgtctgcaacgggcgggaagtcctggattctactacttcctctttgtag

SEQ ID NO: 16463 - DNA, 1416 bp, Artificial Sequence
  derived and/or modified sequence
atgcggcggaccaaccacgagcccgagcccggctgccggctgaccgcagccgccgccaccgccgtgtcttccagtagttgtcaggagctctccgtgcgtgcacctttcaacccaaataaagacgcagatagtatagtcaaattcgacacctttggagatggcatgggtcgctataacgttttcaactttcaaaacgttggcgggaagtactcatatctgaaagtcggtcactgggcggagaccctcagtctggatgtaaacagcatccactggtctagaaatagcgtcccaacaagccaatgttccgacccttgcgcacccaacgaaatgaaaaatatgcagcccggcgacgtttgctgttggatctgcatcccctgtgagccatatgaatatttagctgacgaatttacctgcatggattgcggctctggccagtggcctacggctgacttgaccggctgctacgatctccccgaagattatatccggtgggaagatgcctgggccattggccccgtcactatcgcctgcctgggatttatgtgtacttgcatggttgtgaccgtgttcatcaaacataataacactcctctggtgaaggcttccggccgtgagctctgctatatcctcctgtttggggttgggttgtcttactgcatgacattctttttcatcgctaaaccctcgcctgtaatttgcgctctccgaaggctcggtctcgggtccagctttgcaatatgttattcagccctgcttactaagactaactgcatcgctcggatctttgatggggtgaaaaacggggctcagagacccaagtttatatctccaagttcgcaggtcttcatatgcctgggtctgattcttgtgcagattgttatggtatctgtatggctcatccttgaggcccccggcaccagacggtataccctggcagaaaaacgagagacggtgatacttaaatgtaacgttaaggactcgtctatgctcatcagcttaacctatgacgtcatcctcgtgattctgtgtacagtttacgccttcaagactcggaaatgccctgaaaattttaacgaggctaagtttatcggattcaccatgtatacaacatgtatcatctggctagcttttctacctattttttatgtgaccagtagtgactacagggtgcagactaccaccatgtgtatctctgtgtcactgagtggatttgtggtgctgggatgtctgttcgcgcccaaggtgcacatcatcctgttccagcctcaaaaaaacgtggtgactcatcgactgcacttgaaccgtttttctgtgagcggtaccggtacaacctatagccaaagcagtgcgagcacatatgtcccaacagtttgcaatggtcgggaagtgctggattcaactaccagttccctgtag

SEQ ID NO: 16464 - DNA, 2640 bp, Artificial Sequence
  derived and/or modified sequence
atgaagatgctgaccaggctgcaggttctcacgctggcattattctcgaaggggttcctgttaagtctcggcgatcacaatttcctgcgacgcgaaattaagattgagggcgatcttgtcttgggtggcctgttcccaatcaatgagaagggcaccggcaccgaagagtgtgggcgaattaacgaagaccgcggaatacaaaggttagaggcgatgctgtttgcgatcgatgagatcaataaggacgactacctgctgcccggagtaaaacttggcgttcacatcctggatacgtgttctagagacacttacgcgctggagcagagcttagagtttgttagagcctcgctgactaaggtagatgaggctgaatacatgtgcccagatggatcttacgccattcaggaaaacattcctttactgatcgctggtgtgataggaggctcctacagtagcgtcagtatccaggtcgcaaatctcctccgcctgtttcagatacctcagataagctatgcctccactagcgcaaaattaagcgataaatctcgctatgattattttgcaagaacggtgcccccagacttctaccaggcaaaagccatggccgagatccttcgattcttcaactggacatacgtcagtaccgtggcttccgagggcgactacggcgagaccggaattgaggcatttgagcaggaagctcgcctgcgaaacatatgcattgcaaccgccgaaaaggtgggcaggtctaacattcgcaagagttacgacagtgtaatcagggaattattgcagaagcccaacgcgagagtagtagtcctgtttatgaggtctgatgattcccgcgaactgattgccgctgcctcgagggccaatgcatcctttacctgggtggctagtgatggatggggggcacaagaaagcatcataaagggtagcgagcatgtggcatatggagcaataacgctggagctcgccagtcagccagtgcgccagtttgacagatactttcagagtctgaacccgtacaataatcaccgcaacccctggttcagggatttttgggagcaaaaattccagtgcagcttgcagaataaacgcaaccaccggagggtctgcgataagcatctggccatcgattccagcaattacgaacaagagtctaaaatcatgttcgtcgtgaatgccgtgtatgccatggcccatgccctgcacaaaatgcagcgcacgttgtgtcccaatacaacaaagctatgcgacgccatgaaaatactggacggaaagaaactgtataaagactacttgttgaagattaattttaccgcgccatttaacccaaacaaagacgcagacagtatcgtcaaattcgacacctttggggatggcatggggagatacaacgtattcaatttccagaacgtcggtggcaagtactcatacctgaaggtcgggcactgggcagaaacactgtctctggatgttaacagtatacattggagccggaacagcgtccctacttctcagtgtagtgacccctgcgcaccgaatgagatgaaaaatatgcagcccggagatgtgtgctgctggatttgcatcccatgcgaaccctacgaatacctggccgacgagtttacctgcatggactgtgggtctgggcaatggcccactgctgacctcacagggtgttatgacttgcctgaggattacatccggtgggaagacgcatgggccatcggacccgtgaccatcgcttgcctgggcttcatgtgtacctgcatggttgtgacagtgttcatcaaacacaataataccccgctcgtaaaggcctccggtagagagttgtgctacattctgttatttggggttgggttgagctattgcatgacttttttcttcatcgccaagccctccccagtcatctgcgccctgcgtagactgggactgggatcatcattcgctatttgctacagcgcactccttacaaagaccaactgcatagctagaatctttgacggggtgaaaaacggcgctcagcgtcctaagttcatctcaccttccagccaagtttttatctgtctgggcttaattctagtccaaatcgtgatggtgagtgtttggctcattctggaggctccgggtacacggaggtacacccttgcggagaagagggagacagtgatcctgaaatgtaacgttaaagacagcagtatgctgatctctttaacttatgatgtaatcttagttatactatgtaccgtgtatgcgttcaaaacccggaaatgccccgaaaactttaacgaggcaaagtttatagggtttaccatgtacacgacatgtatcatctggttagcctttctgccaattttctacgtgacgagcagcgattatagggtacagaccacgacaatgtgtatctctgtttccctctcaggttttgttgttctggggtgcctgttcgcacccaaagtgcacatcatactgtttcaacctcagaaaaacgtcgtcactcaccggctgcacctgaatagattttccgtgagtggaacaggaaccacgtactcccagagcagtgcaagcacctacgttcccactgtatgcaacggcagggaagtgttggattccaccacctcatctctgtag

SEQ ID NO: 16465 - DNA, 2256 bp, Artificial Sequence
  derived and/or modified sequence
atgagccagtctcctggggcaggcagcccccctccgctgccaccaaggtctgcgccagtgccggctaggagctgcaggtgtgaagtcgcaaaccttctcaggctctttcaaatcccccagatctcatacgctagcacaagtgccaagctgtccgataagagcagatacgactactttgcaagaaccgttcccccagatttctatcaggccaaggctatggcagagatacttcgattctttaattggacttatgtctcaaccgtagcttcagaaggggattatggagagacagggattgaggctttcgagcaggaggcgagactccgcaatatttgcatcgcaactgctgagaaggtgggtcggagcaatatccgcaagtcttacgactcagtgattcgtgaattgctgcagaaacctaatgcgagggtggttgtgttatttatgaggtctgatgacagccgagaactgattgcagccgcaagtagggcgaatgcctctttcacgtgggttgctagcgacggatggggggctcaagagtcaataattaaggggtctgagcatgttgcttatggagctataaccctggagcttgcatcccagccggtgcgccagtttgatcgctatttccaaagcctgaatccctataacaatcatcgtaacccctggtttagagacttttgggagcaaaaatttcagtgctctctccagaataagaggaatcatcgccgagtgtgcgacaagcacctggccatcgatagcagtaactacgaacaggagagtaagataatgttcgtagttaacgcagtatatgctatggcccatgcattacataagatgcaaaggactctgtgccccaacactaccaaactgtgtgatgctatgaagattctcgatggaaagaaactttacaaggactacttgctcaagatcaactttactgctccttttaacccaaacaaggatgctgatagcattgtgaaattcgatacatttggcgatgggatgggcagatacaacgtgtttaattttcagaatgttggcggaaagtactcttatctcaaggtgggccattgggcagagactctctcactcgatgtgaattccatccattggagtcgaaatagtgttcccacatctcaatgcagtgacccctgtgctccaaacgaaatgaaaaacatgcagcccggagatgtgtgctgttggatctgtattccatgcgagccttacgagtacttagcggatgaattcacctgcatggactgtggctccggccagtggcccactgccgatctcacaggttgttacgacctgccggaagactatattcggtgggaagatgcatgggctattggcccagtaacgatcgcctgtctgggcttcatgtgcacttgcatggtagttactgtgttcattaagcacaataatactcctctggtaaaagcttccggccgagaactctgctacatcctgctctttggtgttggactgtcatactgtatgacttttttcttcatagcgaagcccagtcctgtcatctgcgccctccggaggctcgggttgggaagttcattcgcgatctgttactcagccctcttgaccaagaccaactgcattgctcggatattcgatggtgttaagaacggggcacagagacccaagttcattagcccttccagccaggtttttatctgcctcggcttgatcctggtacagatcgtcatggtcagtgtgtggctgattttagaggcgccaggaaccagacgctacactctggccgaaaaacgcgaaacagtgattctcaagtgcaatgttaaagactccagtatgctgatctctttgacctacgatgtgatcttggtcatactctgtaccgtgtacgcctttaaaactcgcaagtgcccagagaattttaatgaagctaagttcatcggcttcaccatgtatactacttgtattatatggttagccttcctgccaatcttctatgttacatcgtcggactatcgcgtgcagacgactacaatgtgtatcagtgtgtctctatccggctttgtcgtccttggatgtcttttcgcgccaaaggttcatatcatcttattccagccccagaagaacgttgtgacacataggctccacctgaaccgcttcagtgtttccggcactggcaccacctactcacaatcatccgcctccacatacgttcccactgtgtgcaacggacgggaggtgctggatagcactaccagttcattatag

SEQ ID NO: 16466 - DNA, 1416 bp, Artificial Sequence
  derived and/or modified sequence
atgcgacgcacaaaccacgaaccagagccgggatgtagattgacagcggctgctgcaacagcagttagcagctccagttgccaagagctgtctgtccgcgctcccttcaacccaaataaagacgccgactcgattgtgaaatttgacacattcggagacggaatggggaggtacaacgtattcaattttcaaaacgtaggcggtaagtactcatacctcaaggtcgggcactgggctgaaaccctctctctagacgtcaattcaatccattggtctcgcaattcagttccaactagccagtgcagcgacccctgtgcacccaatgagatgaagaatatgcagcccggtgacgtgtgttgctggatttgtatcccttgtgagccgtacgagtatttggccgacgaattcacatgtatggattgcggaagcggccagtggccaactgctgatctgacagggtgctacgatcttcctgaagattacatccgctgggaggacgcttgggccattgggccagtcaccatcgcctgtctcggcttcatgtgcacatgtatggttgttaccgtgttcattaaacataataacacgccactagtgaaggcatcaggtagggaattgtgctatatcctgctgttcggtgttgggctctcatattgtatgacattctttttcatcgcaaagccttctccagtgatttgcgccttgcgccgtcttggcctgggctcatctttcgcgatatgttattcagccctgctgactaagacaaactgcatagccagaatttttgatggagttaagaacggagctcagcggcctaaatttataagtccttcctcccaggtctttatatgcttaggcctgatccttgtccagatcgttatggtctctgtttggttgattttagaggcacccggtacccgaagatacaccctggccgagaagcgggagacagtgatcctaaaatgcaatgtaaaggattcctcaatgctgatctcactgacttatgatgtgatcttggtcatcctgtgcactgtttatgccttcaagactcggaaatgtccggaaaacttcaatgaagctaagttcatcggcttcaccatgtacaccacctgcataatatggctggcgtttcttccaattttttatgtaacgtcctcagactacagagtgcaaaccacaaccatgtgcatcagcgtgtccttaagtgggtttgtggtgctggggtgcctttttgcgcctaaagtgcacattatcctcttccagccacaaaagaatgtagtgacacataggctccatcttaatcggttctccgtgtccgggactggcactacatatagtcaatcctccgcctccacctacgttcccacagtatgcaatggcagggaggttcttgacagtaccacatcatctttatag

SEQ ID NO: 16467 - DNA, 2640 bp, Artificial Sequence
  derived and/or modified sequence
atgaagatgctgaccagactgcaggtgctgaccctggccctgttcagcaagggcttcctgctgagcctgggcgaccacaacttcctgagaagagagatcaagatcgagggcgacctggtgctgggcggcctgttccccatcaacgagaagggcaccggcaccgaggagtgcggcagaatcaacgaggacagaggcatccagagactggaggccatgctgttcgccatcgacgagatcaacaaggacgactacctgctgcccggcgtgaagctgggcgtgcacatcctggacacctgcagcagagacacctacgccctggagcagagcctggagttcgtgagagccagcctgaccaaggtggacgaggccgagtacatgtgccccgacggcagctacgccatccaggagaacatccccctgctgatcgccggcgtgatcggcggcagctacagcagcgtgagcatccaggtggccaacctgctgagactgttccagatcccccagatcagctacgccagcaccagcgccaagctgagcgacaagagcagatacgactacttcgccagaaccgtgccccccgacttctaccaggccaaggccatggccgagatcctgagattcttcaactggacctacgtgagcaccgtggccagcgagggcgactacggcgagaccggcatcgaggccttcgagcaggaggccagactgagaaacatctgcatcgccaccgccgagaaggtgggcagaagcaacatcagaaagagctacgacagcgtgatcagagagctgctgcagaagcccaacgccagagtggtggtgctgttcatgagaagcgacgacagcagagagctgatcgccgccgccagcagagccaacgccagcttcacctgggtggccagcgacggctggggcgcccaggagagcatcatcaagggcagcgagcacgtggcctacggcgccatcaccctggagctggccagccagcccgtgagacagttcgacagatacttccagagcctgaacccctacaacaaccacagaaacccctggttcagagacttctgggagcagaagttccagtgcagcctgcagaacaagagaaaccacagaagagtgtgcgacaagcacctggccatcgacagcagcaactacgagcaggagagcaagatcatgttcgtggtgaacgccgtgtacgccatggcccacgccctgcacaagatgcagagaaccctgtgccccaacaccaccaagctgtgcgacgccatgaagatcctggacggcaagaagctgtacaaggactacctgctgaagatcaacttcaccgcccccttcaaccccaacaaggacgccgacagcatcgtgaagttcgacaccttcggcgacggcatgggcagatacaacgtgttcaacttccagaacgtgggcggcaagtacagctacctgaaggtgggccactgggccgagaccctgagcctggacgtgaacagcatccactggagcagaaacagcgtgcccaccagccagtgcagcgacccctgcgcccccaacgagatgaagaacatgcagcccggcgacgtgtgctgctggatctgcatcccctgcgagccctacgagtacctggccgacgagttcacctgcatggactgcggcagcggccagtggcccaccgccgacctgaccggctgctacgacctgcccgaggactacatcagatgggaggacgcctgggccatcggccccgtgaccatcgcctgcctgggcttcatgtgcacctgcatggtggtgaccgtgttcatcaagcacaacaacacccccctggtgaaggccagcggcagagagctgtgctacatcctgctgttcggcgtgggcctgagctactgcatgaccttcttcttcatcgccaagcccagccccgtgatctgcgccctgagaagactgggcctgggcagcagcttcgccatctgctacagcgccctgctgaccaagaccaactgcatcgccagaatcttcgacggcgtgaagaacggcgcccagagacccaagttcatcagccccagcagccaggtgttcatctgcctgggcctgatcctggtgcagatcgtgatggtgagcgtgtggctgatcctggaggcccccggcaccagaagatacaccctggccgagaagagagagaccgtgatcctgaagtgcaacgtgaaggacagcagcatgctgatcagcctgacctacgacgtgatcctggtgatcctgtgcaccgtgtacgccttcaagaccagaaagtgccccgagaacttcaacgaggccaagttcatcggcttcaccatgtacaccacctgcatcatctggctggccttcctgcccatcttctacgtgaccagcagcgactacagagtgcagaccaccaccatgtgcatcagcgtgagcctgagcggcttcgtggtgctgggctgcctgttcgcccccaaggtgcacatcatcctgttccagccccagaagaacgtggtgacccacagactgcacctgaacagattcagcgtgagcggcaccggcaccacctacagccagagcagcgccagcacctacgtgcccaccgtgtgcaacggcagagaggtgctggacagcaccaccagcagcctgtag

SEQ ID NO: 16468 - DNA, 2256 bp, Artificial Sequence
  derived and/or modified sequence
atgagccagagccccggcgccggcagccccccccccctgccccccagaagcgcccccgtgcccgccagaagctgcagatgcgaggtggccaacctgctgagactgttccagatcccccagatcagctacgccagcaccagcgccaagctgagcgacaagagcagatacgactacttcgccagaaccgtgccccccgacttctaccaggccaaggccatggccgagatcctgagattcttcaactggacctacgtgagcaccgtggccagcgagggcgactacggcgagaccggcatcgaggccttcgagcaggaggccagactgagaaacatctgcatcgccaccgccgagaaggtgggcagaagcaacatcagaaagagctacgacagcgtgatcagagagctgctgcagaagcccaacgccagagtggtggtgctgttcatgagaagcgacgacagcagagagctgatcgccgccgccagcagagccaacgccagcttcacctgggtggccagcgacggctggggcgcccaggagagcatcatcaagggcagcgagcacgtggcctacggcgccatcaccctggagctggccagccagcccgtgagacagttcgacagatacttccagagcctgaacccctacaacaaccacagaaacccctggttcagagacttctgggagcagaagttccagtgcagcctgcagaacaagagaaaccacagaagagtgtgcgacaagcacctggccatcgacagcagcaactacgagcaggagagcaagatcatgttcgtggtgaacgccgtgtacgccatggcccacgccctgcacaagatgcagagaaccctgtgccccaacaccaccaagctgtgcgacgccatgaagatcctggacggcaagaagctgtacaaggactacctgctgaagatcaacttcaccgcccccttcaaccccaacaaggacgccgacagcatcgtgaagttcgacaccttcggcgacggcatgggcagatacaacgtgttcaacttccagaacgtgggcggcaagtacagctacctgaaggtgggccactgggccgagaccctgagcctggacgtgaacagcatccactggagcagaaacagcgtgcccaccagccagtgcagcgacccctgcgcccccaacgagatgaagaacatgcagcccggcgacgtgtgctgctggatctgcatcccctgcgagccctacgagtacctggccgacgagttcacctgcatggactgcggcagcggccagtggcccaccgccgacctgaccggctgctacgacctgcccgaggactacatcagatgggaggacgcctgggccatcggccccgtgaccatcgcctgcctgggcttcatgtgcacctgcatggtggtgaccgtgttcatcaagcacaacaacacccccctggtgaaggccagcggcagagagctgtgctacatcctgctgttcggcgtgggcctgagctactgcatgaccttcttcttcatcgccaagcccagccccgtgatctgcgccctgagaagactgggcctgggcagcagcttcgccatctgctacagcgccctgctgaccaagaccaactgcatcgccagaatcttcgacggcgtgaagaacggcgcccagagacccaagttcatcagccccagcagccaggtgttcatctgcctgggcctgatcctggtgcagatcgtgatggtgagcgtgtggctgatcctggaggcccccggcaccagaagatacaccctggccgagaagagagagaccgtgatcctgaagtgcaacgtgaaggacagcagcatgctgatcagcctgacctacgacgtgatcctggtgatcctgtgcaccgtgtacgccttcaagaccagaaagtgccccgagaacttcaacgaggccaagttcatcggcttcaccatgtacaccacctgcatcatctggctggccttcctgcccatcttctacgtgaccagcagcgactacagagtgcagaccaccaccatgtgcatcagcgtgagcctgagcggcttcgtggtgctgggctgcctgttcgcccccaaggtgcacatcatcctgttccagccccagaagaacgtggtgacccacagactgcacctgaacagattcagcgtgagcggcaccggcaccacctacagccagagcagcgccagcacctacgtgcccaccgtgtgcaacggcagagaggtgctggacagcaccaccagcagcctgtag

SEQ ID NO: 16469 - DNA, 1416 bp, Artificial Sequence
  derived and/or modified sequence
atgagaagaaccaaccacgagcccgagcccggctgcagactgaccgccgccgccgccaccgccgtgagcagcagcagctgccaggagctgagcgtgagagcccccttcaaccccaacaaggacgccgacagcatcgtgaagttcgacaccttcggcgacggcatgggcagatacaacgtgttcaacttccagaacgtgggcggcaagtacagctacctgaaggtgggccactgggccgagaccctgagcctggacgtgaacagcatccactggagcagaaacagcgtgcccaccagccagtgcagcgacccctgcgcccccaacgagatgaagaacatgcagcccggcgacgtgtgctgctggatctgcatcccctgcgagccctacgagtacctggccgacgagttcacctgcatggactgcggcagcggccagtggcccaccgccgacctgaccggctgctacgacctgcccgaggactacatcagatgggaggacgcctgggccatcggccccgtgaccatcgcctgcctgggcttcatgtgcacctgcatggtggtgaccgtgttcatcaagcacaacaacacccccctggtgaaggccagcggcagagagctgtgctacatcctgctgttcggcgtgggcctgagctactgcatgaccttcttcttcatcgccaagcccagccccgtgatctgcgccctgagaagactgggcctgggcagcagcttcgccatctgctacagcgccctgctgaccaagaccaactgcatcgccagaatcttcgacggcgtgaagaacggcgcccagagacccaagttcatcagccccagcagccaggtgttcatctgcctgggcctgatcctggtgcagatcgtgatggtgagcgtgtggctgatcctggaggcccccggcaccagaagatacaccctggccgagaagagagagaccgtgatcctgaagtgcaacgtgaaggacagcagcatgctgatcagcctgacctacgacgtgatcctggtgatcctgtgcaccgtgtacgccttcaagaccagaaagtgccccgagaacttcaacgaggccaagttcatcggcttcaccatgtacaccacctgcatcatctggctggccttcctgcccatcttctacgtgaccagcagcgactacagagtgcagaccaccaccatgtgcatcagcgtgagcctgagcggcttcgtggtgctgggctgcctgttcgcccccaaggtgcacatcatcctgttccagccccagaagaacgtggtgacccacagactgcacctgaacagattcagcgtgagcggcaccggcaccacctacagccagagcagcgccagcacctacgtgcccaccgtgtgcaacggcagagaggtgctggacagcaccaccagcagcctgtag

SEQ ID NO: 16470 - protein, 912 aa, Artificial Sequence
  derived and/or modified sequence
MPGKRGLGWWWARLPLCLLLSLYGPWMPSSLGKPKGHPHMNSIRIDGDITLGGLFPVHGRGSEGKPCGELKKEKGIHRLEAMLFALDRINNDPDLLPNITLGARILDTCSRDTHALEQSLTFVQALIEKDGTEVRCGSGGPPIITKPERVVGVIGASGSSVSIMVANILRLFKIPQISYASTAPDLSDNSRYDFFSRVVPSDTYQAQAMVDIVRALKWNYVSTVASEGSYGESGVEAFIQKSREDGGVCIAQSVKIPREPKAGEFDKIIRRLLETSNARAVIIFANEDDIRRVLEAARRANQTGHFFWMGSDSWGSKIAPVLHLEEVAEGAVTILPKRMSVRGFDRYFSSRTLDNNRRNIWFAEFWEDNFHCKLSRHALKKGSHVKKCTNRERIGQDSAYEQEGKVQFVIDAVYAMGHALHAMHRDLCPGRVGLCPRMDPVDGTQLLKYIRNVNFSGIAGNPVTFNENGDAPGRYDIYQYQLRNDSAEYKVIGSWTDHLHLRIERMHWPGSGQQLPRSICSLPCQPGERKKTVKGMPCCWHCEPCTGYQYQVDRYTCKTCPYDMRPTENRTGCRPIPIIKLEWGSPWAVLPLFLAVVGIAATLFVVITFVRYNDTPIVKASGRELSYVLLAGIFLCYATTFLMIAEPDLGTCSLRRIFLGLGMSISYAALLTKTNRIYRIFEQGKRSVSAPRFISPASQLAITFSLISLQLLGICVWFVVDPSHSVVDFQDQRTLDPRFARGVLKCDISDLSLICLLGYSMLLMVTCTVYAIKTRGVPETFNEAKPIGFTMYTTCIVWLAFIPIFFGTSQSADKLYIQTTTLTVSVSLSASVSLGMLYMPKVYIILFHPEQNVPKRKRSLKAVVTAATMSNKFTQKGNFRPNGEAKSELCENLEAPALATKQTYVTYTNHAI

SEQ ID NO: 16471 - DNA, 2739 bp, Artificial Sequence
  derived and/or modified sequence
atgccagggaagcgcgggctgggctggtggtgggctcgccttcctctctgcctgctgttgagcctttacgggccgtggatgccatccagcctcggcaagcctaaaggacaccctcacatgaacagtattcgcatagatggagatatcactctcgggggccttttccccgttcatgggcggggctccgagggaaagccatgtggcgaacttaagaaggaaaagggcattcacaggctggaagctatgctattcgccctggaccgcatcaataatgatccagatctgttacccaatattactttaggggccaggatcctggacacctgctcacgggatacccacgctctggagcagtcactgactttcgtgcaagccctgatcgaaaaggacggaacggaggtcaggtgcggtagtggcggccctccgatcatcacaaagcccgagagagttgttggggtaatcggagcttcaggatcaagcgtatcaatcatggttgctaacatactgaggctgttcaaaatccctcagatcagttatgccagtacagcaccggatctgtcggataattccagatatgactttttcagtagggtggtgcctagtgatacctaccaggcccaggccatggttgacatcgtacgggctctgaagtggaactatgtgtctactgtcgcctccgaaggcagttatggtgagtctggcgtggaggcctttattcagaaatcccgggaggacggaggcgtgtgcatcgcacagtccgtaaaaattcctagggagccaaaggccggtgaattcgataaaattatcaggcgcctgctcgaaacttccaatgcacgagctgttattatttttgcgaacgaagatgacatccgtcgggtgctggaggcagctaggcgggcgaaccaaacagggcactttttctggatggggagcgatagttgggggtccaagatcgccccagttctacaccttgaggaggtggccgagggcgccgtgacaattctacccaagagaatgtctgtgcggggctttgaccgctactttagcagtcgcacattagataataaccggcgcaacatttggttcgcggagttctgggaggataactttcattgtaaactctcacgccacgcactcaaaaaaggatcccacgttaagaaatgcacaaaccgcgaacggatcggacaggattccgcatacgaacaggagggcaaagtgcaattcgttatcgatgccgtatacgcaatgggccacgccttgcacgctatgcatcgggacttatgtcctggccgcgtggggctttgtcccagaatggatcctgtcgatggaacccagctcctgaagtacatacgtaacgtcaattttagtggaatagcaggtaatcccgtgaccttcaatgaaaatggtgatgccccagggcggtatgatatttaccagtaccagctcagaaacgatagtgccgagtacaaggtgatcggcagctggaccgaccacctgcacctgcggatcgagagaatgcactggccaggatccggccagcagctgcctcggtccatttgctctcttccctgtcagcccggcgagagaaaaaagacggtcaaaggcatgccctgctgctggcattgtgaaccgtgtaccggttaccagtatcaagtggaccgatacacctgtaagacctgtccctacgacatgcgccccactgagaataggactggatgtcgtcccatcccaattatcaaactagagtgggggtccccttgggccgttctgccactctttctcgccgtggtgggtatagccgcgaccctgttcgtcgttattaccttcgtcaggtacaacgatacaccaatagtgaaggcatccggccgagagttatcctacgtactgttggctgggatctttttgtgctacgcaactacctttctgatgatagcagagcctgatttgggaacatgctccctgcgccgaatctttctaggcctgggcatgagcatctcctacgccgccctgctgactaagacgaaccgaatctaccgtatttttgagcagggtaaacggagcgtgtcagctccacgctttatttcccccgcctctcagctggccattaccttttctttgatttcactccagctactggggatttgcgtgtggttcgtggtggacccctcacatagcgtagtggattttcaggatcagcgaaccttggatcctcggtttgcccgaggggttctcaagtgtgacatctcggacctgagcttgatctgtctgcttggttacagtatgctgcttatggttacctgcacggtatatgccatcaaaacccgaggagtgccagaaacattcaacgaagcaaaaccaataggatttactatgtacaccacatgtatcgtttggctcgcattcatcccaatcttcttcggaacatcacaaagtgccgataaattgtatattcagactaccacactcacggtctcagtcagcctgagcgccagcgttagtctgggtatgttatatatgcccaaggtctacatcattttgtttcatcccgaacagaatgtccccaagaggaagcggtcactgaaggccgtggtcactgctgctactatgagtaacaaattcacccagaagggcaatttcagacccaacggcgaagccaagagcgagctgtgtgagaacctggaagctcccgcgttggccacgaagcagacgtacgtcacatataccaatcacgccatttag

SEQ ID NO: 16472 - DNA, 2739 bp, Artificial Sequence
  derived and/or modified sequence
atgcccggcaaaaggggcctcggatggtggtgggcccgattgcccctctgtctgcttctgagtttatacgggccttggatgccctcctctctggggaagccaaagggacaccctcacatgaacagtataaggattgacggagacatcacattaggaggccttttccctgtgcacggtagaggtagcgagggtaaaccctgtggagaacttaaaaaggaaaaaggtatccaccgcctggaagccatgctctttgctctggacagaataaacaacgatcctgatctgcttcctaacattacgctgggggcacgtatcctcgacacctgcagtagggacactcacgccctcgagcagagtctcacattcgtccaggctctcatcgagaaggatggaacagaagttcgatgtgggagtggagggcctcccatcatcactaagcctgagcgcgttgtgggggtgatcggcgcatccggtagtagtgtgtctatcatggtagccaacatacttcggctcttcaaaattccccagatctcatatgcgtcaaccgctccagacctcagcgacaatagtagatacgacttcttctccagggtggttccctctgatacctatcaggcacaggccatggtggacatcgtacgggcacttaagtggaactacgtttctaccgtcgcgagcgaaggatcctacggtgaatccggagtggaggccttcatccagaagtcgcgggaggatggaggagtctgtattgcccagtcagtaaaaatcccacgggagcccaaggcaggcgaatttgacaagatcatccgtcggctcctggagacctcaaacgcacgagcagtgatcatctttgccaacgaggatgacattaggcgggtgctggaggctgctcgtagagcaaatcagactggacattttttctggatgggatctgactcttggggcagcaagatcgccccagtcttacacttggaagaggttgcggaaggggcggtgaccatcctgcctaagcgtatgtcggttcggggctttgaccgctactttagctcccgtactctagataataaccggcgtaacatttggttcgcagagttctgggaagataattttcattgcaagctgtctcgccatgccttgaaaaaaggatcccacgtcaaaaaatgtactaacagagagcgtatagggcaggacagcgcctacgagcaagaaggtaaggtccagtttgtcattgacgcagtgtacgccatgggccacgcacttcatgctatgcatagggatctgtgccccggcagggtgggcttatgcccccgcatggaccctgtggacggcacgcagctgctgaagtatatacggaacgtgaatttctcaggtatagccggcaatccagtcacctttaatgaaaacggcgatgctcccggaaggtacgatatctaccagtaccagctgagaaatgatagcgccgaatacaaagtgatcggcagttggacagaccatctgcaccttcgcatcgagcggatgcactggcctgggagcggccaacagcttcctcgctcaatatgcagccttccgtgccaaccaggagaacggaagaaaactgtgaaaggaatgccgtgttgttggcattgcgagccatgcaccggctatcagtatcaggttgaccggtacacgtgtaagacatgtccctatgacatgagacctacggagaacagaaccggttgtaggcccattccaatcatcaagctcgaatgggggagtccttgggcagtgctgcccttgttcctggccgtagtggggatcgccgcaaccctgtttgttgtaataacctttgtcagatacaatgacaccccaatcgttaaagcgagcgggagggagctgtcctacgtactgcttgccgggattttcctgtgctatgccaccaccttcttaatgattgctgagcccgacttggggacttgttccctccggcggattttcctggggctgggcatgtcaatttcttatgccgccctcctcactaagacaaaccggatctataggatcttcgagcagggcaagagatccgtgagcgcaccccgctttatcagccccgcatcacagctggcgatcactttctctctcattagccttcaactgctggggatttgcgtctggtttgtcgtcgacccatcacattcagttgtcgatttccaggatcagcgcacccttgatccaagatttgcacgcggggtgctgaaatgtgatataagcgatctgtctcttatctgcctccttggttattccatgctcctcatggtgacatgcactgtgtatgcaatcaagactcggggcgtcccagagactttcaacgaggcgaaacctatcgggttcactatgtacaccacatgcatcgtctggctcgcttttatccctatatttttcgggacatcccaaagcgcggataagctttacattcagacgactacactgaccgttagtgtgtctttatctgcttctgtcagtctcggcatgctttatatgcccaaggtgtatattatcttgttccaccctgagcaaaatgtgccaaagagaaaacgcagcctgaaagcagtagtgacagctgctaccatgtccaacaagttcactcagaaaggtaatttcagacctaatggagaggccaaatctgaactctgtgagaatctggaggctcctgcattggcaacaaagcaaacctacgtgacatataccaaccacgcgatctag

SEQ ID NO: 16473 - DNA, 3879 bp, Artificial Sequence
  derived and/or modified sequence
ccgagtgacaaggaggtgggagagggtagcagcatgggctacgcggttggctgccctcagtccccctgctgctgaagctgccctgcccatgcccacccaggccgtggggccaggggcctgccagggctaggagtgggcctgccgttcatgggtctctagggatttccgagatgcctgggaagagaggcttgggctggtggtgggcccggctgcccctttgcctgctcctcagcctttacggcccctggatgccttcctccctgggaaagcccaaaggccaccctcacatgaattccatccgcatagatggggacatcacactgggaggcctgttcccggtgcatggccggggctcagagggcaagccctgtggagaacttaagaaggaaaagggcatccaccggctggaggccatgctgttcgccctggatcgcatcaacaacgacccggacctgctgcctaacatcacgctgggcgcccgcattctggacacctgctccagggacacccatgccctcgagcagtcgctgacctttgtgcaggcgctcatcgagaaggatggcacagaggtccgctgtggcagtggcggcccacccatcatcaccaagcctgaacgtgtggtgggtgtcatcggtgcttcagggagctcggtctccatcatggtggccaacatccttcgcctcttcaagataccccagatcagctacgcctccacagcgccagacctgagtgacaacagccgctacgacttcttctcccgcgtggtgccctcggacacgtaccaggcccaggccatggtggacatcgtccgtgccctcaagtggaactatgtgtccacagtggcctcggagggcagctatggtgagagcggtgtggaggccttcatccagaagtcccgtgaggacgggggcgtgtgcatcgcccagtcggtgaagataccacgggagcccaaggcaggcgagttcgacaagatcatccgccgcctcctggagacttcgaacgccagggcagtcatcatctttgccaacgaggatgacatcaggcgtgtgctggaggcagcacgaagggccaaccagacaggccatttcttctggatgggctctgacagctggggctccaagattgcacctgtgctgcacctggaggaggtggctgagggtgctgtcacgatcctccccaagaggatgtccgtacgaggcttcgaccgctacttctccagccgcacgctggacaacaaccggcgcaacatctggtttgccgagttctgggaggacaacttccactgcaagctgagccgccacgccctcaagaagggcagccacgtcaagaagtgcaccaaccgtgagcgaattgggcaggattcagcttatgagcaggaggggaaggtgcagtttgtgatcgatgccgtgtacgccatgggccacgcgctgcacgccatgcaccgtgacctgtgtcccggccgcgtggggctctgcccgcgcatggaccctgtagatggcacccagctgcttaagtacatccgaaacgtcaacttctcaggcatcgcagggaaccctgtgaccttcaatgagaatggagatgcgcctgggcgctatgacatctaccaataccagctgcgcaacgattctgccgagtacaaggtcattggctcctggactgaccacctgcaccttagaatagagcggatgcactggccggggagcgggcagcagctgccccgctccatctgcagcctgccctgccaaccgggtgagcggaagaagacagtgaagggcatgccttgctgctggcactgcgagccttgcacagggtaccagtaccaggtggaccgctacacctgtaagacgtgtccctatgacatgcggcccacagagaaccgcacgggctgccggcccatccccatcatcaagcttgagtggggctcgccctgggccgtgctgcccctcttcctggccgtggtgggcatcgctgccacgttgttcgtggtgatcacctttgtgcgctacaacgacacgcccatcgtcaaggcctcgggccgtgaactgagctacgtgctgctggcaggcatcttcctgtgctatgccaccaccttcctcatgatcgctgagcccgaccttggcacctgctcgctgcgccgaatcttcctgggactagggatgagcatcagctatgcagccctgctcaccaagaccaaccgcatctaccgcatcttcgagcagggcaagcgctcggtcagtgccccacgcttcatcagccccgcctcacagctggccatcaccttcagcctcatctcgctgcagctgctgggcatctgtgtgtggtttgtggtggacccctcccactcggtggtggacttccaggaccagcggacactcgacccccgcttcgccaggggtgtgctcaagtgtgacatctcggacctgtcgctcatctgcctgctgggctacagcatgctgctcatggtcacgtgcaccgtgtatgccatcaagacacgcggcgtgcccgagaccttcaatgaggccaagcccattggcttcaccatgtacaccacttgcatcgtctggctggccttcatccccatcttctttggcacctcgcagtcggccgacaagctgtacatccagacgacgacgctgacggtctcggtgagtctgagcgcctcggtgtccctgggaatgctctacatgcccaaagtctacatcatcctcttccacccggagcagaacgtgcccaagcgcaagcgcagcctcaaagccgtcgttacggcggccaccatgtccaacaagttcacgcagaagggcaacttccggcccaacggagaggccaagtctgagctctgcgagaaccttgaggccccagcgctggccaccaaacagacttacgtcacttacaccaaccatgcaatctagcgagtccatggagctgagcagcaggaggaggagccgtgaccctgtggaaggtgcgtcgggccagggccacacccaagggcccagctgtcttgcctgcccgtgggcacccacggacgtggcttggtgctgaggatagcagagcccccagccatcactgctggcagcctgggcaaaccgggtgagcaacaggaggacgaggggccggggcggtgccaggctaccacaagaacctgcgtcttggaccattgcccctcccggccccaaaccacaggggctcaggtcgtgtgggccccagtgctagatctctccctcccttcgtctctgtctgtgctgttggcgacccctctgtctgtctccagccctgtctttctgttctcttatctctttgtttcaccttttccctctctggcgtccccggctgcttgtactcttggccttttctgtgtctcctttctggctcttgcctccgcctctctctctcatcctctttgtcctcagctcctcctgctttcttgggtcccaccagtgtcacttttctgccgttttctttcctgttctcctctgcttcattctcgtccagccattgctcccctctccctgccacccttccccagttcaccaaaccttacatgttgcaaaagagaaaaaaggaaaaaaaatcaaaacacaaaaaagccaaaacgaaaacaaatctcgagtgtgttgccaagtgctgcgtcctcctggtggcctctgtgtgtgtccctgtggcccgcagcctgcccgcctgccccgcccatctgccgtgtgtcttgcccgcctgccccgcccgtctgccgtctgtcttgcccgcctgcccgcctgcccctcctgccgaccacacggagttcagtgcctgggtgtttggtgatggttattgacgacaatgtgtagcgcatgattgtttttataccaagaacatttctaataaaaataaacacatggttttgca

SEQ ID NO: 16474 - DNA, 3409 bp, Artificial Sequence
  derived and/or modified sequence
ttttctgggtgtgtgttagggaggctatgttcctgaccctccccctctggggtgagaaggggtccccgccatgtcctcggggttggtaggaggagaggattggagctgttttctccttgatgccaagatacgccaagctaggagcattctgccctttccacagtcatccaccgagaacaggcctgcaggacgggacaaggatcagagccttcctgcaaccccggccactgcctgctgtctgtgggcctggactgtgcgggcaactgtgcttggcccgagtgacaaggaggtgggagagggtagcagcatgggctacgcggttggctgccctcagtccccctgctgctgaagctgccctgcccatgcccacccaggccgtggggccaggggcctgccagggctaggagtgggcctgccgttcatgggtctctagggatttccgagatgcctgggaagagaggcttgggctggtggtgggcccggctgcccctttgcctgctcctcagcctttacggcccctggatgccttcctccctgggaaagcccaaaggccaccctcacatgaattccatccgcatagatggggacatcacactgggaggcctgttcccggtgcatggccggggctcagagggcaagccctgtggagaacttaagaaggaaaagggcatccaccggctggaggccatgctgttcgccctggatcgcatcaacaacgacccggacctgctgcctaacatcacgctgggcgcccgcattctggacacctgctccagggacacccatgccctcgagcagtcgctgacctttgtgcaggcgctcatcgagaaggatggcacagaggtccgctgtggcagtggcggcccacccatcatcaccaagcctgaacgtgtggtgggtgtcatcggtgcttcagggagctcggtctccatcatggtggccaacatccttcgcctcttcaagataccccagatcagctacgcctccacagcgccagacctgagtgacaacagccgctacgacttcttctcccgcgtggtgccctcggacacgtaccaggcccaggccatggtggacatcgtccgtgccctcaagtggaactatgtgtccacagtggcctcggagggcagctatggtgagagcggtgtggaggccttcatccagaagtcccgtgaggacgggggcgtgtgcatcgcccagtcggtgaagataccacgggagcccaaggcaggcgagttcgacaagatcatccgccgcctcctggagacttcgaacgccagggcagtcatcatctttgccaacgaggatgacatcaggcgtgtgctggaggcagcacgaagggccaaccagacaggccatttcttctggatgggctctgacagctggggctccaagattgcacctgtgctgcacctggaggaggtggctgagggtgctgtcacgatcctccccaagaggatgtccgtacgaggcttcgaccgctacttctccagccgcacgctggacaacaaccggcgcaacatctggtttgccgagttctgggaggacaacttccactgcaagctgagccgccacgccctcaagaagggcagccacgtcaagaagtgcaccaaccgtgagcgaattgggcaggattcagcttatgagcaggaggggaaggtgcagtttgtgatcgatgccgtgtacgccatgggccacgcgctgcacgccatgcaccgtgacctgtgtcccggccgcgtggggctctgcccgcgcatggaccctgtagatggcacccagctgcttaagtacatccgaaacgtcaacttctcaggcatcgcagggaaccctgtgaccttcaatgagaatggagatgcgcctgggcgctatgacatctaccaataccagctgcgcaacgattctgccgagtacaaggtcattggctcctggactgaccacctgcaccttagaatagagcggatgcactggccggggagcgggcagcagctgccccgctccatctgcagcctgccctgccaaccgggtgagcggaagaagacagtgaagggcatgccttgctgctggcactgcgagccttgcacagggtaccagtaccaggtggaccgctacacctgtaagacgtgtccctatgacatgcggcccacagagaaccgcacgggctgccggcccatccccatcatcaagcttgagtggggctcgccctgggccgtgctgcccctcttcctggccgtggtgggcatcgctgccacgttgttcgtggtgatcacctttgtgcgctacaacgacacgcccatcgtcaaggcctcgggccgtgaactgagctacgtgctgctggcaggcatcttcctgtgctatgccaccaccttcctcatgatcgctgagcccgaccttggcacctgctcgctgcgccgaatcttcctgggactagggatgagcatcagctatgcagccctgctcaccaagaccaaccgcatctaccgcatcttcgagcagggcaagcgctcggtcagtgccccacgcttcatcagccccgcctcacagctggccatcaccttcagcctcatctcgctgcagctgctgggcatctgtgtgtggtttgtggtggacccctcccactcggtggtggacttccaggaccagcggacactcgacccccgcttcgccaggggtgtgctcaagtgtgacatctcggacctgtcgctcatctgcctgctgggctacagcatgctgctcatggtcacgtgcaccgtgtatgccatcaagacacgcggcgtgcccgagaccttcaatgaggccaagcccattggcttcaccatgtacaccacttgcatcgtctggctggccttcatccccatcttctttggcacctcgcagtcggccgacaagctgtacatccagacgacgacgctgacggtctcggtgagtctgagcgcctcggtgtccctgggaatgctctacatgcccaaagtctacatcatcctcttccacccggagcagaacgtgcccaagcgcaagcgcagcctcaaagccgtcgttacggcggccaccatgtccaacaagttcacgcagaagggcaacttccggcccaacggagaggccaagtctgagctctgcgagaaccttgaggccccagcgctggccaccaaacagacttacgtcacttacaccaaccatgcaatctagcgagtccatggagctgagcagcaggaggaggagccgtgaccctgtggaaggtgcgtcgggccagggccacacccaagggcccagctgtcttgcctgcccgtgggcacccacggacgtggcttggtgctgaggatagcagagcccccagccatcactgctggcagcctgggcaaaccgggtgagcaacaggaggacgaggggccggggcggtgccaggctaccacaa

SEQ ID NO: 16475 - DNA, 2739 bp, Artificial Sequence
  derived and/or modified sequence
atgcctgggaagaggggcctgggctggtggtgggcccggctgcccctgtgcctgctgctgagcctgtatggcccctggatgcccagcagcctgggcaagcccaagggccacccccacatgaacagcatcagaattgatggagacatcaccctgggcggcctcttccctgtgcacggccggggcagcgagggcaagccctgtggggagctgaagaaggagaagggcatccaccggctggaggccatgctgtttgccctggaccgcatcaacaatgaccctgacctgctgcccaacatcaccctgggcgcccgcatcctggacacctgcagccgggacacccacgccctggagcagagcctgacctttgtgcaggccctgattgagaaggatggaacagaggtgcgctgtggcagcggcggcccccccatcatcaccaagccagagcgggtggtgggcgtcatcggggccagcggcagctctgtgtccatcatggtggccaacatcctgcggctcttcaagatcccccagatctcctatgccagcacagccccagacctgagtgacaacagccgctatgacttcttcagccgggtggtgcccagcgacacctaccaggcccaggccatggtggacatcgtgcgggccctgaagtggaactacgtgtccacagtggccagcgagggcagctatggagagagcggcgtggaggccttcatccagaagagccgggaggatggaggagtgtgcatcgcccagagcgtgaagatcccccgggagcccaaggccggggagtttgacaagatcatccggcggctgctggagaccagcaatgcccgggccgtcatcatctttgccaatgaagatgacatcagaagagtgctggaggccgcccggcgggccaaccagacaggccacttcttctggatgggcagtgacagctggggcagcaagatcgcccctgtgctgcacctggaggaggtggccgagggcgctgtgaccatcctgcccaagaggatgtctgtgcggggctttgaccgctacttcagcagcaggaccctggacaacaacagaagaaacatctggtttgctgagttctgggaggacaacttccactgcaagctgagcagacatgccctgaagaagggcagccacgtgaagaagtgcaccaaccgggagcgcatcggccaggacagcgcctatgagcaggagggcaaggtgcagtttgtgattgatgctgtgtatgccatgggccacgccctgcacgccatgcaccgggacctgtgccccggccgggtgggcctgtgccccaggatggaccctgtggatggcacccagctgctgaagtacatcagaaatgtgaacttcagcggcattgctggcaaccctgtgaccttcaatgaaaatggagatgcccctggccgctatgacatctaccagtaccagctgagaaatgacagcgctgagtacaaggtgattggctcctggacagaccacctgcacctgagaattgaaagaatgcactggccaggcagcggccagcagctgcccaggagcatctgcagcctgccctgccagcccggggagaggaagaagacagtgaagggcatgccctgctgctggcactgtgagccctgcaccggctaccagtaccaggtggaccgctacacctgcaagacctgcccctatgacatgaggcccacagagaacagaacaggctgccggcccatccccatcatcaagctggagtggggcagcccctgggccgtgctgcccctcttcctggccgtggtgggcattgctgccaccctgtttgtggtgatcacctttgtgcgctacaatgacacccccatcgtgaaggccagcggccgggagctgtcctatgtgctgctggccggcatcttcctgtgctacgccaccaccttcctgatgattgctgagccagacctgggcacctgcagcctgcggcgcatcttcctgggcctgggcatgagcatctcctatgctgccctgctgaccaagaccaaccgcatctaccgcatctttgagcagggcaagaggtctgtgtctgccccccgcttcatcagccctgccagccagctggccatcaccttcagcctcatcagcctgcagctgctgggcatctgtgtgtggtttgtggtggaccccagccacagcgtggtggacttccaggaccagaggaccctggaccccaggtttgcccggggcgtgctgaagtgtgacatcagtgacctgagcctcatctgcctgctgggctacagcatgctgctgatggtgacctgcaccgtgtatgccatcaagacccggggcgtgcctgagaccttcaatgaggccaagcccatcggcttcaccatgtacaccacctgcatcgtgtggctggccttcatccccatcttcttcggcaccagccagagcgctgacaagctgtacatccagaccaccaccctgactgtgtctgtgtccctgagcgcctctgtgtccctgggcatgctgtacatgcccaaggtgtacatcatcctcttccaccctgagcagaatgtgcccaagaggaagaggagcctgaaggctgtggtgacagctgccaccatgagcaacaagttcacccagaagggcaacttccggcccaacggggaggccaagtctgagctgtgtgagaacctggaggccccagccctggccaccaagcagacctacgtgacctacaccaaccacgccatctag

SEQ ID NO: 16476 - DNA, 2739 bp, Artificial Sequence
  derived and/or modified sequence
atgcccggcaagcggggcctgggctggtggtgggcccggctgcccctgtgcctgttgctttccctctacggcccttggatgccctcctcattaggtaaaccaaaaggccatcctcatatgaacagtatcagaatcgatggcgacatcactcttggcgggctgttccctgtccatggccggggatccgaaggtaagccttgcggcgagcttaagaaagagaaaggaattcatcggctagaggctatgttattcgccctggaccgaatcaacaacgaccccgacctcctccctaatatcacactgggggcccgaatcctggatacttgctctcgggacacccacgctttggagcagtctctaaccttcgtgcaagcgctgatcgaaaaagacgggaccgaggtacgctgcgggtctggtgggccgccaataattactaaaccagaaagggtggtcggtgtgattggggcctctggaagctcagtttcaatcatggtggcgaacatcctcagactctttaaaatcccccagatttcatacgcgagtactgcaccggacctgtctgataacagccgatacgactttttcagccgtgttgtgccatctgacacttaccaagcccaggccatggttgatattgtgagggccctgaaatggaactatgtttccacggtagcttcagagggttcatacggtgagagtggagtcgaggcctttatacagaagagccgggaggatggcggggtgtgcatcgcccaatccgtgaaaattccgagagagcctaaagctggcgagtttgacaaaattatccggagactgctggagacaagtaatgccagggccgtcatcatttttgcgaatgaagacgatatcaggcgcgtgttagaggccgctaggcgcgctaatcagacagggcacttcttctggatgggctctgattcatgggggtccaaaatcgctcccgtactgcatctggaagaagtggctgagggcgcagtgaccatcctcccgaaacgcatgtccgtacgtggttttgaccggtacttttcgagtcgcacccttgataacaaccgacgcaacatatggttcgccgagttctgggaagacaacttccattgcaagctgtccaggcatgccctcaagaaagggagccatgtgaagaagtgcacaaacagagagaggataggacaggattccgcatatgagcaggagggaaaggttcagttcgtgatcgacgctgtgtatgccatggggcacgcacttcacgcaatgcatcgagatctctgccccggtagggtggggctgtgcccgcggatggacccagttgacggtacccagctgctgaagtatatcaggaacgtgaacttctcagggatcgcaggaaatccagtgactttcaatgaaaatggcgatgcacctggccggtacgacatttaccagtatcagttgagaaatgacagtgccgagtacaaagtaattggctcgtggaccgatcacctacacctccggatagagcggatgcactggcctgggagtggccagcaattgcctcgatcgatctgctcactgccctgccagcctggcgagaggaagaaaacagtgaaagggatgccatgctgctggcactgcgagccatgtactggataccagtaccaggtagacaggtacacttgcaaaacttgtccctacgatatgcggccaactgaaaacagaactggctgcaggcccatcccaattatcaagttagagtggggcagcccctgggctgtcttgcctcttttcctggccgtggtgggcatcgccgcaaccttgtttgttgtcatcactttcgtacgttacaatgacacccccattgtaaaggctagtggacgcgagctttcttatgttctcttagcagggatctttctgtgctacgccacgacattcctcatgatcgcagagcccgacttggggacctgctcactaaggaggatctttttgggcctaggcatgtctatttcatatgctgcactgctgaccaagacaaaccgcatctaccgtatcttcgagcaaggtaaacgcagcgtaagcgcacctcgattcataagtcccgctagtcaattggctattaccttctccctcatctcgctgcagctcctggggatttgtgtttggttcgtggtggacccatcccactcagtggtcgactttcaggaccagcggacactggatccgagattcgcacgaggagtgctcaagtgcgatatttctgacctgtcgttgatttgcctgctaggctactctatgctcctgatggttacctgcactgtatatgcaataaaaacaaggggtgtgccggagacctttaacgaggccaagccaatcggctttacaatgtatacaacttgcatcgtgtggcttgcctttattcctatttttttcggcacctcacagtccgcagataaactctacatccagaccaccacgttgaccgtgtccgtcagcttgtctgccagcgtctcactaggcatgctttacatgcctaaggtgtacattattcttttccatcccgagcagaacgttcctaagcggaagcgaagtctcaaagctgtggtgacagcagccacgatgtcaaacaaattcactcagaaaggtaattttcggccaaatggggaggcaaaatcagagctgtgcgaaaacctagaagccccagcactggcgaccaaacagacttatgtgacctacaccaatcacgccatctag

SEQ ID NO: 16477 - DNA, 2739 bp, Artificial Sequence
  derived and/or modified sequence
atgcccggcaagcggggcctgggctggtggtgggcccggctgcccctgtgtttgctgctgtccctctacgggccgtggatgccgtcctctctcgggaagccaaaggggcacccacatatgaacagcatccgaatcgatggcgatatcacactcggcggcctgtttccggtgcatggccgtgggtccgaaggcaagccgtgcggagaactaaagaaagaaaaaggtattcatcggctggaggcaatgcttttcgctctagacaggattaataatgatcccgaccttttgcctaacataaccctgggcgcgcgcatcctcgacacatgcagtcgggacacccacgccctggagcagtccctgacttttgtgcaggcactgatcgaaaaagacggcaccgaggttagatgtggctcaggaggccctccaataataaccaaacccgagagagttgtaggcgtcatcggcgcttccggctcgagtgtgagcatcatggtggccaatattctgaggctgttcaagattcctcagatcagttacgcttctacagcgcctgatctcagtgacaacagcagatacgacttcttctcccgcgtggttccatctgacacctaccaggcccaagccatggtcgacatcgtccgggcgcttaagtggaattatgtaagcacagtcgcttcagaaggatcttacggtgaatcaggcgttgaggcctttatccaaaagtctcgggaagacggcggggtttgtattgcacaatccgtgaagataccacgggagcctaaggcaggggaattcgacaagataataaggcgcctactggagactagtaatgcaagagccgtgatcatctttgccaacgaggacgatattcgcagggtgcttgaagccgcgagacgagctaatcagacagggcatttcttctggatggggagcgacagctggggaagcaagattgcccccgttctgcacctggaggaagtggccgagggagccgtaaccattctgccgaaacgaatgtccgtccggggctttgataggtatttttcctctagaacattagacaacaaccgccgcaatatctggttcgcggaattctgggaggataacttccattgtaagttatcccggcacgccctgaaaaaggggtcgcacgtgaaaaagtgcacaaatagggaacgaatcgggcaagattctgcctacgaacaggagggaaaggtccagttcgtgatcgacgctgtctatgctatgggccacgccctacatgccatgcacagagacctgtgtccagggcgcgtgggcctgtgtcctagaatggatcctgtcgatgggacacaattattaaagtacatccgaaatgtcaattttagcggaatagccgggaatccggtgactttcaatgagaacggcgatgcacccggaagatatgacatctaccagtatcagctacgcaacgatagcgctgagtataaggtgattgggagctggactgatcacctccacttgagaatagagagaatgcactggccgggttccgggcagcagctgccccgcagcatttgttccctgccttgccaaccaggcgagagaaagaagactgttaagggtatgccttgttgctggcattgcgaaccctgtacaggatatcagtatcaggtcgacagatacacgtgtaagacttgcccttacgacatgaggcctaccgagaatcgcactggctgcagacccatccccattattaaactagagtggggctctccatgggcagtgcttccgctttttctcgccgtggtcggtattgctgccactctgttcgtggtgatcacatttgtgaggtacaacgataccccaatcgtgaaggccagtggcagagagctgagctatgtacttctcgcgggcatcttcctgtgctatgcgaccacattcctcatgattgcggagccagacctaggtacttgtagtcttagaaggatcttcctgggcctcggtatgtcaatcagttacgcggctctacttactaagaccaatcgcatttacagaatcttcgaacaaggtaagaggtctgttagcgctccgaggtttatatctccagcttctcagctggctatcactttttccctcatcagcttacaactccttggcatatgcgtgtggttcgttgttgatccttctcacagcgttgtggactttcaggatcagcgcacactggatcctcgcttcgcccggggcgttctaaagtgcgatatctccgacctgtcccttatctgcctgttagggtatagcatgttgctcatggtcacatgcaccgtgtacgctattaaaacacggggggtccccgaaacctttaacgaagcgaagcctatcggtttcactatgtatactacttgcatagtgtggctcgctttcattcctatattcttcggtacttcgcagtcagccgacaaactttacatccagacaactacgctaaccgtgtccgtctccctgagtgctagtgtgagtttaggaatgctgtacatgccaaaggtttacatcattctgtttcacccagagcagaatgtgcctaagcggaagcgcagccttaaagcggtcgtgactgccgccaccatgagcaataagttcactcagaagggcaattttcggcccaacggagaagccaagtccgagctgtgcgagaatctggaggcacctgccctggccacgaagcagacatatgtcacctacacgaatcatgcgatttag

SEQ ID NO: 16478 - DNA, 2739 bp, Artificial Sequence
  derived and/or modified sequence
atgcccggaaaacgaggcctcgggtggtggtgggcacggcttcccctttgcctcctgctatcactgtacggcccatggatgccttcatcactaggaaaaccaaaagggcatcctcatatgaactctatcagaatcgatggcgacatcactctgggaggcctgtttcccgttcatggccgtggcagcgagggaaaaccttgtggcgagctgaaaaaggagaaaggaatacatcggttggaggccatgctatttgccctggacaggataaataacgacccagacctattacccaacataactttgggagctaggatcctcgacacttgctctagggacacccatgccctggaacaaagcctgacatttgtacaggctctaatagaaaaggacggtactgaggtgaggtgcggtagcggtggccctcccatcatcaccaagcccgaacgggtcgttggggtgattggcgcatcagggagctcagttagcatcatggtcgcgaacattttaaggctattcaaaatccctcagatttcttacgcatcaaccgcccctgatctttccgataatagccggtacgactttttttcgagggtggttccttcagacacgtaccaagctcaggccatggtggacattgtccgcgctctgaagtggaattatgtgtctacagtcgcctcggaaggatcatacggggagtccggagtggaggcatttatccaaaaaagccgggaagatggtggtgtttgtatcgcccagtcggtcaaaattccacgcgaaccaaaggccggagagtttgataagatcattagacgtctgctggaaactagcaacgccagagcagtcattatcttcgcaaacgaagatgacattagaagggtcttggaagctgcgagacgcgcaaaccaaaccggccacttcttctggatgggctcagacagctggggctccaaaatcgcacccgtgctgcacctggaagaggtcgctgagggagccgttaccatactaccgaaaaggatgagtgttcgcggtttcgatcggtatttttccagtcgtaccttagataataacaggaggaacatctggtttgccgaattctgggaggacaactttcactgcaagttgagccggcacgctctaaaaaagggaagccatgtgaagaaatgcactaatcgagagaggataggacaggactcagcgtacgagcaggagggaaaggtgcagtttgtcatcgatgcagtttacgctatgggacacgcgctgcacgctatgcatagagatttgtgccccggacgggtcgggctatgtcccagaatggacccggtggacgggacccagctcctgaagtacatacgcaacgtgaacttctctggcatcgctggaaaccctgtcacattcaatgaaaatggcgatgctcctggtcggtacgatatctatcagtaccagctgagaaatgatagcgccgagtataaagttatcggatcttggaccgatcatctgcacctccgaatcgaaagaatgcactggcccggttccggacagcagctgccccgttctatttgtagtctaccttgccagcccggagagaggaaaaagactgtgaaggggatgccttgttgctggcattgtgagccatgtaccggttaccagtatcaggtggacagatacacgtgtaaaacgtgcccatacgacatgcgtcccaccgagaatagaactggctgccgacccataccgattatcaaactggagtggggcagcccatgggcggttctaccattattcctcgctgtcgtcggtattgcagccaccctgtttgtagtcattacctttgtgagatataatgatacacctattgtgaaagcaagcggccgagaactgagctatgtcctcctggccggaatttttttgtgttatgccacaacctttctcatgatagcagaacctgacctcgggacgtgttcactgcgccgtatctttcttggtttgggcatgtccatcagctacgccgctctcctgactaaaactaatcgcatctatagaatatttgagcagggcaaacgttctgtatctgcccctagattcatctcgcctgcttcccaactagctattaccttttcccttatctcactacagctcctggggatctgcgtgtggtttgtggtcgatccaagccacagcgtggtagatttccaggatcagagaacgttggatcctagatttgcacgtggtgtgctcaagtgcgacatatccgatttgagcctcatttgcctgctcggctatagcatgctgcttatggtgacttgtacggtgtatgccattaaaaccaggggggttccggagacctttaatgaggccaagcctattggtttcacgatgtatacgacttgtattgtgtggctggctttcataccaattttctttgggacgtcgcagtccgccgacaagctctatatccagacaacaaccctaacagtgagtgtgtctctgtctgcttcagtatcccttgggatgctgtacatgcctaaggtgtatatcattttatttcaccccgagcagaacgttccgaagagaaagcggagcctgaaagccgtcgtgaccgcggcaactatgtccaacaaatttactcagaaaggcaattttcgcccaaacggagaagccaagtctgaattgtgcgagaatttagaagcccctgcactggccaccaagcagacctacgtgacctatacgaatcacgccatctag

SEQ ID NO: 16479 - DNA, 2739 bp, Artificial Sequence
  derived and/or modified sequence
atgccaggaaagcgtgggctgggctggtggtgggcacgactgccattgtgtctcctgctgagtctatacggaccctggatgccaagcagcctgggtaagcccaaaggacacccgcacatgaattctatcaggatagatggcgatatcacgctcgggggtttgttccccgtacacggaaggggctccgaaggcaaaccctgtggtgaattgaagaaagaaaagggtattcatcgactagaggctatgctcttcgccctcgacagaataaacaacgatcctgatcttttacctaacatcaccctgggagcccgtattttagacacttgctcaagggacacacacgcacttgagcagtcactgacttttgtccaagctcttattgagaaggacggtactgaagtgcgctgcggctccggcggacccccaatcatcacgaagcctgaacgagttgtgggcgtcattggagccagtggatcatccgtttcaataatggtcgccaatatcttgcgactttttaagatccctcagatctcttatgcctctaccgctcctgacttgagtgataactctcggtacgacttctttagccgagtagtaccaagtgacacatatcaggcccaagccatggtcgacatcgtcagggcattaaaatggaattacgtctcgaccgtggctagtgagggctcatatggggaatccggcgtggaggcctttatccaaaaatcacgcgaagatggtggagtgtgcattgcccagagtgtgaagattcccagggagcccaaggcaggggagtttgataagatcatccgcagattgcttgagacttctaatgccagggctgtgataatttttgcaaacgaggacgacatcaggagagtgctggaagcagccaggcgcgcaaaccagaccggccacttcttctggatgggatcagacagctgggggtcaaagattgcccctgttcttcatttggaggaagtggccgaaggcgctgttaccatactgccaaagcgaatgagcgtaagaggttttgatagatatttttccagtcggacactggataataacagacggaacatctggttcgctgaattttgggaagacaactttcattgcaagctatccagacacgcattgaaaaaaggatcccatgtcaagaagtgtactaaccgagagagaattgggcaggactccgcatacgagcaggagggtaaggtgcagtttgtgatcgatgccgtgtatgccatggggcacgccctccatgccatgcatagagatttatgccccggacgcgtgggattgtgtccaagaatggatcctgttgatggcacgcagttgctgaagtatatccgtaacgtgaatttcagtggtattgctggcaaccctgtgacttttaatgaaaatggggatgccccaggccgttatgatatctaccaataccaactgcgaaacgacagcgccgaatacaaagtgataggctcttggactgaccacctgcaccttcggatcgagcgtatgcactggccaggcagtgggcagcaattacctagatctatctgctcactgccctgccagccgggagaacgcaaaaagactgtgaaggggatgccctgctgctggcactgtgagccatgtacagggtaccagtatcaggttgacaggtatacttgtaagacttgtccttatgatatgaggcccaccgagaacaggaccggatgtcgccctattccaatcatcaagctggaatggggaagtccctgggctgtgttaccccttttcctcgccgtcgtaggtatcgctgccacgctgttcgttgtcataacatttgtgcggtacaacgatactccgatagtgaaagcatccggcagagagctgtcctacgtgctcctggcaggaattttcctgtgctacgccactacctttctcatgatcgcagaaccagacctggggacctgctctctgcggaggatctttctcggcctcgggatgtctataagctatgcagcactgcttactaaaaccaatcggatatatcggatctttgagcagggcaaacgctccgtctccgcccctcggttcatctctccggcaagccaactggccatcaccttttctctgattagcctgcagttgctagggatttgtgtctggtttgtggtagatccaagccattcagttgtggacttccaggaccaacgtaccctggatccacgcttcgcgcgtggggtgttgaagtgtgatattagtgacctttctctgatctgtctcctaggctatagcatgctccttatggtaacctgcaccgtgtatgccattaaaacgcgtggtgtgcccgaaacatttaatgaggccaagcccattggtttcactatgtatactacctgcatagtgtggcttgcctttattcccatttttttcgggacctcacagtctgccgacaagctatacatccagactacgaccctgacagtgtccgtgtcactctctgcgagtgtgtctctgggcatgttatacatgcccaaagtctatatcattctgttccatcctgaacaaaatgtccctaagcgtaagaggtcactcaaagctgttgtgaccgcagccactatgtcaaataagtttacacagaaaggcaactttcgacctaacggcgaagctaaatcagagctgtgcgagaacctcgaggcgcctgcactagctacaaaacagacgtatgttacgtacacaaatcacgcgatttag

SEQ ID NO: 16480 - DNA, 2739 bp, Artificial Sequence
  derived and/or modified sequence
atgcccggcaagagaggcctgggctggtggtgggccagactgcccctgtgcctgctgctgagcctgtacggcccctggatgcccagcagcctgggcaagcccaagggccacccccacatgaacagcatcagaatcgacggcgacatcaccctgggcggcctgttccccgtgcacggcagaggcagcgagggcaagccctgcggcgagctgaagaaggagaagggcatccacagactggaggccatgctgttcgccctggacagaatcaacaacgaccccgacctgctgcccaacatcaccctgggcgccagaatcctggacacctgcagcagagacacccacgccctggagcagagcctgaccttcgtgcaggccctgatcgagaaggacggcaccgaggtgagatgcggcagcggcggcccccccatcatcaccaagcccgagagagtggtgggcgtgatcggcgccagcggcagcagcgtgagcatcatggtggccaacatcctgagactgttcaagatcccccagatcagctacgccagcaccgcccccgacctgagcgacaacagcagatacgacttcttcagcagagtggtgcccagcgacacctaccaggcccaggccatggtggacatcgtgagagccctgaagtggaactacgtgagcaccgtggccagcgagggcagctacggcgagagcggcgtggaggccttcatccagaagagcagagaggacggcggcgtgtgcatcgcccagagcgtgaagatccccagagagcccaaggccggcgagttcgacaagatcatcagaagactgctggagaccagcaacgccagagccgtgatcatcttcgccaacgaggacgacatcagaagagtgctggaggccgccagaagagccaaccagaccggccacttcttctggatgggcagcgacagctggggcagcaagatcgcccccgtgctgcacctggaggaggtggccgagggcgccgtgaccatcctgcccaagagaatgagcgtgagaggcttcgacagatacttcagcagcagaaccctggacaacaacagaagaaacatctggttcgccgagttctgggaggacaacttccactgcaagctgagcagacacgccctgaagaagggcagccacgtgaagaagtgcaccaacagagagagaatcggccaggacagcgcctacgagcaggagggcaaggtgcagttcgtgatcgacgccgtgtacgccatgggccacgccctgcacgccatgcacagagacctgtgccccggcagagtgggcctgtgccccagaatggaccccgtggacggcacccagctgctgaagtacatcagaaacgtgaacttcagcggcatcgccggcaaccccgtgaccttcaacgagaacggcgacgcccccggcagatacgacatctaccagtaccagctgagaaacgacagcgccgagtacaaggtgatcggcagctggaccgaccacctgcacctgagaatcgagagaatgcactggcccggcagcggccagcagctgcccagaagcatctgcagcctgccctgccagcccggcgagagaaagaagaccgtgaagggcatgccctgctgctggcactgcgagccctgcaccggctaccagtaccaggtggacagatacacctgcaagacctgcccctacgacatgagacccaccgagaacagaaccggctgcagacccatccccatcatcaagctggagtggggcagcccctgggccgtgctgcccctgttcctggccgtggtgggcatcgccgccaccctgttcgtggtgatcaccttcgtgagatacaacgacacccccatcgtgaaggccagcggcagagagctgagctacgtgctgctggccggcatcttcctgtgctacgccaccaccttcctgatgatcgccgagcccgacctgggcacctgcagcctgagaagaatcttcctgggcctgggcatgagcatcagctacgccgccctgctgaccaagaccaacagaatctacagaatcttcgagcagggcaagagaagcgtgagcgcccccagattcatcagccccgccagccagctggccatcaccttcagcctgatcagcctgcagctgctgggcatctgcgtgtggttcgtggtggaccccagccacagcgtggtggacttccaggaccagagaaccctggaccccagattcgccagaggcgtgctgaagtgcgacatcagcgacctgagcctgatctgcctgctgggctacagcatgctgctgatggtgacctgcaccgtgtacgccatcaagaccagaggcgtgcccgagaccttcaacgaggccaagcccatcggcttcaccatgtacaccacctgcatcgtgtggctggccttcatccccatcttcttcggcaccagccagagcgccgacaagctgtacatccagaccaccaccctgaccgtgagcgtgagcctgagcgccagcgtgagcctgggcatgctgtacatgcccaaggtgtacatcatcctgttccaccccgagcagaacgtgcccaagagaaagagaagcctgaaggccgtggtgaccgccgccaccatgagcaacaagttcacccagaagggcaacttcagacccaacggcgaggccaagagcgagctgtgcgagaacctggaggcccccgccctggccaccaagcagacctacgtgacctacaccaaccacgccatctag

SEQ ID NO: 16481 - protein, 1180 aa, Artificial Sequence
  derived and/or modified sequence
MVLLLILSVLLLKEDVRGSAQSSERRVVAHMPGDIIIGALFSVHHQPTVDKVHERKCGAVREQYGIQRVEAMLHTLERINSDPTLLPNITLGCEIRDSCWHSAVALEQSIEFIRDSLISSEEEEGLVRCVDGSSSSFRSKKPIVGVIGPGSSSVAIQVQNLLQLFNIPQIAYSATSMDLSDKTLFKYFMRVVPSDAQQARAMVDIVKRYNWTYVSAVHTEGNYGESGMEAFKDMSAKEGICIAHSYKIYSNAGEQSFDKLLKKLTSHLPKARVVACFCEGMTVRGLLMAMRRLGLAGEFLLLGSDGWADRYDVTDGYQREAVGGITIKLQSPDVKWFDDYYLKLRPETNHRNPWFQEFWQHRFQCRLEGFPQENSKYNKTCNSSLTLKTHHVQDSKMGFVINAIYSMAYGLHNMQMSLCPGYAGLCDAMKPIDGRKLLESLMKTNFTGVSGDTILFDENGDSPGRYEIMNFKEMGKDYFDYINVGSWDNGELKMDDDEVWSKKSNIIRSVCSEPCEKGQIKVIRKGEVSCCWTCTPCKENEYVFDEYTCKACQLGSWPTDDLTGCDLIPVQYLRWGDPEPIAAVVFACLGLLATLFVTVVFIIYRDTPVVKSSSRELCYIILAGICLGYLCTFCLIAKPKQIYCYLQRIGIGLSPAMSYSALVTKTNRIARILAGSKKKICTKKPRFMSACAQLVIAFILICIQLGIIVALFIMEPPDIMHDYPSIREVYLICNTTNLGVVTPLGYNGLLILSCTFYAFKTRNVPANFNEAKYIAFTMYTTCIIWLAFVPIYFGSNYKIITMCFSVSLSATVALGCMFVPKVYIILAKPERNVRSAFTTSTVVRMHVGDGKSSSAASRSSSLVNLWKRRGSSGETLSSNGKSVTWAQNEKSSRGQHLWQRLSIHINKKENPNQTAVIKPFPKSTESRGLGAGAGAGGSAGGVGATGGAGCAGAGPGGPESPDAGPKALYDVAEAEEHFPAPARPRSPSPISTLSHRAGSASRTDDDVPSLHSEPVARSSSSQGSLMEQISSVVTRFTANISELNSMMLSTAAPSPGVGAPLCSSYLIPKEIQLPTTMTTFAEIQPLPAIEVTGGAQPAAGAQAAGDAARESPAAGPEAAAAKPDLEELVALTPPSPFRDSVDSGSTTPNSPVSESALCIPSSPKYDTLIIRDYTQSSSSL

SEQ ID NO: 16482 - DNA, 3543 bp, Artificial Sequence
  derived and/or modified sequence
atggtgctgctgctgatcctgagcgtgctgctgctgaaggaggacgtgagaggcagcgcccagagcagcgagagaagagtggtggcccacatgcccggcgacatcatcatcggcgccctgttcagcgtgcaccaccagcccaccgtggacaaggtgcacgagagaaagtgcggcgccgtgagagagcagtacggcatccagagagtggaggccatgctgcacaccctggagagaatcaacagcgaccccaccctgctgcccaacatcaccctgggctgcgagatcagagacagctgctggcacagcgccgtggccctggagcagagcatcgagttcatcagagacagcctgatcagcagcgaggaggaggagggcctggtgagatgcgtggacggcagcagcagcagcttcagaagcaagaagcccatcgtgggcgtgatcggccccggcagcagcagcgtggccatccaggtgcagaacctgctgcagctgttcaacatcccccagatcgcctacagcgccaccagcatggacctgagcgacaagaccctgttcaagtacttcatgagagtggtgcccagcgacgcccagcaggccagagccatggtggacatcgtgaagagatacaactggacctacgtgagcgccgtgcacaccgagggcaactacggcgagagcggcatggaggccttcaaggacatgagcgccaaggagggcatctgcatcgcccacagctacaagatctacagcaacgccggcgagcagagcttcgacaagctgctgaagaagctgaccagccacctgcccaaggccagagtggtggcctgcttctgcgagggcatgaccgtgagaggcctgctgatggccatgagaagactgggcctggccggcgagttcctgctgctgggcagcgacggctgggccgacagatacgacgtgaccgacggctaccagagagaggccgtgggcggcatcaccatcaagctgcagagccccgacgtgaagtggttcgacgactactacctgaagctgagacccgagaccaaccacagaaacccctggttccaggagttctggcagcacagattccagtgcagactggagggcttcccccaggagaacagcaagtacaacaagacctgcaacagcagcctgaccctgaagacccaccacgtgcaggacagcaagatgggcttcgtgatcaacgccatctacagcatggcctacggcctgcacaacatgcagatgagcctgtgccccggctacgccggcctgtgcgacgccatgaagcccatcgacggcagaaagctgctggagagcctgatgaagaccaacttcaccggcgtgagcggcgacaccatcctgttcgacgagaacggcgacagccccggcagatacgagatcatgaacttcaaggagatgggcaaggactacttcgactacatcaacgtgggcagctgggacaacggcgagctgaagatggacgacgacgaggtgtggagcaagaagagcaacatcatcagaagcgtgtgcagcgagccctgcgagaagggccagatcaaggtgatcagaaagggcgaggtgagctgctgctggacctgcaccccctgcaaggagaacgagtacgtgttcgacgagtacacctgcaaggcctgccagctgggcagctggcccaccgacgacctgaccggctgcgacctgatccccgtgcagtacctgagatggggcgaccccgagcccatcgccgccgtggtgttcgcctgcctgggcctgctggccaccctgttcgtgaccgtggtgttcatcatctacagagacacccccgtggtgaagagcagcagcagagagctgtgctacatcatcctggccggcatctgcctgggctacctgtgcaccttctgcctgatcgccaagcccaagcagatctactgctacctgcagagaatcggcatcggcctgagccccgccatgagctacagcgccctggtgaccaagaccaacagaatcgccagaatcctggccggcagcaagaagaagatctgcaccaagaagcccagattcatgagcgcctgcgcccagctggtgatcgccttcatcctgatctgcatccagctgggcatcatcgtggccctgttcatcatggagccccccgacatcatgcacgactaccccagcatcagagaggtgtacctgatctgcaacaccaccaacctgggcgtggtgacccccctgggctacaacggcctgctgatcctgagctgcaccttctacgccttcaagaccagaaacgtgcccgccaacttcaacgaggccaagtacatcgccttcaccatgtacaccacctgcatcatctggctggccttcgtgcccatctacttcggcagcaactacaagatcatcaccatgtgcttcagcgtgagcctgagcgccaccgtggccctgggctgcatgttcgtgcccaaggtgtacatcatcctggccaagcccgagagaaacgtgagaagcgccttcaccaccagcaccgtggtgagaatgcacgtgggcgacggcaagagcagcagcgccgccagcagaagcagcagcctggtgaacctgtggaagagaagaggcagcagcggcgagaccctgagcagcaacggcaagagcgtgacctgggcccagaacgagaagagcagcagaggccagcacctgtggcagagactgagcatccacatcaacaagaaggagaaccccaaccagaccgccgtgatcaagcccttccccaagagcaccgagagcagaggcctgggcgccggcgccggcgccggcggcagcgccggcggcgtgggcgccaccggcggcgccggctgcgccggcgccggccccggcggccccgagagccccgacgccggccccaaggccctgtacgacgtggccgaggccgaggagcacttccccgcccccgccagacccagaagccccagccccatcagcaccctgagccacagagccggcagcgccagcagaaccgacgacgacgtgcccagcctgcacagcgagcccgtggccagaagcagcagcagccagggcagcctgatggagcagatcagcagcgtggtgaccagattcaccgccaacatcagcgagctgaacagcatgatgctgagcaccgccgcccccagccccggcgtgggcgcccccctgtgcagcagctacctgatccccaaggagatccagctgcccaccaccatgaccaccttcgccgagatccagcccctgcccgccatcgaggtgaccggcggcgcccagcccgccgccggcgcccaggccgccggcgacgccgccagagagagccccgccgccggccccgaggccgccgccgccaagcccgacctggaggagctggtggccctgaccccccccagccccttcagagacagcgtggacagcggcagcaccacccccaacagccccgtgagcgagagcgccctgtgcatccccagcagccccaagtacgacaccctgatcatcagagactacacccagagcagcagcagcctgtag

SEQ ID NO: 16483 - DNA, 4475 bp, Artificial Sequence
  derived and/or modified sequence
acaaaatggtcctttagaaaatacatctgaattgctggctaatttcttgatttgcgactcaacgtaggacatcgcttgttcgtagctatcagaaccctcctgaattttccccaccatgctatctttattggcttgaactcctttcctaaaatggtccttctgttgatcctgtcagtcttacttttgaaagaagatgtccgtgggagtgcacagtccagtgagaggagggtggtggctcacatgccgggtgacatcattattggagctctcttttctgttcatcaccagcctactgtggacaaagttcatgagaggaagtgtggggcggtccgtgaacagtatggcattcagagagtggaggccatgctgcataccctggaaaggatcaattcagaccccacactcttgcccaacatcacactgggctgtgagataagggactcctgctggcattcggctgtggccctagagcagagcattgagttcataagagattccctcatttcttcagaagaggaagaaggcttggtacgctgtgtggatggctcctcctcttccttccgctccaagaagcccatagtaggggtcattgggcctggctccagttctgtagccattcaggtccagaatttgctccagcttttcaacatacctcagattgcttactcagcaaccagcatggatctgagtgacaagactctgttcaaatatttcatgagggttgtgccttcagatgctcagcaggcaagggccatggtggacatagtgaagaggtacaactggacctatgtatcagccgtgcacacagaaggcaactatggagaaagtgggatggaagccttcaaagatatgtcagcgaaggaagggatttgcatcgcccactcttacaaaatctacagtaatgcaggggagcagagctttgataagctgctgaagaagctcacaagtcacttgcccaaggcccgggtggtggcctgcttctgtgagggcatgacggtgagaggtctgctgatggccatgaggcgcctgggtctagcgggagaatttctgcttctgggcagtgatggctgggctgacaggtatgatgtgacagatggatatcagcgagaagctgttggtggcatcacaatcaagctccaatctcccgatgtcaagtggtttgatgattattatctgaagctccggccagaaacaaaccaccgaaacccttggtttcaagaattttggcagcatcgttttcagtgccgactggaagggtttccacaggagaacagcaaatacaacaagacttgcaatagttctctgactctgaaaacacatcatgttcaggattccaaaatgggatttgtgatcaacgccatctattcgatggcctatgggctccacaacatgcagatgtccctctgcccaggctatgcaggactctgtgatgccatgaagccaattgatggacggaaacttttggagtccctgatgaaaaccaattttactggggtttctggagatacgatcctattcgatgagaatggagactctccaggaaggtatgaaataatgaatttcaaggaaatgggaaaagattactttgattatatcaacgttggaagttgggacaatggagaattaaaaatggatgatgatgaagtatggtccaagaaaagcaacatcatcagatctgtgtgcagtgaaccatgtgagaaaggccagatcaaggtgatccgaaagggagaagtcagctgttgttggacctgtacaccttgtaaggagaatgagtatgtctttgatgagtacacatgcaaggcatgccaactggggtcttggcccactgatgatctcacaggttgtgacttgatcccagtacagtatcttcgatggggtgaccctgaacccattgcagctgtggtgtttgcctgccttggcctcctggccaccctgtttgttactgtagtcttcatcatttaccgtgatacaccagtagtcaagtcctcaagcagggaactctgctacattatccttgctggcatctgcctgggctacttatgtaccttctgcctcattgcgaagcccaaacagatttactgctaccttcagagaattggcattggtctctccccagccatgagctactcagcccttgtaacaaagaccaaccgtattgcaaggatcctggctggcagcaagaagaagatctgtaccaaaaagcccagattcatgagtgcctgtgcccagctagtgattgctttcattctcatatgcatccagttgggcatcatcgttgccctctttataatggagcctcctgacataatgcatgactacccaagcattcgagaagtctacctgatctgtaacaccaccaacctaggagttgtcactccacttggatacaatggattgttgattttgagctgcaccttctatgcgttcaagaccagaaatgttccagctaacttcaacgaggccaagtatatcgccttcacaatgtacacgacctgcattatatggctagcttttgtgccaatctactttggcagcaactacaaaatcatcaccatgtgtttctcggtcagcctcagtgccacagtggccctaggctgcatgtttgtgccgaaggtgtacatcatcctggccaaaccagagagaaacgtgcgcagcgccttcaccacatctaccgtggtgcgcatgcatgtaggggatggcaagtcatcctccgcagccagcagatccagcagcctagtcaacctgtggaagagaaggggctcctctggggaaaccttaagttccaatggaaaatccgtcacgtgggcccagaatgagaagagcagccgggggcagcacctgtggcagcgcctgtccatccacatcaacaagaaagaaaaccccaaccaaacggccgtcatcaagcccttccccaagagcacggagagccgtggcctgggcgctggcgctggcgcaggcgggagcgctgggggcgtgggggccacgggcggtgcgggctgcgcaggcgccggcccaggcgggcccgagtccccagacgccggccccaaggcgctgtatgatgtggccgaggctgaggagcacttcccggcgcccgcgcggccgcgctcaccgtcgcccatcagcacgctgagccaccgcgcgggctcggccagccgcacggacgacgatgtgccgtcgctgcactcggagcctgtggcgcgcagcagctcctcgcagggctccctcatggagcagatcagcagtgtggtcacccgcttcacggccaacatcagcgagctcaactccatgatgctgtccaccgcggcccccagccccggcgtcggcgccccgctctgctcgtcctacctgatccccaaagagatccagttgcccacgaccatgacgacctttgccgaaatccagcctctgccggccatcgaagtcacgggaggcgcgcagcccgcggcaggggcgcaggcggctggggacgcggcccgggagagccccgcggccggtcccgaggctgcggccgccaagccagacctggaggagctggtggctctcaccccgccgtcccccttcagagactcggtggactcggggagcacaacccccaactcgccagtgtccgagtcggccctctgtatcccgtcgtctcccaaatatgacactcttatcataagagattacactcagagctcctcgtcgttgtgaatgtccctggaaagcacgccggcctgcgcgtgcggagcggagccccccgtgttcacacacacacaatggcaagcatagtcgcctggttacggcccagggggaagatgccaagggcaccccttaatggaaacacgagatcagtagtgctatctcatgacaaccgacgaagaaaccgacgacaaatcttttggcagattttcttctagtggccttagaaaacatgggcttttaagaaacacggctgatatctttgagggctgacaaggcgtctcttcaaacagttccataccaagtgctttgctctagggaagcagtgcgtgtgaaacagcgtaacggagggtgaagagcatagttaataagcaactgtaaaaagttttatttgtttactttaattcttttcccagaagagtctttgattcaccaaacatgaatgtacattttctaacaaactcaaaatctgggaccaaaacatcaacttttttctttcttttttctttctttttgttttttctttcctgtaaagaccttgaaaagcagtaacttgggtccagtatttacggaggcgttgtgaatgtgtcccatgcataacacactactggatagtgagtgctgcgctaatgtactacgtagggcttctaccagagattttcctctccaattgggttgtgaaatactcttccaaaagcctgcatcggggattccacctacttatttcagattcacctccattaaccaagaaaaccagtggaagatttcttgactatttcaccatgttgccaatc

SEQ ID NO: 16484 - DNA, 7927 bp, Artificial Sequence
  derived and/or modified sequence
agctcggctgttctgcgcacgctgagcggagggaatgagcttgagatcatcttgggggggaagccggggactggagaggccggctctgccctgctgatccccgtggcccaacttttcggggggctagctagaccgagtctcactgctcgcagcgcagccaacaggggggtttagaagatcatgaccacatggatcatctaactaaatggtacatggggacaaaatggtcctttagaaaatacatctgaattgctggctaatttcttgatttgcgactcaacgtaggacatcgcttgttcgtagctatcagaaccctcctgaattttccccaccatgctatctttattggcttgaactcctttcctaaaatggtccttctgttgatcctgtcagtcttacttttgaaagaagatgtccgtgggagtgcacagtccagtgagaggagggtggtggctcacatgccgggtgacatcattattggagctctcttttctgttcatcaccagcctactgtggacaaagttcatgagaggaagtgtggggcggtccgtgaacagtatggcattcagagagtggaggccatgctgcataccctggaaaggatcaattcagaccccacactcttgcccaacatcacactgggctgtgagataagggactcctgctggcattcggctgtggccctagagcagagcattgagttcataagagattccctcatttcttcagaagaggaagaaggcttggtacgctgtgtggatggctcctcctcttccttccgctccaagaagcccatagtaggggtcattgggcctggctccagttctgtagccattcaggtccagaatttgctccagcttttcaacatacctcagattgcttactcagcaaccagcatggatctgagtgacaagactctgttcaaatatttcatgagggttgtgccttcagatgctcagcaggcaagggccatggtggacatagtgaagaggtacaactggacctatgtatcagccgtgcacacagaaggcaactatggagaaagtgggatggaagccttcaaagatatgtcagcgaaggaagggatttgcatcgcccactcttacaaaatctacagtaatgcaggggagcagagctttgataagctgctgaagaagctcacaagtcacttgcccaaggcccgggtggtggcctgcttctgtgagggcatgacggtgagaggtctgctgatggccatgaggcgcctgggtctagcgggagaatttctgcttctgggcagtgatggctgggctgacaggtatgatgtgacagatggatatcagcgagaagctgttggtggcatcacaatcaagctccaatctcccgatgtcaagtggtttgatgattattatctgaagctccggccagaaacaaaccaccgaaacccttggtttcaagaattttggcagcatcgttttcagtgccgactggaagggtttccacaggagaacagcaaatacaacaagacttgcaatagttctctgactctgaaaacacatcatgttcaggattccaaaatgggatttgtgatcaacgccatctattcgatggcctatgggctccacaacatgcagatgtccctctgcccaggctatgcaggactctgtgatgccatgaagccaattgatggacggaaacttttggagtccctgatgaaaaccaattttactggggtttctggagatacgatcctattcgatgagaatggagactctccaggaaggtatgaaataatgaatttcaaggaaatgggaaaagattactttgattatatcaacgttggaagttgggacaatggagaattaaaaatggatgatgatgaagtatggtccaagaaaagcaacatcatcagatctgtgtgcagtgaaccatgtgagaaaggccagatcaaggtgatccgaaagggagaagtcagctgttgttggacctgtacaccttgtaaggagaatgagtatgtctttgatgagtacacatgcaaggcatgccaactggggtcttggcccactgatgatctcacaggttgtgacttgatcccagtacagtatcttcgatggggtgaccctgaacccattgcagctgtggtgtttgcctgccttggcctcctggccaccctgtttgttactgtagtcttcatcatttaccgtgatacaccagtagtcaagtcctcaagcagggaactctgctacattatccttgctggcatctgcctgggctacttatgtaccttctgcctcattgcgaagcccaaacagatttactgctaccttcagagaattggcattggtctctccccagccatgagctactcagcccttgtaacaaagaccaaccgtattgcaaggatcctggctggcagcaagaagaagatctgtaccaaaaagcccagattcatgagtgcctgtgcccagctagtgattgctttcattctcatatgcatccagttgggcatcatcgttgccctctttataatggagcctcctgacataatgcatgactacccaagcattcgagaagtctacctgatctgtaacaccaccaacctaggagttgtcactccacttggatacaatggattgttgattttgagctgcaccttctatgcgttcaagaccagaaatgttccagctaacttcaacgaggccaagtatatcgccttcacaatgtacacgacctgcattatatggctagcttttgtgccaatctactttggcagcaactacaaaatcatcaccatgtgtttctcggtcagcctcagtgccacagtggccctaggctgcatgtttgtgccgaaggtgtacatcatcctggccaaaccagagagaaacgtgcgcagcgccttcaccacatctaccgtggtgcgcatgcatgtaggggatggcaagtcatcctccgcagccagcagatccagcagcctagtcaacctgtggaagagaaggggctcctctggggaaaccttaagttccaatggaaaatccgtcacgtgggcccagaatgagaagagcagccgggggcagcacctgtggcagcgcctgtccatccacatcaacaagaaagaaaaccccaaccaaacggccgtcatcaagcccttccccaagagcacggagagccgtggcctgggcgctggcgctggcgcaggcgggagcgctgggggcgtgggggccacgggcggtgcgggctgcgcaggcgccggcccaggcgggcccgagtccccagacgccggccccaaggcgctgtatgatgtggccgaggctgaggagcacttcccggcgcccgcgcggccgcgctcaccgtcgcccatcagcacgctgagccaccgcgcgggctcggccagccgcacggacgacgatgtgccgtcgctgcactcggagcctgtggcgcgcagcagctcctcgcagggctccctcatggagcagatcagcagtgtggtcacccgcttcacggccaacatcagcgagctcaactccatgatgctgtccaccgcggcccccagccccggcgtcggcgccccgctctgctcgtcctacctgatccccaaagagatccagttgcccacgaccatgacgacctttgccgaaatccagcctctgccggccatcgaagtcacgggaggcgcgcagcccgcggcaggggcgcaggcggctggggacgcggcccgggagagccccgcggccggtcccgaggctgcggccgccaagccagacctggaggagctggtggctctcaccccgccgtcccccttcagagactcggtggactcggggagcacaacccccaactcgccagtgtccgagtcggccctctgtatcccgtcgtctcccaaatatgacactcttatcataagagattacactcagagctcctcgtcgttgtgaatgtccctggaaagcacgccggcctgcgcgtgcggagcggagccccccgtgttcacacacacacaatggcaagcatagtcgcctggttacggcccagggggaagatgccaagggcaccccttaatggaaacacgagatcagtagtgctatctcatgacaaccgacgaagaaaccgacgacaaatcttttggcagattttcttctagtggccttagaaaacatgggcttttaagaaacacggctgatatctttgagggctgacaaggcgtctcttcaaacagttccataccaagtgctttgctctagggaagcagtgcgtgtgaaacagcgtaacggagggtgaagagcatagttaataagcaactgtaaaaagttttatttgtttactttaattcttttcccagaagagtctttgattcaccaaacatgaatgtacattttctaacaaactcaaaatctgggaccaaaacatcaacttttttctttcttttttctttctttttgttttttctttcctgtaaagaccttgaaaagcagtaacttgggtccagtatttacggaggcgttgtgaatgtgtcccatgcataacacactactggatagtgagtgctgcgctaatgtactacgtagggcttctaccagagattttcctctccaattgggttgtgaaatactcttccaaaagcctgcatcggggattccacctacttatttcagattcacctccattaaccaagaaaaccagtggaagatttcttgactatttcaccatgttgccaatcaatactggagtagcaaaaaaaatattttctggaatactgttttgtaattccctcactggggtgcattgtagctggaaattctctttataaaaatcattcttgagctccagcctggctatctctttcaagaaacatggccactctttaggaatgctgttgcgtttgcattgccaactaaaatattaaaatatgcattggggcttcttcattcctttattttgagaacctgatgcacaaagagctcctttgttcttttcgagtcccaccactggaagagtggtccatagaccccatgaagacattgtcatgatttgagagactgttgttgaaaggattaacacaatcttaatacactgaaaattttaactgtgtcaagtcagcttagtggagatttagctatgccagtgagcagtgattttaactattcttggctgcttaaacagggcagctatgaactatgacaaatgtagatttttcaaagcaatacaaaatactaaaaaagaggaaccttaatgaatattaaccacacagtctttcttagccattccaaaaagaggcaaagcaattcttattttcttttttaaaataatgattaatatgattttgtgcacttcatactgtcactttttaaaactacagaaaagagatttagagtataacagaaacaagtgtgctttgatagtctcaaataggtagaattcatagttcaagacctgaatccactgtcatctctttcttcctcccattgcagctatcctcaggtaccaaatgttttgatttttaaataaggatagtaataaatggaggaggtgtcctataaatttaaagttcagttgacccagccttatacttaagatagccttatgaaaaatatgtgctgtgaggcagaagtatattttggcagagagaataataaataaaactttttcttttagctcaatatccttactttggtaagtatttttttttatttcacatctacttaacagaaaataaactgagaaatagaagtcagtccattggcataatttatcattcttcactttaaaaaattctaataaatattctgcttgagttttcttttctgctatttgttcttacttgcaactttaagtcaaacctcccaatacaaaacattaaaagctaacattaatgtactaaagtattaatttaaaagaaatcgaacctcccatgctagatttgaaaataacatcatcacagcaccctgatcccaaatattacaccgaggcttttaaaatgtaagtgaaatctagctaagtttcatggtttcattaaaagcaaatgtctgcctctatctgaaaaacaaatggaaatcttttgaggtgttaataccctttggatcctcatcaaaaggatggcattcacctgaggattcctatcttgacttcttaggtattaaaaacctttcttgatatgctctacattttaaaatttgttttataaaatccttatgttgattttcattttattctcaagtacaatacgtttcactctagaccagttgaagaacatgtttaaactttgttcatggtcaaattcattttctatttttttagtaacatatctcttaaaaagcacactaccttataaaaaacttcatcagaaattaaatttaatgcaagtaaattgccatctgatacttccacatgctatcataatcaactgtaataataaaaatgatttatccaattagaaaaggacaagatatatttttctctgtatttctataacttttgccactccattgaatacattgtatgttggacataagattattagtaatgcattcttgagatcttttattttggaatgatgctaactctgtctctttgccaattctaataccaggttccaagtaataactctacagtacaaagagaactgaatattcattctagggctataggatatgaacttcacaattcatttgggtacattctcattgaatttccttcaaaacaatctgttcctggtgcccagtgataattcagtcgggaccagcatgactaaaaggaaggggatatgctaaggctcagcaaagtgaccctaaatgagagatatgtcccaggatggaaagaagaagacgtggtttaaccaagttatactgactaatctaagcagtccactcatccttccattttgggaaaggagtgggggcagcctaagaagaacatatctggattgggaagaaccgtctttctgggctagggatggggaacagaaagggagtatggaaagaaaaattataagagatttgactgaagcaaggaaaaaaagcaaatccccaaacgtgctaatccttgaaagtaactatctttcccaaactactgctgttaccagcaagtgatcaggaagactaggagctatttctgactgtaaatgaattgtataatagctctgctgcagttctgtgacttccaagccaggaattaaatgctctttttaagaataacaaaaaacaaaagcatttcctatgctagtctcccagtaaaatgtacatgttttggagacttcaaaggtattatgtgagttcacatttagcaacagcttattaataaccctcaagctgtcagaatctctatagttaccatttacaattttatactgtgaaaaaatacagatcagtgaaagcataaagacaagtcagaattcactttgaagagggtctgaggcctgggagagtctctactgtctattgaagaatgaggcatgtataaaatagttggttgaatttcactgatcttcccaatgtgaacaaatatactatgtatattgtgtgtatttctagaaatcaatggcagctgctgatggtgttgtaattagaaatctatatagattatagatgttttagaaagatggtgccaatcctaaaagatttgtgtgggctaaaagtgcttgtacttacttttttctgcacttataactgatttggttttaaaattgtgtgcgtgtatctgttctttctctgttgtggcagcttgtactattaaaataatagagaatgttaaattattttgatgtgaactgcaaatgattttttttcataaagtttaacatttttatcagcattgttttgctttgtacttgtataaatatgttttattttagcacttcaaaatatacttgcctgtttctcagttgtctaaatcatgttgtacttggtgtttgtgaagccagttacttttcaaaaaaattaaaaaacctataatatga

SEQ ID NO: 16485 - DNA, 3543 bp, Artificial Sequence
  derived and/or modified sequence
atggtgttactgctcattttatcagtcctcttactgaaggaagacgtgcgcggaagtgctcagtcttcagaaagaagagtggtcgctcacatgcccggggatatcattatcggtgccctgttctccgtacaccaccagccaaccgtcgataaagtgcacgaacgaaagtgcggagcagtgcgagagcaatacgggatccagagggttgaggctatgctacacaccttggagcgtatcaatagcgatcctactctcctgcctaacatcactctcgggtgtgagatccgcgactcttgctggcactcggctgtggctcttgagcagagcattgaattcattagggacagtctgattagttcagaggaggaggagggcctagtgcggtgtgtggacggtagctctagcagtttccgctcgaaaaagcccatagtaggagtcataggacctggttccagtagtgtggctatccaagtgcaaaatctgttacagctgtttaacatcccccagatcgcttatagcgcaacctcaatggacctgtcagacaagacgctgttcaaatacttcatgcgagtggtgccatcagatgctcagcaagcaagggcaatggtcgacattgtgaagcggtacaattggacttacgtatcagcagtccatacagaggggaactacggagagagcgggatggaagcgtttaaggatatgtctgcaaaggagggcatctgtatcgcacacagctacaagatttattccaacgcaggcgaacaatcattcgacaaactcctcaagaagttgacctcccacctaccgaaggcccgggtggtcgcttgcttttgcgaagggatgaccgtgcgcgggttgctcatggccatgagacgattggggctcgcaggtgaattccttcttctaggcagtgatgggtgggccgaccggtacgacgtcaccgatggttatcaaagggaggccgtgggaggtatcacaataaaactacagagtcccgacgtgaaatggttcgacgattattacctaaagctccggccggagaccaatcataggaatccatggtttcaggagttttggcaacatagatttcagtgcagattagaaggcttcccacaggagaatagtaagtacaataagacatgtaactcatcactaactctcaagacgcaccatgtacaggacagcaagatgggttttgtgataaatgcaatctattcaatggcttacggattgcacaatatgcagatgtctctgtgtcccggctacgcaggcctgtgcgatgccatgaaaccgattgacggccgtaagctgctcgagagccttatgaagaccaacttcactggtgtctcaggagataccattctttttgacgagaatggcgactcacccggccggtacgagattatgaactttaaagagatgggaaaggattattttgattatattaacgtcggcagctgggacaatggcgaactgaagatggacgacgatgaagtgtggagcaagaagagcaatattattcggagcgtgtgcagcgagccgtgcgagaaaggtcagataaaggtcatccggaagggggaggtctcttgttgttggacgtgcacaccttgcaaggaaaatgagtatgtcttcgacgaatatacatgcaaggcatgtcagttgggatcttggccaaccgacgatctgaccggctgtgacctgatccccgtccaatatctgcgctggggtgatcctgagcccattgcggctgtggtatttgcctgtctcggcctgcttgcaaccctgttcgtaacagtcgtgtttatcatatacagggacacacccgttgtcaaatccagctctagagagctctgttatatcatcctggccggtatatgtctgggatacttgtgcaccttttgcctcattgccaagccgaagcagatctactgttatctccaacgcatcggcatcgggctgagtccagccatgtcctacagtgccttggtgacaaagaccaatcggattgcacggatcctggcaggaagcaagaagaagatctgcacaaaaaaaccccggttcatgtccgcctgtgctcagctggtgatagccttcattctaatctgtatacagctgggcattatcgtggctctgttcattatggagcctccagacattatgcatgactacccctcaatcagggaggtatatttaatttgtaacactacaaatcttggggtggttacacccttaggctacaacggcctgctcatcttgtcatgcacattctacgcatttaagacccggaacgtccctgcaaacttcaacgaagctaagtatatcgccttcaccatgtataccacatgcataatttggctggcttttgtgcctatctacttcggctccaattataagataattaccatgtgtttctccgtcagtttgtccgcaacagtcgccctcggctgtatgttcgttcccaaagtgtacatcatcctcgctaaaccagaacgaaatgtgaggagtgcctttactacgtctaccgtggtacggatgcacgtcggggatgggaaatccagctccgccgcaagtcggtcttcaagcctagtcaacctctggaagaggcgagggtcttcaggcgaaaccttgtcatcaaatgggaaatccgtcacctgggctcagaacgagaaatctagcagaggccagcacttatggcagcgtctgtccatacacattaacaagaaggagaaccccaaccagacagctgtgatcaagcccttccctaagagtacagaaagtcgcggtctcggtgctggagcaggcgctggcggcagtgctggaggagtcggggcaacgggcggtgccggctgtgcaggcgcaggcccaggcggccctgagtcacctgacgccggacctaaggccctctatgatgtggcagaggccgaagaacacttcccagccccagcgcgaccacggtctcccagcccaatctctactttgagccacagggctggatccgcaagtaggactgacgatgacgtaccctcattacattctgagcccgtcgcccggtcttcgagcagccaagggtctcttatggagcagatcagtagtgtagtgacaagattcaccgcaaatatttctgagcttaactcgatgatgctctccacagccgctccaagtcccggcgttggcgctcccttgtgttcttcatacctgatcccgaaggagatccagttgcccaccaccatgaccaccttcgcggagattcaaccacttcctgccatagaggtgactggcggggcccaacctgcagcaggtgcccaggcagccggcgacgcagcaagagaaagcccggccgctggacccgaagccgcagccgcaaaacctgatctggaggagcttgtggccttgacccctccctccccatttcgagactctgtggattctggctcaaccaccccaaattccccagtgagcgagagcgctctatgtatccctagctctcctaagtacgatactctcattatcagggattacactcaatctagcagttcgctgtag

SEQ ID NO: 16486 - DNA, 3543 bp, Artificial Sequence
  derived and/or modified sequence
atggtgttgctactcattttgagcgtcctgcttttaaaggaagatgtgagaggctctgctcagtcctctgagagaagggtggtagcccacatgcctggcgatataatcatcggggcgttgttcagtgtgcaccaccagcctaccgtagataaggtacacgagcgcaagtgcggcgccgtgcgagaacagtacggaattcagcgcgtcgaagccatgctccacacactcgaacggatcaactcggacccgactctgctccctaacattacacttgggtgcgagatccgagactcttgctggcactccgccgtagcactggaacagtcaatcgagtttattcgagatagcctaatcagctctgaagaggaagagggcctagtgcggtgtgtggatgggtcctcctcaagctttaggtctaagaagcctattgttggggtgattgggcccggctcctctagtgtggcaattcaagttcagaacttactgcaactctttaatattccacaaatcgcgtactcggccacgtccatggatttgtccgataaaaccctgttcaagtacttcatgagagtggtgccctccgatgcacagcaggcccgcgccatggttgatatcgtaaagcgctataactggacttacgtttccgcagtccacactgagggcaactacggggagtctggcatggaggcttttaaggatatgagcgctaaggagggaatttgtattgcacattcttataaaatctactctaatgcaggggaacaaagcttcgacaaattactgaagaagcttaccagtcacttgcccaaggcaagagtggtcgcctgcttttgtgagggtatgacagtgcgtggactgttaatggctatgaggcggctgggcttagctggagagttcctcctcttgggcagtgatggctgggccgaccggtatgatgtaactgatggctatcagcgggaagccgtgggaggcattaccatcaagctccagtctccggacgtgaaatggttcgacgattactatctgaaactgagacccgagacgaatcaccgaaatccgtggttccaggagttctggcagcatagattccagtgcagattggaaggctttccccaagagaacagcaagtataataagacatgcaattcttcccttacgttaaagacccaccacgtccaagactctaaaatgggcttcgtcattaacgctatttacagcatggcctatggcctgcataacatgcagatgagcctttgtccaggctacgcaggcctgtgcgatgccatgaaacctatcgatgggaggaaattgctcgagtcattaatgaaaactaactttactggggtaagtggtgacaccattctctttgacgaaaatggggacagtcctggtcggtacgaaattatgaattttaaggagatggggaaagactactttgactacatcaatgttggctcatgggacaacggcgaactgaaaatggatgacgacgaagtgtggagcaaaaagtctaacattatacgaagtgtgtgctcagagccctgcgagaagggacagatcaaagtgattagaaagggcgaagtgagttgctgctggacttgcaccccttgtaaagaaaacgagtacgtgttcgacgagtacacatgcaaggcctgccaactcggctcttggcccactgacgacctgactgggtgcgacctaattcctgttcaatacctcaggtggggagatcctgaaccgattgccgcggtggtctttgcttgtctgggcctgctcgcaacccttttcgtaactgttgtcttcattatctatcgagatactcctgtggttaaatcaagtagtagggagttgtgctatatcatcctggcagggatatgtctcggatacttgtgtaccttctgtctgatagccaagcctaagcagatctattgttacctgcagcggattggaattgggctttcccccgccatgagctacagtgccttggttaccaaaacaaatagaatcgctagaatcctcgcggggtcaaagaagaaaatctgtaccaaaaaacctaggtttatgagcgcctgcgctcaattggtcatcgcctttattcttatctgtatacagctaggcatcattgtggcgttgttcatcatggagcccccagatattatgcatgactatccgagcatcagagaagtctatttgatctgcaacactaccaacctcggagtggtcacgccactcgggtacaacgggttgctcattctgtcttgtaccttttatgcattcaaaacccgcaatgttcccgcaaacttcaatgaggccaagtatattgctttcactatgtacaccacgtgtatcatctggttggcatttgtgcctatctactttggcagtaactacaaaataattacaatgtgtttttcagtgtcactaagcgctactgtggcattggggtgtatgttcgtaccaaaagtctatattatcctggcaaagcctgagaggaatgtgcgaagtgcattcaccacctccaccgtggtacgcatgcacgtaggcgacggcaaaagcagctccgcggctagtaggagttcctccttagtgaacctgtggaaaagacggggatctagcggggaaaccctctctagtaatgggaaaagcgttacttgggcccagaatgaaaagtcctcacgggggcagcacctgtggcagcggttgagcattcatatcaataaaaaagagaaccccaatcagacagcagtcataaaaccttttcctaaatctacagagagtaggggactgggcgccggcgccggagcaggtggctcagccgggggcgtgggggcgactggtggagctgggtgtgctggagccggtccaggcggcccggagtccccagatgctggtcctaaggccctgtatgatgtggccgaagcagaagagcatttccccgcccctgctcgccctcggagccctagtccaatctccaccctgtcacacagggccggatcagctagtcggacagacgatgacgtacctagcctccacagtgaacccgtggccaggtcaagttcaagtcaggggtcactgatggagcagattagcagcgtagtcaccaggtttaccgctaacatctccgaactgaattctatgatgctgagcaccgctgctccttcacccggcgtgggggctccactgtgctcctcatatttgattccaaaagagatccagctgccgaccacaatgacaacattcgctgaaatccaaccactgcctgccattgaagtcactggtggcgctcaacccgccgccggcgcccaggccgcaggcgacgcagcaagggagtctcccgcagccggaccagaagccgcagccgctaagcccgaccttgaggaactggtcgccctaactccacccagcccttttcgtgattcagttgactctggctcaacaacacccaactcgcccgtctcagaaagcgccctgtgcataccatcgtcgcctaagtacgatactctgatcattcgcgactatacccagtcatcttctagcctgtag

SEQ ID NO: 16487 - DNA, 3543 bp, Artificial Sequence
  derived and/or modified sequence
atggtgctgctgctgatcctgtctgtgctgctgctgaaggaggatgtgcggggcagcgcccagagcagcgagaggagagtggtggcccacatgcctggggacatcatcattggagccctcttctctgtgcaccaccagcccaccgtggacaaggtgcatgagaggaaatgtggggctgtgcgggagcagtatggcatccagagggtggaggccatgctgcacaccctggagcgcatcaacagcgaccccaccctgctgcccaacatcaccctgggctgtgagatccgggacagctgctggcacagcgctgtggccctggagcagagcattgagttcatccgggacagcctcatcagcagcgaggaggaggagggcctggtgcgctgtgtggatggcagcagcagcagcttccgcagcaagaagcccatcgtgggcgtgattggccctggcagcagctctgtggccatccaggtgcagaacctgctgcagctgttcaacatcccccagatcgcctacagcgccacctccatggacctgagtgacaagaccctcttcaagtacttcatgagggtggtgcccagtgatgcccagcaggcccgggccatggtggacatcgtgaagcgctacaactggacctacgtgtctgctgtgcacacagagggcaactatggagagagcggcatggaggccttcaaggacatgtctgccaaggagggcatctgcatcgcccacagctacaagatctacagcaatgctggggagcagagctttgacaagctgctgaagaagctgaccagccacctgcccaaggcccgggtggtggcctgcttctgtgagggcatgacagtgcggggcctgctgatggccatgaggcggctgggcctggccggggagttcctgctgctgggcagtgatggctgggccgacagatatgatgtgacagatggctaccagcgggaggccgtgggcggcatcaccatcaagctgcagagcccagatgtgaagtggtttgatgactactacctgaagctgcggcctgagaccaaccacaggaacccctggttccaggagttctggcagcaccgcttccagtgccgcctggagggcttcccccaggagaacagcaagtacaacaagacctgcaacagcagcctgaccctgaagacccaccacgtgcaggacagcaagatgggctttgtgatcaatgccatctacagcatggcctacggcctgcacaacatgcagatgagcctgtgccccggctacgccggcctgtgtgatgccatgaagcccattgatggcaggaagctgctggagagcctgatgaagaccaacttcaccggggtgtctggggacaccatcctgtttgatgaaaatggagacagccctggccgctatgagatcatgaacttcaaggagatgggcaaggactactttgactacatcaacgtgggctcctgggacaatggagagctgaagatggatgatgatgaggtgtggagcaagaagagcaacatcatccgctctgtgtgcagcgagccctgtgagaagggccagatcaaggtgatcagaaaaggagaggtgtcctgctgctggacctgcaccccctgcaaggaaaatgaatatgtgtttgatgagtacacctgcaaggcctgccagctgggctcctggcccacagatgacctgaccggctgtgacctgatccctgtgcagtacctgcgctggggagaccctgagcccatcgctgctgtggtgtttgcctgcctgggcctgctggccaccctgtttgtgacagtggtgttcatcatctacagagacacccctgtggtgaagagcagcagccgggagctgtgctacatcatcctggccggcatctgcctgggctacctgtgcaccttctgcctgattgccaagcccaagcagatctactgctacctgcagagaattggaattggcctgagccctgccatgagctacagcgccctggtgaccaagaccaacagaattgcccgcatcctggccggcagcaagaagaagatctgcaccaagaagccccgcttcatgtctgcctgtgcccagctggtgattgccttcatcctgatctgcatccagctgggcatcatcgtggccctcttcatcatggagcccccagacatcatgcatgactaccccagcatccgggaggtgtacctgatctgcaacaccaccaacctgggcgtggtgacccccctgggctacaacggcctgctgatcctgagctgcaccttctacgccttcaagaccagaaatgtgcctgccaacttcaatgaggccaagtacatcgccttcaccatgtacaccacctgcatcatctggctggcctttgtgcccatctacttcggcagcaactacaagatcatcaccatgtgcttctctgtgtccctgagcgccaccgtggccctgggctgcatgtttgtgcccaaggtgtacatcatcctggccaagccagagagaaatgtgcgcagcgccttcaccaccagcacagtggtgaggatgcacgtgggagatggcaagagcagcagcgctgccagccgcagcagcagcctggtgaacctgtggaagaggcggggcagcagcggggagaccctgagcagcaatggcaagtctgtgacctgggcccagaatgagaagagcagccggggccagcacctgtggcagaggctgagcatccacatcaacaagaaggagaaccccaaccagacagctgtgatcaagcccttccccaagagcacagagagccggggcctgggcgctggggccggggccggcggcagcgctggaggagtgggcgccactggaggagctggctgtgccggggccggccctgggggccctgagagcccagatgctggccccaaggccctgtatgatgtggccgaggccgaggagcacttccctgccccagcccggcccaggagccccagccccatcagcaccctgagccacagagctggcagcgccagcaggacagatgatgatgtgcccagcctgcacagcgagcctgtggcccggagcagcagcagccagggcagcctgatggagcagatcagctctgtggtgacccgcttcaccgccaacatcagcgagctgaacagcatgatgctgagcacagctgcccccagccctggggtgggcgcccccctgtgcagcagctacctgatccccaaggagatccagctgcccaccaccatgaccacctttgctgagatccagcccctgcctgccatcgaggtgactggaggagcccagcctgctgctggggcccaggccgctggagatgctgcccgggagagccctgctgctggccctgaggccgccgccgccaagccagacctggaggagctggtggccctgaccccacccagccccttccgggacagcgtggacagcggcagcaccacccccaacagccctgtgtctgagagcgccctgtgcatccccagcagccccaagtatgacaccctcatcatccgggactacacccagagcagcagcagcctgtag

SEQ ID NO: 16488 - DNA, 3543 bp, Artificial Sequence
  derived and/or modified sequence
atggtgctgctgctgatcctgagcgtgctgctgctgaaggaggacgtgcgcgggtccgctcaaagctccgagagaagggtggtggcccacatgcccggtgacattattatcggtgctctcttttctgttcaccatcagccgacagtggacaaggttcacgagcgcaagtgcggagcagtgcgagagcagtatggaattcagagagtagaagccatgcttcatactctcgaacgcatcaattccgaccctacactcctgcctaatattacactgggttgtgagatcagagactcctgctggcattctgccgtcgcactcgagcagagtatcgagttcatccgcgattccctcataagctcagaggaagaagaagggttagtgaggtgcgtcgacggaagttcgtcttcattcagaagtaagaagcctattgtgggtgtgatcgggccaggatcctcctcagtagcaatccaggtccagaacctgctacagctgtttaatattccccagatcgcctacagcgctacaagcatggatcttagcgataaaactctctttaagtattttatgagagtcgtgccaagcgatgcccagcaggctcgggcgatggttgatattgtgaaacggtacaattggacgtatgtgtctgccgttcatacagagggcaattatggtgagtccgggatggaggcatttaaagatatgagcgcaaaagagggaatttgtatcgcccactcatataagatctacagtaatgctggagaacagtctttcgataaactgttgaagaaactgacaagtcacctgccaaaagctagggtagtggcctgtttttgcgaaggaatgaccgtgagaggattgcttatggccatgcgccgcctgggtctggccggcgagtttcttttgctgggctcagatgggtgggcagacaggtacgacgtgacagacgggtatcagcgcgaggcagtcggagggattaccatcaagcttcagagccccgacgttaagtggttcgacgactactacctaaagctgcgcccagagacgaaccaccgcaatccttggtttcaggaattttggcagcaccggttccagtgcagattggagggattcccccaggagaacagtaagtacaacaagacatgcaattcaagtcttacattgaagacacatcatgtgcaggatagcaagatggggttcgtcattaatgctatttactcaatggcatatggtctccataacatgcagatgtcgctgtgccccgggtatgcaggattatgcgacgcaatgaagcctatagatggccgcaagctcctcgagagtctaatgaaaaccaatttcaccggagtgtccggggacaccatcctctttgacgaaaatggggacagtccaggcagatacgaaataatgaacttcaaagagatggggaaagattactttgactatataaacgtgggctcttgggacaatggtgaactcaaaatggacgacgatgaagtgtggagtaaaaagtctaacataatccgttctgtctgttccgagccttgcgagaagggacagattaaggttatcaggaaaggggaggtctcttgttgctggacatgtactccctgcaaagagaacgagtatgtgtttgacgagtacacctgcaaggcctgtcaacttgggagctggcctactgatgaccttactgggtgtgatctgattccggtgcagtacctgcgctggggcgatcccgaaccgattgctgcagtcgtgtttgcttgtctgggtctgttggcaacgctattcgtgaccgttgtcttcattatttatcgcgatactccggtggtcaagtcatccagccgtgaattgtgctatattatcttagccggcatttgtctgggttacttatgtactttctgcctgattgctaagcccaaacagatctactgttacttgcagaggataggaatcgggttgagtccggctatgagttacagcgctcttgtaactaaaacgaatcgtatcgcacgcatccttgctggtagcaaaaagaaaatctgcactaagaagcctcgatttatgagcgcctgtgctcagcttgtgatagccttcattctcatctgtattcagctggggataatcgtcgccctgtttatcatggagccacctgacatcatgcacgactatccttcaattagggaggtatatctgatctgcaataccacaaacctgggagtcgtcaccccactggggtacaacgggctactgatactgtcctgtacgttctatgcttttaaaacgcggaacgttcctgccaatttcaacgaggcaaaatatatcgcattcaccatgtacactacctgtatcatctggctcgcctttgttccaatatattttggtagtaactataagatcatcactatgtgtttctcggtgtcactttccgctaccgtcgctctgggttgcatgtttgtccccaaagtatatatcatccttgccaaacctgaacgcaacgtgcgatctgcttttacgacctcaacagttgtgcgcatgcacgttggggatggcaagagttcatctgctgcctctaggtcgtcttccctcgttaatttgtggaagcgccgcgggtctagcggcgaaaccctgtcctcaaacggtaaatcggtcacatgggcccagaacgaaaaatcttcaaggggccagcacctgtggcagaggttgagtatccatatcaacaaaaaggagaaccctaatcaaaccgccgtgatcaaaccatttcctaaaagcacagaatctcgtggccttggtgcaggcgcaggcgcgggtggcagtgccgggggggtgggcgccacaggtggggctgggtgcgcaggagctggaccggggggtccagaatcccctgacgctggccctaaggctttgtacgatgtcgccgaggcggaagagcatttccccgctccggccaggccgagatccccttctccaatcagtaccctgtctcacagagcgggcagtgcctctaggactgatgatgatgtcccgtccctgcactcagagcccgttgccaggagctcgagctcccagggtagcttaatggaacaaatcagctctgtggtcacccgattcacggccaatatttccgaactgaattccatgatgctctccacagctgctccctcccctggagtaggggcgcccctatgctcttcttatctaattcccaaggagatccagctgcctacaactatgactacattcgctgaaatacagcccctccctgctatagaggtaaccggcggagcccagccagccgccggcgcgcaggcagctggagatgccgcaagagaaagtcctgccgcaggcccagaggccgctgcagccaagcctgatttggaagagttggttgccctcacacctccctccccttttcgtgacagcgtggatagcggctcaaccactccaaacagccccgtgtcggagtctgccctgtgcatcccttcctccccaaagtatgataccctgataattagggactatacccagagctcttcctcactgtag

SEQ ID NO: 16489 - DNA, 3543 bp, Artificial Sequence
  derived and/or modified sequence
atggtgctgctgctgatcctgagcgtgctgctgctgaaggaggacgtgcgcggcagcgcccagtccagcgaaaggcgcgttgttgcgcacatgccaggcgatattattattggagcgctgttttccgtgcatcatcaaccgacagtagacaaggtgcacgaaagaaaatgcggcgctgtcagggagcaatacggtattcagagagtggaggctatgttacacactctcgagcgtatcaactccgatcccaccctgctccctaacatcacgctgggatgcgagatccgcgattcttgctggcacagtgcagtggccttagagcaatctatagaattcatcagggatagcctcatcagcagcgaggaggaggagggtctggttagatgcgtcgatggatcctcttccagctttagaagcaagaagcccatcgtcggtgtcattggtccaggaagctcttcagtggctatccaggtccagaacctgcttcagcttttcaatatcccccaaatcgcgtatagtgctaccagtatggatctgtctgataagacccttttcaaatacttcatgcgggttgtgccttccgatgctcagcaggctagggccatggtcgatatagttaagcgctataattggacttatgtctctgctgtgcacaccgaaggaaactatggtgagtccggaatggaagcattcaaggatatgtccgccaaagaggggatctgcatcgcacactcatacaaaatctactctaacgctggagagcagtctttcgacaaactactgaagaagctgacgtctcacctgcctaaagcccgtgtcgttgcctgcttttgtgagggcatgacggtgagaggtcttctgatggctatgagacgactcggactggccggtgagttcttactgttggggtccgacggatgggccgacagatacgatgttactgatggttaccagagggaggcggtgggagggatcacaattaaactgcaatctcccgatgtgaaatggtttgacgactattacctgaagctgagacccgaaactaaccatcgcaatccttggtttcaggagttctggcagcatagatttcaatgtcggctggagggcttccctcaggagaattccaaatataataagacatgcaacagcagcttgaccctgaaaacgcatcacgtgcaggactctaagatgggcttcgtgattaacgcaatctatagcatggcgtacggcctgcataatatgcagatgtcattgtgccctggatacgctgggctgtgcgacgctatgaaacctattgatgggaggaaactgctggagtcactgatgaagacaaacttcacaggggtgagcggagacaccatactgtttgatgagaatggtgactctcctggccgttatgaaattatgaattttaaagagatggggaaagactatttcgactatattaacgtgggatcttgggacaacggggaactcaagatggatgatgacgaagtctggtcgaagaagagtaacattatcagatcagtttgcagcgagccttgtgaaaaaggccagataaaggttattcgtaagggggaagtgtcctgctgctggacatgcactccatgcaaagagaacgaatatgtgttcgatgagtacacttgtaaagcatgccaactcggatcctggcctacggacgacttgaccggctgtgatctcataccggtacagtatctacggtggggcgacccagaacctattgcggctgtagtcttcgcatgcttgggccttctggcgacgctgtttgtcacagtggtatttataatatatagggatacacccgtagtgaaatctagtagccgggagttatgttacattattcttgctggcatctgcttggggtatctatgtaccttttgcctgatagctaaaccaaagcaaatttattgttatctgcagcggatcggtattggactcagtcctgccatgtcttactctgccttagtgaccaagaccaaccggatcgccaggatcctggccgggtctaaaaaaaagatatgcaccaaaaagcccagattcatgtctgcctgtgcccagctggttattgcattcatcctcatatgtattcaacttggaatcatagtggccctgtttataatggagcctcccgacatcatgcacgactatccgtccatccgcgaagtttatctgatatgcaacaccacaaatctcggtgtggttactcccctgggatacaacggtctgctaatcttgagctgtacgttttacgctttcaaaactcggaacgtgccagcgaattttaacgaggcaaaatatatcgcattcactatgtacacaacatgcattatatggctggcctttgtaccaatatactttggctcaaactataaaattatcacaatgtgcttcagtgtcagcctgagtgccacagtggccctgggatgcatgtttgtgcctaaagtatatattattctcgccaagcccgagcgaaacgtgcggtctgccttcaccaccagtacggtagttcgcatgcacgtaggcgatggcaagtcgtcaagcgccgcctcgcgcagttctagcctcgtgaatctgtggaagcgccggggaagtagcggtgagaccttatccagtaatgggaagagcgtgacctgggctcagaacgagaagtcaagtagggggcagcacctgtggcaacgactgagcattcatatcaacaaaaaggagaaccccaaccagactgcagtaattaagccttttcctaaaagcactgagagtaggggcctgggtgccggagccggggccggcggatctgccggtggcgtcggagctactggaggagccggttgtgctggcgctggcccaggcggaccagagagtccagatgctggccctaaagccttgtacgacgttgcggaggccgaggaacattttccggcacccgctcgccctcgttcaccctcaccaattagtaccctgtctcatagagcgggctccgcatccaggaccgacgacgacgtcccatcattacacagcgagcccgtagccagatcttcctcttcccaggggtcactcatggaacagatctcatcagtggttacacggtttacggccaatatttccgaactgaacagtatgatgttgtccacagctgccccttcgcccggggttggcgcacccttgtgttcgagttacctgatccccaaagagatccagctgcctacaactatgacaactttcgccgagatacagcctttacccgccatagaagtgacgggtggtgcccagcccgctgctggcgctcaagctgcgggagacgccgcacgggaaagtcccgcggccgggcctgaggctgccgccgctaaacctgatctcgaagaattagttgcgctgacgcctccttcccctttccgagactcagttgattccgggtcgacaaccccaaatagtcccgtgtcggaatcagctctctgcatcccaagctcgccaaaatatgatacccttatcattcgcgattacacacagtctagttcatctttgtag

SEQ ID NO: 16490 - DNA, 3543 bp, Artificial Sequence
  derived and/or modified sequence
atggtgctgttgctgatcctcagcgtcttacttttgaaagaggacgtaagagggagtgcccagtcatctgaaagacgtgttgtagcccacatgcccggagacataataatcggcgctctgttctcagtgcaccatcagccgactgtggacaaggtgcacgaacggaagtgtggcgcagtgcgcgagcagtacgggattcagcgggtggaggcaatgctgcatacccttgagaggattaatagtgaccctaccctgctcccaaatatcacactagggtgtgagattcgagattcatgttggcactcagccgttgccctcgaacaaagcattgaatttattcgagactctctgatcagctcggaggaggaggaaggtctggtccggtgtgtggacgggagctcatcctcctttcggtccaagaaacctatcgtgggggtgatcggacctggctcctcttccgtggccattcaggtccagaaccttctgcaactgttcaatattccgcaaatcgcctacagcgcaacctcgatggatctttccgataagaccctgttcaaatattttatgcgggtcgtcccatcagacgcccagcaggctagggccatggtggacatcgtgaagcgatataactggacatatgtgtccgcggtgcataccgagggcaactatggcgaatctggaatggaggctttcaaagatatgtccgctaaggaaggcatttgtattgctcactcatacaagatctattctaatgctggggaacaaagcttcgacaagctactgaagaagctgacatctcatctgccaaaggctcgagtagttgcttgtttctgcgagggtatgacagtgcggggtctgctcatggctatgcgaagactaggtctcgccggagagttcctgctgctgggctccgatgggtgggccgaccggtacgacgttacagatggttatcagagagaggcagtcggagggatcacaataaaattgcagtctccagacgtaaaatggtttgatgattattacttgaaactgcgacccgagaccaatcacagaaatccgtggtttcaggagttctggcagcatcgcttccaatgcaggttagagggcttccctcaggagaattcaaaatataacaagacttgtaactcctctctcaccctgaagacccatcacgttcaggatagtaagatgggtttcgttatcaacgctatatatagtatggcctacggtctgcataacatgcagatgagtctgtgtcccggttacgctggcctgtgcgacgctatgaagccaattgatggtcgcaagctgcttgagtctctgatgaagaccaacttcaccggcgtatccggagacactatcctattcgacgagaatggggactctcctggtaggtacgaaatcatgaatttcaaggaaatggggaaagactattttgactatattaacgtaggatcttgggataatggagagctgaagatggatgacgatgaggtgtggtccaaaaaatcgaacattatccgatcagtatgctcagagccttgcgagaagggccagattaaagtaatccgaaagggcgaggtctcctgttgctggacttgcacaccttgtaaagagaatgagtacgtctttgacgagtacacgtgcaaggcttgccagcttggttcctggccgacagacgacctgacaggctgtgacttaattcctgtgcagtatcttcggtggggtgaccccgagccaattgctgcggtggtgttcgcctgtctgggcctgttggccactttatttgtgactgtggtgtttattatatacagggacacccctgtggtgaaaagctcctccagagagctctgttacatcatactggctggcatctgtttgggctacctctgtacattttgcctgatcgcaaaaccaaaacagatatattgctacctacagcggattgggatagggctgtcacctgccatgagttactctgcacttgtgacaaagacaaaccgcatcgccagaatcctagctggctctaaaaagaagatctgcacaaagaagcccagattcatgtccgcgtgtgcccaactggtcatcgcctttatcctgatttgcatacagctagggattatcgtggccctgttcattatggagcctcccgacatcatgcacgactacccatccatccgggaggtgtacctgatttgcaacacgacaaaccttggcgtcgtcactccacttgggtacaacggactgctcattctgagctgcacgttctatgcctttaagacgcgtaatgtgcccgcaaatttcaatgaagcaaaatatatcgcatttaccatgtacactacatgtatcatctggcttgcttttgtgcccatttactttggatcaaactataaaattataaccatgtgcttctctgtgtctttgagcgcaactgtcgccctgggttgcatgttcgtgcctaaagtatatatcatactggccaagcctgaaagaaatgtgaggtccgcgtttaccacctcaactgtcgtgaggatgcacgttggagacggaaagagttcgtcagctgccagcagaagcagctccctggtcaacctctggaagcgcagaggaagctccggggagacactctcatcaaacggcaaaagtgtaacctgggcccagaatgaaaagtcttcgagagggcagcacctttggcaacgcctcagcatccacattaacaagaaggagaatcccaaccagactgccgtcattaaaccatttccaaagtccaccgaatctcgaggcctcggggcaggtgcgggagctggtggctcagccggtggtgtgggggcaactggcggagctggatgcgctggcgctggaccagggggacctgagtcacccgacgcgggacccaaggcactgtacgacgtggcggaggcagaggagcattttcccgcacccgcaagaccccgatcacctagccctattagcaccctgtcacaccgtgctggaagtgctagccgtaccgacgatgatgttccctcacttcactctgaacctgtggcaagatcgtcaagctctcaggggtcattgatggagcaaatctcatcagtcgtgacccgcttcacggctaacatctcagagctgaattcaatgatgctgtccactgctgccccatcccccggtgttggcgcaccactttgttctagttatcttatcccaaaggagattcagctaccaacaacaatgactacatttgccgaaattcaacccctgccagctatagaagtgacaggtggagcgcaaccagccgctggtgcacaggctgccggtgatgccgctcgggagtctccagcagctggaccagaagccgcagctgccaagcccgatctggaagaactggtagcgctgacccctccatcacctttcagagactctgtcgacagtggttctacaacccctaacagtcccgtttcagagtcggccctctgtatccctagctctccaaaatatgacacactgatcatacgtgattacacacagtcatcatcctctctgtag

SEQ ID NO: 16491 - DNA, 3543 bp, Artificial Sequence
  derived and/or modified sequence
atggtcctgttgctgattctttctgtcctactgctaaaggaagatgtgagagggtccgctcagtcgtctgagcgcagagtagtggcccacatgcctggcgacatcattataggcgctcttttctctgttcaccaccaaccaactgtcgataaggtgcatgagcgcaagtgcggtgccgtgagagagcagtacggaatccagagggtggaagccatgcttcatactctcgaaagaatcaacagtgatcccacgctcttgccaaacataacattgggatgtgagatcagggacagttgctggcattcagcagtggctcttgagcagagcatcgagttcattagagacagcctaatctcaagtgaagaagaggagggactagtgcgatgcgtggatggaagcagctcctcgttccgatccaagaagcccatcgtcggcgtgatcggacccggatcatcttcggtggctatccaggtgcagaacctcctgcaacttttcaatattccacagatcgcatatagcgccacctctatggacttgagtgacaagacactgtttaaatatttcatgagggtagttcccagcgacgctcagcaggcgagagcaatggtagacattgtgaaacgatataattggacatatgtgtcagcggtgcacactgaaggcaattacggtgaatcaggcatggaggcctttaaagacatgtcagccaaggagggcatctgcatagcacattcctacaaaatttattccaacgccggagagcagtctttcgacaagcttttgaaaaaattgacgtcccaccttcccaaagcccgagtcgtcgcctgcttctgtgaaggcatgacagtacgcggtttactgatggcgatgcggcgattggggctggcgggagagtttttactgctcgggagcgatggctgggcggacagatacgacgttacagatggttatcagagggaggctgtcggaggcattacgatcaaactgcagtcacccgatgtaaagtggttcgacgactattatctgaagctgcgacccgagactaatcacagaaacccgtggtttcaagagttctggcagcatagatttcaatgtaggctggagggcttcccgcaggaaaactctaaatacaacaagacatgtaattctagtctcacactgaagacccatcacgttcaggacagcaaaatgggatttgtaattaacgccatttattccatggcctacggccttcataacatgcagatgagtctctgccctgggtatgcgggtttgtgtgatgccatgaaacctattgacggcaggaagctgcttgaaagcctgatgaaaacgaatttcaccggggtatccggcgataccatactgttcgacgagaacggagacagtccgggtcgttacgagattatgaatttcaaagaaatggggaaggattactttgattacattaacgtaggaagctgggacaatggcgagttgaagatggacgacgatgaggtgtggtccaaaaaatccaatatcatcaggtctgtgtgttctgaaccatgtgagaaaggtcagattaaagtgattaggaaaggcgaagtcagctgttgctggacctgtaccccgtgcaaggagaatgaatacgtgttcgatgagtacacatgtaaagcatgtcagctcggaagttggccaaccgatgacctgaccggctgtgatctgatccctgtccagtaccttcggtggggcgatcccgagccaatcgccgcagtggtatttgcctgccttggactgctggccactctctttgtgactgtcgtgttcatcatctaccgcgacactccagtcgtgaagtctagcagccgggagttgtgttacattattttagcaggcatctgtctcggctacctgtgtacattttgtctgattgctaagccaaaacagatctattgctacctccagcgaatcgggattggattgtctccagcaatgtcctactctgcgctggtgactaagaccaatagaattgcgagaattcttgccggttcaaagaagaaaatctgtactaagaagcccaggttcatgagcgcgtgtgcccaactcgtgatcgcattcatcctaatatgtattcagctgggcatcatagttgcattgtttatcatggaaccacctgatatcatgcacgactacccgtccatccgggaggtctacttaatctgcaatacgacaaacctgggagttgtaactcctcttgggtacaacggactccttatactgtcatgtacgttttatgccttcaaaactcgtaacgttcctgctaactttaatgaggctaaatatatcgcgtttaccatgtatacaacatgcattatctggctggcgttcgtgccaatctattttggcagcaactacaaaattatcaccatgtgctttagtgtgtccctttctgccaccgtggctcttgggtgtatgttcgttcccaaagtctacatcatcctcgccaagccagaaagaaacgtgagatcagccttcaccactagcaccgtggtgcgtatgcacgtgggtgatggaaaatccagctcagcggcatcaaggagttcaagcctcgtgaacctctggaagcgcagaggtagttccggggaaactctgagtagcaatggtaagtccgttacctgggctcagaatgaaaaaagttctcgaggccaacatctctggcagaggctctcaattcatatcaataaaaaagagaatccaaaccagactgctgtaattaagccgttccctaaaagcaccgagagtcgtggactgggcgcaggcgcaggggcaggtggctccgccggtggggttggcgctactgggggagccggatgcgctggcgctgggccagggggtccggaaagcccagatgcagggcctaaggccctctacgatgtagccgaggccgaagaacactttcctgcaccagctcggcctcggagccccagtcccatcagcacattgagccatagagcagggagcgcttcccgtactgatgacgacgtgccgtccttgcattcagagcctgtggccagatcttccagctcacaggggtccctgatggaacagatcagctccgttgtaactcggtttaccgccaatatctccgagcttaactccatgatgctcagcaccgccgcaccttcgcctggcgtgggcgctccgctctgcagcagctatttgattccgaaggaaattcagctgcctaccaccatgacgactttcgccgagatccagcctcttcccgcaatagaagttactggaggtgcacagccggcagcgggtgcccaggccgctggcgacgctgctcgggaatctcctgccgcaggaccagaagccgcagcagcgaaaccagatctcgaggagttagtggccttgacccccccaagccccttccgggattctgttgactccggatctaccacacctaattctccagtttctgagagcgcgctatgcatcccaagttccccaaagtacgatacactgataattagagattatacccaaagcagttcgtctctttag

SEQ ID NO: 16492 - protein, 877 aa, Artificial Sequence
  derived and/or modified sequence
MARPRRAREPLLVALLPLAWLAQAGLARAAGSVRLAGGLTLGGLFPVHARGAAGRACGQLKKEQGVHRLEAMLYALDRVNADPELLPGVRLGARLLDTCSRDTYALEQALSFVQALIRGRGDGDEVGVRCPGGVPPLRPAPPERVVAVVGASASSVSIMVANVLRLFAIPQISYASTAPELSDSTRYDFFSRVVPPDSYQAQAMVDIVRALGWNYVSTLASEGNYGESGVEAFVQISREAGGVCIAQSIKIPREPKPGEFSKVIRRLMETPNARGIIIFANEDDIRRVLEAARQANLTGHFLWVGSDSWGAKTSPILSLEDVAVGAITILPKRASIDGFDQYFMTRSLENNRRNIWFAEFWEENFNCKLTSSGTQSDDSTRKCTGEERIGRDSTYEQEGKVQFVIDAVYAIAHALHSMHQALCPGHTGLCPAMEPTDGRMLLQYIRAVRFNGSAGTPVMFNENGDAPGRYDIFQYQATNGSASSGGYQAVGQWAETLRLDVEALQWSGDPHEVPSSLCSLPCGPGERKKMVKGVPCCWHCEACDGYRFQVDEFTCEACPGDMRPTPNHTGCRPTPVVRLSWSSPWAAPPLLLAVLGIVATTTVVATFVRYNNTPIVRASGRELSYVLLTGIFLIYAITFLMVAEPGAAVCAARRLFLGLGTTLSYSALLTKTNRIYRIFEQGKRSVTPPPFISPTSQLVITFSLTSLQVVGMIAWLGARPPHSVIDYEEQRTVDPEQARGVLKCDMSDLSLIGCLGYSLLLMVTCTVYAIKARGVPETFNEAKPIGFTMYTTCIIWLAFVPIFFGTAQSAEKIYIQTTTLTVSLSLSASVSLGMLYVPKTYVILFHPEQNVQKRKRSLKATSTVAAPPKGEDAEAHK

SEQ ID NO: 16493 - protein, 1091 aa, Artificial Sequence
  derived and/or modified sequence
MQLDGLQALCWGSLFRTQLVPVYVAVLPSPQPCIPPTCTAFTEFSGPLAKHHSFQPFQVAAPAGPRSPPQPFHLPSVSQVHATHLLCPVRVLGPPYPPSLELLTSIHSPAVLPAPQIPQISYASTAPELSDSTRYDFFSRVVPPDSYQAQAMVDIVRALGWNYVSTLASEGNYGESGVEAFVQISREAGELGAPRHQGVYIVWARGPQLGQKQKDGGPRSMLGRGCLAGAPCGRDLFVLDDSALPQAWRRVQARLHPCRPFSQPTQSSAAVARWSIKIPREPKPGEFSKVIRRLMETPNARGIIIFANEDDISPAPTRRVLEAARQANLTGHFLWVGSDSWGAKTSPILSLEDVAVGAITILPKRASIDGFDQYFMTRSLENNRRNIWFAEFWEENFNCKLTSSGTQSDDSTRKCTGESCPGWTGEERIGRDSTYEQEGKVQFVIDAVYAIAHALHSMHQALCPGHTGLCPAMEPTDGRMLLQYIRCPLQWLNRIPLCEWPRRVRPFFCQWTLGLLSSCGYVNNAAVNVAVQAFLATLLSSLSSIYPGVELLGHVFNLLRRLHTVFCSGCSLFPPTVHKGSAGTPVMFNENGDAPGRYDIFQYQATNGSASSGGYQAVGQWAETLRLDVSVQTEPQVGMGPGSRRQTPQPVFCASQVEALQWSGDPHEVPSSLCSLPCGPGERKKMVKGVPCCWHCEACDGYRFQVDEFTCEACPGDMRPTPNHTGCRPTPVVRLSWSSPWAAPPLLLAVLGIVATTTVVATFVRYNNTPIVRASGRELSYVLLTGIFLIYAITFLMVAEPGAAVCAARRLFLGLGTTLSYSALLTKTNRIYRIFEQGKRSVTPPPFISPTSQLVITFSLTSLQINAVFRVTLFYFGSLQWHYLSSLQALPSGDLSVQHLSASVSLGMLYSKSKTPVDLEVGSEPWGYLGDGVLQAEHWGEGRGDWPHVKVMVVVYQSSLVYYMKQAQAGRVKTELLKVAHHQVAKSVPEESQIVVLHLVTAGYVDMAIRTTRASLHLMPLTLVPGAAAEVNETQVAARLGPGSTVGTYQVVVVLMRSLQIDKTTNQLSLETCFSGIQGFLASVNSLVMDK

SEQ ID NO: 16494 - DNA, 2634 bp, Artificial Sequence
  derived and/or modified sequence
atggctcgtcctagacgagctcgagaacccctgcttgtggctctcctgccactggcctggctagcacaggccggactcgcccgggcagccggaagcgtccgccttgctggtggcctgaccttgggcggcctgtttcccgtgcacgccaggggggcggcaggacgggcttgtggacaactgaaaaaagagcagggtgtccaccgcctggaggcaatgctgtatgcactggaccgcgttaacgccgatccagagcttctccccggagtcaggcttggggcccgtctgctggatacctgcagcagagacacctacgccctcgaacaggcgctctcattcgttcaagccctgattcgcggtcgcggagacggcgacgaagtgggggtgcgttgccccggaggcgtgcctcccctgcgccctgcccctcccgaacgagtggtagccgtcgttggcgcaagcgcgagctctgtttcaatcatggttgccaacgtgcttagactgttcgccatccctcagatcagctatgcttctacagctccggaactttccgactctacacgctatgactttttttccagggttgtaccacccgatagctaccaggcccaagctatggttgatattgttagagccctgggctggaattacgtgtcaaccctggcaagcgaggggaattatggagaaagcggcgtggaagctttcgttcagattagccgcgaagcggggggagtttgtatagcccagagcattaagattccacgggagccaaagcccggagaattttccaaagtgattcgaaggctgatggaaactcccaacgctcgagggatcatcattttcgccaacgaggacgacatcaggcgggtgctggaagcagcaagacaggcgaatctgacgggacattttctttgggtaggctcagactcttggggcgccaagactagtcccatactgtcattagaggatgtggccgtcggggccatcactattctccccaaaagggcatctatagacggatttgatcagtattttatgactcgatccctcgagaacaacaggcgaaatatctggtttgcagaattttgggaggagaatttcaattgtaaactcacttctagtgggactcagtccgacgatagcaccaggaaatgcacaggagaagaacgaatcgggcgagattccacttacgagcaggagggaaaggtccaattcgtgatcgatgctgtctatgcgattgcccatgctctacatagtatgcatcaggctttatgccccggccacacaggcctgtgcccggccatggagccaacagacggaaggatgcttctccagtatatcagagctgtgcgattcaatggctccgctggaactcctgtgatgttcaatgagaatggggatgcgcccggccgctatgatatcttccaatatcaggccaccaatggcagcgcatcttcaggcggctaccaagcagtgggccaatgggccgagaccctccggctcgacgtagaggcactgcagtggtcaggggatccacacgaggtaccctcctctctttgcagcctcccgtgcggtcctggagagcggaaaaaaatggtgaaaggcgtcccctgctgctggcactgcgaagcctgtgacggctatcgctttcaggtcgacgagttcacctgcgaagcctgtcccggcgacatgcgacccacgcccaaccatactggctgtaggccaacgccagtcgtccggctgagctggtcatcaccctgggcagcaccacctctcctcttggccgtgttagggattgtggcaactacgaccgtggtcgccactttcgtcagatacaataacacccccatcgtaagagctagtgggcgggagttgtcatatgtgttgctaactgggatttttctgatttacgctatcaccttcctgatggtggcggagcctggcgcagcagtttgtgcggcccggagactctttcttggactgggcacaacactatcgtattctgcgctgttgactaaaaccaaccgcatctataggatcttcgaacaagggaagcgatctgtgactcctcctcctttcattagcccgacatctcagctggtaattaccttctcacttacatctctgcaagttgtcggcatgatcgcgtggctcggggcacgtcccccacacagcgtgatcgactacgaagaacagagaacagttgatccagagcaggcgagaggtgttctgaaatgcgacatgagtgacctctcattaatcgggtgcctcgggtacagcctcctgctcatggtaacttgtacagtctatgctatcaaggcccgaggggtgcccgagaccttcaacgaagcaaagcctataggattcacgatgtataccacttgcataatttggctggctttcgtcccaatctttttcggcactgctcagtcagccgagaaaatttatattcagaccaccaccttaaccgtatccctgtccctctcagccagcgtttctctcggcatgctctatgtgccaaagacctatgtgatcctgtttcatcccgaacaaaatgttcaaaagaggaaaagaagtctcaaggccacaagcacagtcgccgcccctccaaagggggaggacgctgaggcccacaagtag

SEQ ID NO: 16495 - DNA, 2634 bp, Artificial Sequence
  derived and/or modified sequence
atggcccggccccggcgggcccgggagcccctgctggtggccctgctgcccctggcctggctggcccaggccggcctggcccgggccgccggctctgtgcggctggccggcggcctgaccctgggcggcctcttccctgtgcacgcccggggagctgctggccgggcctgtggccagctgaagaaggagcagggcgtgcaccggctggaggccatgctgtatgccctggacagagtgaatgctgaccctgagctgctgcccggggtgcggctgggcgcccggctgctggacacctgcagccgggacacctacgccctggagcaggccctgagctttgtgcaggccctgatccggggcagaggagatggagatgaggtgggcgtgcgctgccctggaggagtgccccccctgcggcctgcccctcctgagcgggtggtggccgtggtgggcgccagcgccagctctgtgtccatcatggtggccaacgtgctgcggctgtttgccatcccccagatctcctatgccagcacagcccctgagctgagtgacagcaccaggtatgacttcttcagccgggtggtgcccccagacagctaccaggcccaggccatggtggacatcgtgcgggccctgggctggaactacgtgtccaccctggccagcgagggcaactatggagagagcggcgtggaggcctttgtgcagatcagccgggaggccggcggcgtgtgcatcgcccagagcatcaagatcccccgggagcccaagccaggagagttcagcaaggtgatccggcggctgatggagaccccaaatgcccggggcatcatcatctttgccaatgaagatgacatccggcgggtgctggaggccgcccggcaggccaacctgaccggccacttcctgtgggtgggcagtgacagctggggcgccaagaccagccccatcctgagcctggaggatgtggccgtgggcgccatcaccatcctgcccaagagggccagcattgatggctttgaccagtacttcatgaccaggagcctggagaacaacagaagaaacatctggtttgctgagttctgggaggagaacttcaactgcaagctgaccagcagcggcacccagagtgatgacagcaccaggaagtgcaccggggaggagagaattggccgggacagcacctatgagcaggagggcaaggtgcagtttgtgattgatgctgtgtatgccatcgcccacgccctgcacagcatgcaccaggccctgtgccccggccacacaggcctgtgcccagccatggagcccacagatggccgcatgctgctgcagtacatccgggctgtgcgcttcaatggatctgctggcacccctgtgatgtttaatgaaaatggagatgcccctggccgctatgacatcttccagtaccaggccaccaatggaagtgccagcagcggcggctaccaggccgtgggccagtgggccgagaccctgcggctggatgtggaggccctgcagtggagcggggacccccatgaggtgcccagcagcctgtgcagcctgccctgtggccctggagagaggaagaagatggtgaagggcgtgccctgctgctggcactgtgaggcctgtgatggctaccgcttccaggtggatgagttcacctgtgaggcctgccctggggacatgaggcccacccccaaccacacaggctgccggcccacccctgtggtgcggctgtcctggagcagcccctgggccgccccacccctgctgctggccgtgctgggcatcgtggccaccaccaccgtggtggccacctttgtgcgctacaacaacacccccatcgtgcgggccagcggccgggagctgtcctatgtgctgctgaccggcatcttcctgatctatgccatcaccttcctgatggtggccgagcctggagctgctgtgtgtgccgcccggcggctcttcctgggcctgggcaccaccctgagctacagcgccctgctgaccaagaccaaccgcatctaccgcatctttgagcagggcaagaggtctgtgaccccaccacccttcatcagccccaccagccagctggtgatcaccttcagcctgaccagcctgcaggtggtgggcatgattgcctggctgggcgcccggcccccccacagcgtgattgattatgaggagcagaggacagtggaccctgagcaggcccggggcgtgctgaagtgtgacatgtctgacctgagcctcatcggctgcctgggctacagcctgctgctgatggtgacctgcaccgtgtatgccatcaaggcccggggcgtgcctgagaccttcaatgaggccaagcccatcggcttcaccatgtacaccacctgcatcatctggctggcctttgtgcccatcttcttcggcacagcccagagcgctgagaagatctacatccagaccaccaccctgactgtgtccctgagcctgagcgcctctgtgtccctgggcatgctgtatgtgcccaagacctacgtgatcctcttccaccctgagcagaatgtgcagaagaggaagaggagcctgaaggccaccagcacagtggccgccccacccaagggagaagatgctgaggcccacaagtag

SEQ ID NO: 16496 - DNA, 2634 bp, Artificial Sequence
  derived and/or modified sequence
atggcccggccccggcgggcccgggagcccctgctggtggccctgttgccactcgcgtggttggcacaggcagggttggcccgcgctgccgggtctgtcagactagcaggaggcctgaccctgggcggactgttccccgttcacgcccgcggggcagccgggcgtgcctgtggacagctaaagaaggaacaaggcgtccatcgcttagaggccatgctttacgctcttgaccgcgtgaatgccgaccccgagctcttgcccggtgtgcggctgggagcaaggctgctcgacacatgctcacgcgatacctacgctcttgagcaggccctttccttcgtgcaggcccttattagaggaagaggcgatggtgatgaggtgggcgtgagatgtcctggaggcgtccctcctttaagacccgctcctcccgaacgcgtcgtcgcggtagtgggcgcttctgcgtccagcgtctctataatggtcgcaaacgtgctgagactttttgctatccctcagatctcatatgcgtctactgcccctgagctgagcgacagcacaagatatgactttttcagtagagttgtgccacccgattcttaccaggcccaagctatggttgacatcgttagagcactggggtggaattatgtcagtacattggcaagcgaggggaattacggagagtccggcgtggaggcattcgtgcagataagcagggaggctggcggcgtgtgcattgcccagtcaattaaaatccccagggagccaaaacctggagaattctccaaggtgattcggcgactcatggagacacccaatgcgcgtggaattattattttcgccaatgaagacgatataaggcgagtgctggaagccgcccggcaggctaacctgacaggacatttcctctgggtgggaagcgatagctggggtgcgaaaacttcacctattctgtctctggaggacgttgctgtgggcgcaatcacgatactgccaaagcgcgcttcaatagatggttttgaccagtactttatgaccaggtcattggaaaacaataggcgcaatatttggttcgctgaattttgggaggagaactttaactgcaagctgacctcttcggggactcagtctgacgactccacccgtaagtgcaccggggaagaaagaataggccgcgatagcacttacgagcaggaggggaaggtgcagtttgttattgacgcagtctacgccatcgcccacgcccttcatagcatgcaccaagctctctgcccaggtcacacaggattatgtcctgcaatggagccaaccgacggacggatgttgctgcagtacatccgtgccgttcgctttaatggctccgctggtaccccagtcatgttcaatgaaaatggagacgcccctggtagatacgatatcttccagtatcaagctacaaatgggtctgcaagcagcgggggttatcaggccgtagggcagtgggctgagaccctaagactagacgtggaagctctgcagtggtcaggcgacccacacgaagtcccatccagcctgtgttcattgccctgcggacctggggagcgaaaaaaaatggtgaaaggcgtgccatgctgttggcactgcgaggcctgcgacggataccgcttccaggttgacgagtttacctgcgaggcctgtcccggtgacatgcgccccacacctaatcacaccgggtgcaggccaactcccgtcgttagattatcatggtcctcaccttgggccgcgcctcccttgctgttagcggtcctgggcatagtcgcgacaacaaccgtggtggcaacctttgttaggtataataatactcctatcgtcagagctagtgggagagaactttcatacgtgctgctaacaggcatcttcttgatttacgccatcacatttctcatggtggcagagccgggagctgccgtgtgcgctgctagacgtctgttcctaggactcggcacaactctgtcctactctgcccttctgactaagacaaaccggatttacaggatctttgaacagggtaagagatctgtgaccccaccccccttcatttcacctaccagccagctcgtgattactttttcgcttacctctctgcaggtggtgggtatgatcgcatggctcggtgcacgaccaccacattctgtgattgactatgaagaacaaaggactgtggaccctgagcaggcccgtggggtgctaaagtgtgacatgtccgatctgtccctcattggctgtctgggctactcccttttgctcatggtgacgtgcaccgtgtacgccatcaaggcccggggagttcccgagacattcaatgaggcgaagccgataggctttaccatgtacacaacatgcatcatctggctggcgtttgtaccaatcttcttcggaacagctcagtccgccgagaagatctacatacagaccactacattgacagtaagcctctcactgagtgcatcggtctccctcggcatgttatacgtgcctaagacatacgtcatactattccaccctgaacagaacgtccagaaaagaaagcgatcattgaaggccacatctactgtcgccgcacctccaaagggtgaggatgctgaggcccataaatag

SEQ ID NO: 16497 - DNA, 2634 bp, Artificial Sequence
  derived and/or modified sequence
atggctcgacctcgtcgggctcgggaaccactcctagttgcactgcttcctctggcttggttagctcaagcaggccttgcccgagcggctgggtccgtccgcctagccggtgggttaactttaggaggtctgttccccgtgcatgctcgcggtgccgcaggccgagcttgcggccaacttaaaaaagagcagggagtgcaccggttagaagccatgctgtatgcactcgaccgggttaacgcagacccggaactgctgcctggtgtgcgacttggggcacgcttgctggatacatgtagtcgggacacttatgccctagaacaggccttgtcttttgtgcaggctctgattcgtggccgtggtgacggggacgaggtgggcgtccggtgcccaggaggggttccgccactgcgcccagccccaccggaacgagtcgtggcagttgtgggcgctagtgcaagctctgtaagtattatggtggccaacgtcctgcggcttttcgccatccctcagattagctacgcctccactgcccctgaactctccgatagcactcgatatgatttcttcagtagagtggttcctcccgatagctatcaggcccaggctatggtcgatatcgtcagagcactcggttggaactacgttagcacactggcctccgaaggtaactatggcgagtccggggtggaggcctttgtacaaataagccgtgaggcgggaggagtctgtatcgcccaaagcattaaaatccccagggagcccaagccaggggagttctccaaggttattaggcgcctgatggaaacgccgaacgccagaggcatcatcatcttcgccaacgaggacgatattcgccgagtcctggaggccgcaagacaggcgaatttaaccgggcacttcctctgggtggggtccgatagctggggcgctaagacgagtcctatcctgtcacttgaggacgtagccgtgggggctattacaatcctccccaagagagcctctatcgacggctttgaccaatactttatgacaagatcattagaaaacaaccgacggaatatctggttcgccgagttttgggaagagaatttcaattgtaagctgacgagctcggggactcagtctgatgacagtacaagaaaatgcactggtgaggaaagaatcgggagggattcgacgtacgagcaggagggcaaagtccaattcgtaattgatgccgtgtacgccattgcacacgcactccactcaatgcatcaggctctgtgcccgggacatacagggttgtgcccggctatggaaccaacagatggacggatgctgctgcagtatatcagggccgtaaggttcaatggctctgccggtacacccgtgatgtttaatgagaatggggacgcccctggccgttatgatattttccagtaccaggcaacaaacgggtcggccagcagcggaggatatcaggccgtggggcagtgggcagagaccctccgcctggatgtcgaagccttgcagtggtccggagaccctcacgaagttcccagcagtctatgctccctcccatgcggtcccggtgaacgcaaaaaaatggtaaagggagtcccttgttgttggcattgcgaagcatgcgatggctataggttccaggtggatgagttcacgtgcgaagcttgcccaggagatatgaggccaacaccaaatcataccgggtgccggccaaccccggtggtccgcctctcatggagcagtccatgggccgctccccctttactgctggcagtcctggggatcgttgcaaccaccaccgtggtggctacctttgtacggtacaacaacaccccgatcgtgcgtgctagcggcagggagctttcctacgtcctgttgacaggcattttccttatctacgcaatcacgttccttatggtggccgagcctggtgccgcagtttgcgcagccaggcgcctgtttttgggactgggtactacgctgagctatagcgctctcctgaccaagactaaccggatttaccgcatctttgagcaaggaaagcgatccgtgacccctccccctttcatttctccaacttcccagctagtcatcactttctccctgacatctctgcaggttgttggcatgatcgcttggctgggtgcgaggccccctcactctgtaatcgattacgaggagcagagaaccgtggaccccgagcaggctagaggggtgctcaaatgcgacatgagtgacctgtctttaattggttgtctggggtactcattgctcctgatggtgacctgtacagtgtacgctatcaaagcccgaggggtaccggagacttttaacgaagcgaagcctatcggttttacaatgtacacgacttgcattatctggctcgcttttgtccccatcttttttgggactgcacagtctgcggaaaagatttatatccagactacaacgctgacagtgtctctctcgctttccgctagcgtcagtctcggtatgctttacgtgccgaagacatacgttatactctttcatccagaacaaaacgttcagaaacgaaaacgtagcctcaaagctaccagtactgtcgcagcccctcctaaaggagaagatgccgaagcacacaagtag

SEQ ID NO: 16498 - DNA, 2634 bp, Artificial Sequence
  derived and/or modified sequence
atggccagacccagaagagccagagagcccctgctggtggccctgctgcccctggcctggctggcccaggccggcctggccagagccgccggcagcgtgagactggccggcggcctgaccctgggcggcctgttccccgtgcacgccagaggcgccgccggcagagcctgcggccagctgaagaaggagcagggcgtgcacagactggaggccatgctgtacgccctggacagagtgaacgccgaccccgagctgctgcccggcgtgagactgggcgccagactgctggacacctgcagcagagacacctacgccctggagcaggccctgagcttcgtgcaggccctgatcagaggcagaggcgacggcgacgaggtgggcgtgagatgccccggcggcgtgccccccctgagacccgccccccccgagagagtggtggccgtggtgggcgccagcgccagcagcgtgagcatcatggtggccaacgtgctgagactgttcgccatcccccagatcagctacgccagcaccgcccccgagctgagcgacagcaccagatacgacttcttcagcagagtggtgccccccgacagctaccaggcccaggccatggtggacatcgtgagagccctgggctggaactacgtgagcaccctggccagcgagggcaactacggcgagagcggcgtggaggccttcgtgcagatcagcagagaggccggcggcgtgtgcatcgcccagagcatcaagatccccagagagcccaagcccggcgagttcagcaaggtgatcagaagactgatggagacccccaacgccagaggcatcatcatcttcgccaacgaggacgacatcagaagagtgctggaggccgccagacaggccaacctgaccggccacttcctgtgggtgggcagcgacagctggggcgccaagaccagccccatcctgagcctggaggacgtggccgtgggcgccatcaccatcctgcccaagagagccagcatcgacggcttcgaccagtacttcatgaccagaagcctggagaacaacagaagaaacatctggttcgccgagttctgggaggagaacttcaactgcaagctgaccagcagcggcacccagagcgacgacagcaccagaaagtgcaccggcgaggagagaatcggcagagacagcacctacgagcaggagggcaaggtgcagttcgtgatcgacgccgtgtacgccatcgcccacgccctgcacagcatgcaccaggccctgtgccccggccacaccggcctgtgccccgccatggagcccaccgacggcagaatgctgctgcagtacatcagagccgtgagattcaacggcagcgccggcacccccgtgatgttcaacgagaacggcgacgcccccggcagatacgacatcttccagtaccaggccaccaacggcagcgccagcagcggcggctaccaggccgtgggccagtgggccgagaccctgagactggacgtggaggccctgcagtggagcggcgacccccacgaggtgcccagcagcctgtgcagcctgccctgcggccccggcgagagaaagaagatggtgaagggcgtgccctgctgctggcactgcgaggcctgcgacggctacagattccaggtggacgagttcacctgcgaggcctgccccggcgacatgagacccacccccaaccacaccggctgcagacccacccccgtggtgagactgagctggagcagcccctgggccgccccccccctgctgctggccgtgctgggcatcgtggccaccaccaccgtggtggccaccttcgtgagatacaacaacacccccatcgtgagagccagcggcagagagctgagctacgtgctgctgaccggcatcttcctgatctacgccatcaccttcctgatggtggccgagcccggcgccgccgtgtgcgccgccagaagactgttcctgggcctgggcaccaccctgagctacagcgccctgctgaccaagaccaacagaatctacagaatcttcgagcagggcaagagaagcgtgacccccccccccttcatcagccccaccagccagctggtgatcaccttcagcctgaccagcctgcaggtggtgggcatgatcgcctggctgggcgccagacccccccacagcgtgatcgactacgaggagcagagaaccgtggaccccgagcaggccagaggcgtgctgaagtgcgacatgagcgacctgagcctgatcggctgcctgggctacagcctgctgctgatggtgacctgcaccgtgtacgccatcaaggccagaggcgtgcccgagaccttcaacgaggccaagcccatcggcttcaccatgtacaccacctgcatcatctggctggccttcgtgcccatcttcttcggcaccgcccagagcgccgagaagatctacatccagaccaccaccctgaccgtgagcctgagcctgagcgccagcgtgagcctgggcatgctgtacgtgcccaagacctacgtgatcctgttccaccccgagcagaacgtgcagaagagaaagagaagcctgaaggccaccagcaccgtggccgccccccccaagggcgaggacgccgaggcccacaagtag

SEQ ID NO: 16499 - DNA, 3276 bp, Artificial Sequence
  derived and/or modified sequence
atgcagctggatggtcttcaagccctatgttggggcagcctttttaggacacagctcgtccctgtctacgtggccgtgctgccctccccccaaccctgcatacccccaacatgtaccgcgttcactgagttttctggcccactcgcaaagcaccactcctttcagccgtttcaagtggctgccccagcaggaccacgcagtccacctcagccattccatcttccgtctgtgagtcaggtgcatgccacccacttactgtgtcctgtgcgggtgctgggcccaccctaccccccttctctggagctgctcacctcaattcactcaccagcggtcctgccagctccacagatccctcagatctcctatgctagcacagctccagaactcagcgacagcactaggtacgactttttctcccgtgtagtgcctccggactcataccaggctcaggccatggttgacattgtcagggcgctgggctggaactatgtcagtacactggctagtgagggaaactacggtgaaagcggcgtggaggcctttgtgcaaatcagcagggaggctggggagctgggcgccccacggcaccagggggtttatatcgtgtgggcgcgcggcccacagctcggccagaagcaaaaagacgggggacctcggagcatgctaggaagaggttgccttgcaggcgcaccttgtggtagggacctgtttgtcctggatgattctgcactgccacaagcctggcgaagagtgcaggctagattacacccttgtcggcctttttcccagccaacccagtcaagcgctgcggtcgctcgctggagcataaagatcccgcgggaaccaaagcctggagaattcagcaaagttatacgcaggctcatggagactcctaatgcaagaggaattattatatttgcgaacgaggacgatatctcgcctgcaccaaccagaagagttctagaagcagcacgacaagctaacctgacgggccattttctgtgggttggatccgattcctggggtgctaagacaagtcccatacttagcttggaagatgttgctgtgggcgcgattaccattctccccaagcgggccagtatcgacggttttgatcagtattttatgactagatcactggaaaataacaggaggaatatttggtttgcagagttttgggaagagaactttaactgtaaactgacatcatccggaacccagtctgatgatagtacccgaaagtgcacaggagagagttgccccggctggactggagaggagaggattggaagagacagtacttatgaacaggagggcaaagttcagtttgtgatcgacgccgtttacgccattgcacatgccctgcacagcatgcaccaggcactgtgtcctggacataccgggctgtgtcctgcgatggagccgactgatggaagaatgctcctgcagtacatccgttgtcctctgcagtggttgaatcgtattcctctgtgtgaatggccgcgccgtgtacggcctttcttttgtcagtggacgctgggattattatctagctgtggatacgtaaacaatgctgccgtcaacgtggccgttcaggcctttctcgctacactcctctcgtctctgtcatcaatctatccgggagtcgaactcctgggtcacgtctttaatctcctgcgcaggctacacaccgtcttctgctcgggttgctcactgtttcctccaaccgtccacaaaggatctgctggtactccagtgatgttcaatgaaaatggagatgcccccggccgatacgacatattccagtaccaggctactaacgggtcagctagtagcggtggctaccaagccgtgggacagtgggccgaaacactcagacttgatgtgtctgtacaaaccgagccacaggtgggaatgggccccgggagtaggcgccagacaccccaacctgtgttctgcgctagccaggtcgaggcgttgcagtggtctggagatccacacgaggtaccgtcatctctgtgctctcttccctgtggaccaggagagcgaaaaaagatggtgaaaggggtcccttgttgttggcattgcgaagcctgcgatggataccgatttcaggtcgatgaatttacttgtgaggcctgtcctggcgacatgcgcccaaccccaaatcatacaggttgtcggccaactcccgttgtccgcttgtcatggtcatcaccctgggctgcccccccattgctgctggcggtgctggggatcgtcgccacaaccacggtcgtggcgacgttcgttagatacaacaatactccaattgtacgcgcgtctggccgggaattaagttatgtccttctgacaggcatttttctgatctatgcgatcacttttttgatggtagcagagcccggagctgccgtctgcgctgcgagacgtctgtttctgggcctgggtacgacactcagctactctgccctgttaacaaagactaacaggatttatagaatcttcgaacagggaaaacggtccgtcacaccgccccccttcattagccccacaagccagctggtgatcacattctctctgacctctctgcaaatcaatgctgttttccgagttactctgttttactttggctcccttcaatggcactatctgtcttccctgcaggctctgcccagtggcgatctctctgtgcagcacttgtccgccagcgtgagtctgggaatgctatatagtaagagtaaaacaccagtggatttagaagtcggcagcgagccatggggctatcttggggatggtgtcctgcaggccgaacattggggagagggacgcggcgattggccccacgttaaagtaatggtggtggtctaccaatccagcttggtttattatatgaagcaagctcaggcaggaagggtgaaaaccgaactgctgaaggtcgcccatcatcaggtcgccaaatcagtacccgaggaatcacagattgtggtcttgcacctcgttaccgctgggtatgttgacatggccattaggacaacccgcgcaagcttgcacctgatgccgctaaccttggtgcccggcgctgcagctgaggtcaacgagacccaagtggcagctcggctgggaccaggtagcacagttggaacttaccaggttgtcgttgtgctcatgcgtagcctgcagattgataagactacgaatcaattatccctcgaaacctgcttctccggcattcagggctttctggctagtgtgaattcactggtcatggataaatag

SEQ ID NO: 16500 - DNA, 2634 bp, Artificial Sequence
  derived and/or modified sequence
atggccagaccccgtcgggcccgagaacccttactggtggcccttctgcccttggcatggctggcccaggccggcctggctagagccgccggaagtgtgcgcctagctgggggtctgactctgggcggcctgtttcccgttcatgcccggggagcagctggccgcgcatgcggccagctcaagaaagagcaaggcgttcatcggctggaggccatgctatacgccctggacagagtcaatgctgatcccgagctgctgccaggcgtgaggctgggggcgcggctactagatacctgttctcgcgatacatatgccttggaacaggccctgagcttcgtgcaggctctgattaggggccgaggagatggcgatgaagtaggtgtgcgatgccccggcggtgtccccccgcttcgcccggcaccaccagagcgtgttgtggccgttgtgggagcatctgcctcatctgtgtccataatggtcgccaacgttctaagactgtttgccatccctcaaatctcgtatgctagcactgctccagagctgagcgattccacacggtacgatttcttttcccgagtcgtccctcctgactcatatcaggcccaggccatggtcgatattgtgcgcgcccttggatggaattatgtaagtactctggcctcagagggcaattacggagaaagtggagtagaagcctttgttcagattagcagggaggcaggcggcgtgtgcattgctcagtctattaagatccctagggaacctaagcctggtgagttcagcaaagttatacgccggctcatggagacccctaatgctagaggcattattatcttcgcaaatgaagacgacattaggcgcgttctggaggcagcccgccaggctaacctgacagggcatttcctttgggtcgggtccgatagctggggggccaaaaccagccctatcctttccttagaggatgtggccgtcggagccattaccattttacccaaacgggcttctattgacggatttgaccagtacttcatgacccgtagtctcgagaacaacaggcggaatatttggtttgctgagttttgggaagagaatttcaactgcaagttaacctcttcaggtacacaatcagacgacagcaccaggaagtgtaccggggaggaacggatcggcagagacagtacttacgagcaggagggcaaggtacagtttgtgatagatgctgtatatgcaatcgctcacgctctacattctatgcatcaagccctgtgtcctggtcacacaggcctttgcccagcaatggagcccaccgacggacgcatgttgctgcagtatatcagagccgttcggttcaacggaagcgcagggacccccgtaatgttcaacgaaaatggtgacgctcctggccgttatgacatcttccaatatcaggccacaaacggctctgcttcgagcgggggatatcaggccgtgggccagtgggctgagaccttgcgcctggacgtggaggctcttcagtggtcaggagacccacacgaggtgccctcttcactctgctccctgccatgtggtcctggcgaaagaaagaaaatggtcaaaggtgttccatgttgctggcactgcgaggcgtgtgacggttatcgcttccaagtcgacgagttcacatgcgaagcttgcccaggagacatgcgaccgacccccaaccatacgggctgtaggccgacacccgtggtgaggctatcgtggtcgtccccttgggctgctcctcccctgctcctggctgttctgggcatcgttgctactacaactgtagtggctaccttcgttagatataacaacacaccaatcgtgagggcaagtggcagggagctatcgtatgtcctactaaccggtatcttcctgatttacgccatcacctttttgatggtcgccgagcccggagccgcagtgtgtgcagctcgcaggttatttctgggtctggggacaacactctcttacagcgccttactgacaaagactaacagaatctaccggatctttgagcagggcaagcgatcagtcactccgcctcctttcatatctccaacgtctcagttggtgatcacattttcgctgactagcctccaagtcgtaggcatgattgcctggctgggggcaaggcctccacactccgtcatagactacgaggaacagagaacagttgacccggaacaggctagaggggtgcttaaatgcgacatgagcgacctgagcctaattggctgtctggggtactctctcttgctaatggtgacttgcacggtctacgctatcaaggcgcgcggcgtccccgaaactttcaacgaagccaaacccattgggttcaccatgtacacaacgtgcattatctggctggccttcgtccctatcttttttgggacagcccaatctgcggagaagatttatatccagacaacaactttgactgtgagtctctcattgtcagcttccgtctcactgggaatgctgtacgtgccaaagacatacgtcattctgttccaccctgagcagaatgtgcagaaacgaaaaagatcccttaaggccacatcgactgtggctgccccacccaagggagaagacgccgaagcccataaatag

SEQ ID NO: 16501 - DNA, 6143 bp, Artificial Sequence
  derived and/or modified sequence
cggaggcccgggcaggccggctgagctaactccccagagccgaagtggaaggcgcgccccgagcgccttctccccaggaccccggtgtccctccccgcgccccgagcccgcgctctccttcccccgccctcagagcgctccccgcccctctgtctccccgcagcccgctagacgagccgatggcgcggccccggagagcccgggagccgctgctcgtggcgctgctgccgctggcgtggctggcgcaggcgggcctggcgcgcgcggcgggctctgtgcgcctggcgggcggcctgacgctgggcggcctgttcccggtgcacgcgcggggcgcggcgggccgggcgtgcgggcagctgaagaaggagcagggcgtgcaccggctggaggccatgctgtacgcgctggaccgcgtcaacgccgaccccgagctgctgcccggcgtgcgcctgggcgcgcggctgctggacacctgctcgcgggacacctacgcgctggagcaggcgctgagcttcgtgcaggcgctgatccgcggccgcggcgacggcgacgaggtgggcgtgcgctgcccgggaggcgtccctccgctgcgccccgcgccccccgagcgcgtcgtggccgtcgtgggcgcctcggccagctccgtctccatcatggtcgccaacgtgctgcgcctgtttgcgataccccagatcagctatgcctccacagccccggagctcagcgactccacacgctatgacttcttctcccgggtggtgccacccgactcctaccaggcgcaggccatggtggacatcgtgagggcactgggatggaactatgtgtccacgctggcctccgagggcaactatggcgaaagtggggttgaggccttcgttcagatctcccgagaggctgggggggtctgtattgcccagtctatcaagattcccagggaaccaaagccaggagagttcagcaaggtgatcaggagactcatggagacgcccaacgcccggggcatcatcatctttgccaatgaggatgacatcaggcgggtcctggaggcagctcgccaggccaacctgaccggccacttcctgtgggtcggctcagacagctggggagccaagacctcacccatcttgagcctggaggacgtggccgttggggccatcaccatcctgcccaaaagggcctccatcgacggatttgaccagtacttcatgactcgatccctggagaacaaccgcaggaacatctggttcgccgagttctgggaagagaattttaactgcaaactgaccagctcaggtacccagtcagacgattccacccgcaaatgcacaggcgaggaacgcatcggccgggactccacctacgagcaggagggcaaggtgcagtttgtgattgatgcggtgtacgccattgcccacgccctccacagcatgcaccaggcgctctgccctgggcacacaggcctgtgcccggcgatggaacccactgatgggcggatgcttctgcagtacattcgagctgtccgcttcaatggcagcgcaggaacccctgtgatgttcaacgagaacggagatgcgcccgggcggtacgacatcttccagtaccaggcgaccaatggcagtgccagcagtggcgggtaccaggcagtgggccagtgggcagagaccctcagactggatgtggaggccctgcagtggtctggcgacccccacgaggtgccctcgtctctgtgcagcctgccctgcgggccgggggagcggaagaagatggtgaagggcgtcccctgctgttggcactgcgaggcctgtgacgggtaccgcttccaggtggacgagttcacatgcgaggcctgtcctggggacatgaggcccacgcccaaccacacgggctgccgccccacacctgtggtgcgcctgagctggtcctccccctgggcagccccgccgctcctcctggccgtgctgggcatcgtggccactaccacggtggtggccaccttcgtgcggtacaacaacacgcccatcgtccgggcctcgggccgagagctcagctacgtcctcctcaccggcatcttcctcatctacgccatcaccttcctcatggtggctgagcctggggccgcggtctgtgccgcccgcaggctcttcctgggcctgggcacgaccctcagctactctgccctgctcaccaagaccaaccgtatctaccgcatctttgagcagggcaagcgctcggtcacaccccctcccttcatcagccccacctcacagctggtcatcaccttcagcctcacctccctgcaggtggtggggatgatagcatggctgggggcccggcccccacacagcgtgattgactatgaggaacagcggacggtggaccccgagcaggccagaggggtgctcaagtgcgacatgtcggatctgtctctcatcggctgcctgggctacagcctcctgctcatggtcacgtgcacagtgtacgccatcaaggcccgtggcgtgcccgagaccttcaacgaggccaagcccatcggcttcaccatgtacaccacctgcatcatctggctggcattcgtgcccatcttctttggcactgcccagtcagctgaaaagatctacatccagacaaccacgctaaccgtgtccttgagcctgagtgcctcggtgtccctcggcatgctctacgtacccaaaacctacgtcatcctcttccatccagagcagaatgtgcagaagcgaaagcggagcctcaaggccacctccacggtggcagccccacccaagggcgaggatgcagaggcccacaagtagcagggcaggtgggaacgggactgcttgctgcctctcctttcttcctcttgcctcgaggtggaagctgtatagagcccgggtccacggtgaacagtcagtggcagggagtttgccaagaccatgctccgcgtcggtggggctggccttgagaaggaactggacccagctctaccccgattccagcatgtgagcttcatgcttcctcaccacagaccagactcgcttcccatggtgggaaacagccaccgagaaggttctagctctagaaagggactaaacttattctctcatccgaagtccaaagaggatgatgaagccctgggctttgcctggtttgcgggagatttcctcccctcagtcaacccccataacctggggattgggcagtgtggaagaacgtgtagaccccagaatgaaacatggggttggagtggaggaggagctgtctcagcaagaggagacctggggctgtgcatctggatggaggcactcaggcctgggtaggattcctctggcacggagggagagaccctgggtgagacccctgtgagcatgggaagggcctgcagtgggcgcgggagtgagctgaggaactggggtgcgcccccatgagattcccaatgccatgggctttcccccatccccccgggattgggcaaggtcagacttagagtacagctgttttcctcccctctgtgtactcccttaaatcaccccaaccttggccaggcatggtggctcacacctgtaatcccagcactttgggaggccgaggcaggtggatcacctgaggtccggagttcgagaccagcctggccaatgtggtgaaaccctgtctctactaaaaatacaaaaattagccaggtgtgatggtgggtgcctgtaatcccagttacttgggaggctgaggcaggagaatcgcttgaacctgggaggtggaggttgcagtgagctgtgattgtgccactgtactccagcctgggtgacagagcgagactctgtctcaaaaaaacaaaacaaaaaaacaccaaaaaaacccccaaacctgaagaaattcagatacacgtgtgtaatgttagtgatgtgagaacaaggagcaggggtgcatttgtgttgtgttcgggttggggatgggtttaggagctccaggttgggagcagtgacagagagtcatggccgtggtgagggtgaatcccaagtggatggctcaggacgggtatggaaacccttcattcctcataggtactgggaagtccatttgcaagctgagcgccaggcctggggaggaagaggcttgggctgcagatgcacgcacatttgtttttcactgatagtttttacaaaaagcttggtttaagttatggagttttatgtccctgggagtagaatttacatttgttaaattgaccactgtttaagatcagtatacattctctagtctgtgatgtctggagctagttttgagggtgaaccacactttatccaacatacaaactttcccatgcagcttctctggtgcgcagttggttttgaccgtgggactaggtgcttctgcaggttttaagtaattaacttaaaagcttctcctctgagaaacatttctgttgcgctactgactctccttctccacatttgttgtgttcctagggcttctctatagtgcacattaggacgtttcatttgttgctgaatgctttccagaattatttattccatagggtttctctcctgtgcagctctctcatgggtaatggggcgtgttttcttgccaaaggcggttccaccctcgtgattgtatagggctcttctcctgtatgaactctgagatcagtgagctctgatctccaagggaaagttttcctgcatttgctgttttctcatgtctctcccagtgtgaattctttggtgtgcagtgcgctctggcttctagctgaaaacttttccacagttttacattcatgtggttttctccactgtgaactctgtgattcagaatcagaagcagttcttagtagaggcatttctacactgattgcactgaggatttctccccagtgtgaagtttctggcatagagtcctggcttcccgcagacgactttcacactctgccatgttcatgcctgtgggcctctctggcaggaactctgatgcaccgcgaggcccatgtactcctgtggctttctcacattcggtctacttgcagggtatctccacagcatgcaccattctgggtacagggggacatcctctgttactgaagatgttgtcatatttagtaccttcacaaggtttctctccttccagaattttctgatgtacacaaataactgacttccacaagagggcttttccacactcggtgtgtgcatacagtttctgcctgtgatcatttctttatgttattattttattttttcgagatagggtcttgctcaatttcttaggctggagtgcagtggcacgatcatagctcactgaagtttcgacctgggctcaagcaatcctcccgcttcagcctcctgagtagctggtgcgcacgaccatacccagctaatgttttattttttgtagagacgaggtctcactatgttgcccaggctggtctcgaacttctgagctcgagcgatcctcctgcctccacctcccaaagtgttcggattacaaacgtgagccatcgcacctagcctctttgatcatttctgtggtgttcagtggaggttgacagctccctaaagattttcctgtttttttgcatgcatgggtttgaattctttgaggtccaatttatttggacccctgaataaagttttgtgggttttcttctatgtgtggaatttataaggcattcttccagtgtggtttctcttatgtcgagtgagagctgacctgcaccgaaggttttgtcccatttgttgcccttgaattatttgtatgaattatatgttccagtgaaaatggagttctgggttggaggcttattccatgtttacacaattaaaattgcagtgttcctctctgggatgagagctctaaagcagagtaagattacgttctgatgtaagctttaaccacctatttataaggtctcacctgtggtccactgtgttgagacttctacagaagagcttctgtatagtaaccattttcttaggctgtctcacttgtgtgaatcttctgacacatttattatagctttgtcccatttcttatcctttttgctctttagaaatttccctttaatttattacattcattgcttactgtaaagagtccaggtaactgactttattcagttacttcctgttcaataaatttaacttttcccaaaa

SEQ ID NO: 16502 - DNA, 3273 bp, Artificial Sequence
  derived and/or modified sequence
atgcagctggatgggctgcaggccctctgctgggggtccttgttcaggacacagcttgtaccagtatatgtggcggtcctgccctctccccagccctgcatacctcccacctgcacagcattcacggaattctcaggcccactcgcaaaacaccacagcttccagcctttccaggtggctgctccagctggccccaggtccccaccccaacccttccatctcccatctgtgtcccaggtccatgccacacaccttctgtgccccgtccgtgtcctgggccccccttaccctccctctcttgagttactgacctccatccacagcccagctgtccttcctgccccacagataccccagatcagctatgcctccacagccccggagctcagcgactccacacgctatgacttcttctcccgggtggtgccacccgactcctaccaggcgcaggccatggtggacatcgtgagggcactgggatggaactatgtgtccacgctggcctccgagggcaactatggcgaaagtggggttgaggccttcgttcagatctcccgagaggctggtgagctgggggctccgaggcaccaaggagtctacatagtgtgggcccggggccctcagttggggcagaagcagaaagatggggggcccaggtccatgctgggccgaggttgcctggctggtgctccatgtgggcgggacctctttgttttggacgactcagccctgcctcaggcttggcggagggtgcaggccagacttcacccctgcagacccttcagccagcctacacagtcctctgcagcggtggccaggtggtctatcaagattcccagggaaccaaagccaggagagttcagcaaggtgatcaggagactcatggagacgcccaacgcccggggcatcatcatctttgccaatgaggatgacatcagccctgctcctaccaggcgggtcctggaggcagctcgccaggccaacctgaccggccacttcctgtgggtcggctcagacagctggggagccaagacctcacccatcttgagcctggaggacgtggccgttggggccatcaccatcctgcccaaaagggcctccatcgacggatttgaccagtacttcatgactcgatccctggagaacaaccgcaggaacatctggttcgccgagttctgggaagagaattttaactgcaaactgaccagctcaggtacccagtcagacgattccacccgcaaatgcacaggtgagagctgcccagggtggacaggcgaggaacgcatcggccgggactccacctacgagcaggagggcaaggtgcagtttgtgattgatgcggtgtacgccattgcccacgccctccacagcatgcaccaggcgctctgccctgggcacacaggcctgtgcccggcgatggaacccactgatgggcggatgcttctgcagtacattcgatgtccgcttcaatggctgaatcgcatcccattgtgtgaatggccccgtcgtgttcgtccattcttctgtcagtggacgctcgggttgctttcatcttgtggctatgtgaataacgctgctgtgaacgtggctgtacaagcatttcttgccaccctgctttctagtctctcgagtatctacccgggagtggaactgctgggtcatgtgtttaatcttttgaggaggctccacactgttttctgcagcggctgcagccttttcccacccaccgtgcacaagggcagcgcaggaacccctgtgatgttcaacgagaacggagatgcgcccgggcggtacgacatcttccagtaccaggcgaccaatggcagtgccagcagtggcgggtaccaggcagtgggccagtgggcagagaccctcagactggatgtgagtgtgcagaccgagccccaggtgggcatgggcccaggatcccggaggcagacgccccagcctgtgttttgtgcgtcccaggtggaggccctgcagtggtctggcgacccccacgaggtgccctcgtctctgtgcagcctgccctgcgggccgggggagcggaagaagatggtgaagggcgtcccctgctgttggcactgcgaggcctgtgacgggtaccgcttccaggtggacgagttcacatgcgaggcctgtcctggggacatgaggcccacgcccaaccacacgggctgccgccccacacctgtggtgcgcctgagctggtcctccccctgggcagccccgccgctcctcctggccgtgctgggcatcgtggccactaccacggtggtggccaccttcgtgcggtacaacaacacgcccatcgtccgggcctcgggccgagagctcagctacgtcctcctcaccggcatcttcctcatctacgccatcaccttcctcatggtggctgagcctggggccgcggtctgtgccgcccgcaggctcttcctgggcctgggcacgaccctcagctactctgccctgctcaccaagaccaaccgtatctaccgcatctttgagcagggcaagcgctcggtcacaccccctcccttcatcagccccacctcacagctggtcatcaccttcagcctcacctccctgcagataaatgccgtttttagagtcactcttttctattttggttccttgcagtggcactatctcagctccctgcaagctctgccttccggagatctttctgtacaacacctgagtgcctcggtgtccctcggcatgctctactccaagagcaagacaccagtggatttggaggtggggagtgagccatggggatatctgggggatggggtcctgcaggcggagcactggggtgaggggcggggagactggcctcatgtgaaggtcatggtcgtggtgtaccagagcagtcttgtgtactacatgaagcaggcgcaggctggacgtgtgaagacagagctgctgaaggtggcacatcaccaggtggccaagtctgtccctgaagagtcccaaatcgtggtccttcatcttgtcacagctgggtatgtcgacatggccattaggactacaagagcaagcctgcacttaatgccgctgacgctagttcctggagccgcggctgaggtgaatgagactcaagtggctgcacgccttggtcctggctcaacggtaggcacataccaagtagtggtagttctcatgcgttcattacagatagacaaaaccaccaaccaactcagcttagaaacgtgcttctcagggattcaagggtttctcgccagtgtgaattctttggtgatggataag

SEQ ID NO: 16503 - DNA, 2673 bp, Artificial Sequence
  derived and/or modified sequence
tgaaccgacagcggctggcgcagcccgctagacgagccgatggcgcggccccggagagcccgggagccgctgctcgtggcgctgctgccgctggcgtggctggcgcaggcgggcctggcgcgcgcggcgggctctgtgcgcctggcgggcggcctgacgctgggcggcctgttcccggtgcacgcgcggggcgcggcgggccgggcgtgcgggcagctgaagaaggagcagggcgtgcaccggctggaggccatgctgtacgcgctggaccgcgtcaacgccgaccccgagctgctgcccggcgtgcgcctgggcgcgcggctgctggacacctgctcgcgggacacctacgcgctggagcaggcgctgagcttcgtgcaggcgctgatccgcggccgcggcgacggcgacgaggtgggcgtgcgctgcccgggaggcgtccctccgctgcgccccgcgccccccgagcgcgtcgtggccgtcgtgggcgcctcggccagctccgtctccatcatggtcgccaacgtgctgcgcctgtttgcgataccccagatcagctatgcctccacagccccggagctcagcgactccacacgctatgacttcttctcccgggtggtgccacccgactcctaccaggcgcaggccatggtggacatcgtgagggcactgggatggaactatgtgtccacgctggcctccgagggcaactatggcgaaagtggggttgaggccttcgttcagatctcccgagaggctgggggggtctgtattgcccagtctatcaagattcccagggaaccaaagccaggagagttcagcaaggtgatcaggagactcatggagacgcccaacgcccggggcatcatcatctttgccaatgaggatgacatcaggcgggtcctggaggcagctcgccaggccaacctgaccggccacttcctgtgggtcggctcagacagctggggagccaagacctcacccatcttgagcctggaggacgtggccgttggggccatcaccatcctgcccaaaagggcctccatcgacggatttgaccagtacttcatgactcgatccctggagaacaaccgcaggaacatctggttcgccgagttctgggaagagaattttaactgcaaactgaccagctcaggtacccagtcagacgattccacccgcaaatgcacaggcgaggaacgcatcggccgggactccacctacgagcaggagggcaaggtgcagtttgtgattgatgcggtgtacgccattgcccacgccctccacagcatgcaccaggcgctctgccctgggcacacaggcctgtgcccggcgatggaacccactgatgggcggatgcttctgcagtacattcgagctgtccgcttcaatggcagcgcaggaacccctgtgatgttcaacgagaacggagatgcgcccgggcggtacgacatcttccagtaccaggcgaccaatggcagtgccagcagtggcgggtaccaggcagtgggccagtgggcagagaccctcagactggatgtggaggccctgcagtggtctggcgacccccacgaggtgccctcgtctctgtgcagcctgccctgcgggccgggggagcggaagaagatggtgaagggcgtcccctgctgttggcactgcgaggcctgtgacgggtaccgcttccaggtggacgagttcacatgcgaggcctgtcctggggacatgaggcccacgcccaaccacacgggctgccgccccacacctgtggtgcgcctgagctggtcctccccctgggcagccccgccgctcctcctggccgtgctgggcatcgtggccactaccacggtggtggccaccttcgtgcggtacaacaacacgcccatcgtccgggcctcgggccgagagctcagctacgtcctcctcaccggcatcttcctcatctacgccatcaccttcctcatggtggctgagcctggggccgcggtctgtgccgcccgcaggctcttcctgggcctgggcacgaccctcagctactctgccctgctcaccaagaccaaccgtatctaccgcatctttgagcagggcaagcgctcggtcacaccccctcccttcatcagccccacctcacagctggtcatcaccttcagcctcacctccctgcaggtggtggggatgatagcatggctgggggcccggcccccacacagcgtgattgactatgaggaacagcggacggtggaccccgagcaggccagaggggtgctcaagtgcgacatgtcggatctgtctctcatcggctgcctgggctacagcctcctgctcatggtcacgtgcacagtgtacgccatcaaggcccgtggcgtgcccgagaccttcaacgaggccaagcccatcggcttcaccatgtacaccacctgcatcatctggctggcattcgtgcccatcttctttggcactgcccagtcagctgaaaagatctacatccagacaaccacgctaaccgtgtccttgagcctgagtgcctcggtgtccctcggcatgctctacgtacccaaaacctacgtcatcctcttccatccagagcagaatgtgcagaagcgaaagcggagcctcaaggccacctccacggtggcagccccacccaagggcgaggatgcagaggcccacaagtag

SEQ ID NO: 16504 - DNA, 3276 bp, Artificial Sequence
  derived and/or modified sequence
atgcagctggatggcctgcaggccctgtgctggggcagcctcttccgcacccagctggtgcctgtgtatgtggccgtgctgcccagcccccagccctgcatcccccccacctgcacagccttcacagagttcagcggccccctggccaagcaccacagcttccagcccttccaggtggccgccccagctggccccaggagccccccccagcccttccacctgcccagcgtgtcccaggtgcacgccacccacctgctgtgccctgtgcgggtgctgggccccccctacccacccagcctggagctgctgaccagcatccacagccctgctgtgctgcctgccccccagatcccccagatctcctatgccagcacagcccctgagctgagtgacagcaccaggtatgacttcttcagccgggtggtgcccccagacagctaccaggcccaggccatggtggacatcgtgcgggccctgggctggaactacgtgtccaccctggccagcgagggcaactatggagagagcggcgtggaggcctttgtgcagatcagccgggaggccggggagctgggcgcccccaggcaccagggcgtgtacatcgtgtgggcccggggcccccagctgggccagaagcagaaggatggcggccccaggtccatgctgggccggggctgcctggccggggccccctgtggccgggacctgtttgtgctggatgacagcgccctgccccaggcctggaggagagtgcaggcccggctgcacccctgccggcccttcagccagcccacccagagcagcgctgctgtggcccgctggagcatcaagatcccccgggagcccaagccaggagagttcagcaaggtgatccggcggctgatggagaccccaaatgcccggggcatcatcatctttgccaatgaagatgacatcagccctgcccccacccggcgggtgctggaggccgcccggcaggccaacctgaccggccacttcctgtgggtgggcagtgacagctggggcgccaagaccagccccatcctgagcctggaggatgtggccgtgggcgccatcaccatcctgcccaagagggccagcattgatggctttgaccagtacttcatgaccaggagcctggagaacaacagaagaaacatctggtttgctgagttctgggaggagaacttcaactgcaagctgaccagcagcggcacccagagtgatgacagcaccaggaagtgcaccggggagagctgccccggctggacaggagaggagagaattggccgggacagcacctatgagcaggagggcaaggtgcagtttgtgattgatgctgtgtatgccatcgcccacgccctgcacagcatgcaccaggccctgtgccccggccacacaggcctgtgcccagccatggagcccacagatggccgcatgctgctgcagtacatccgctgccccctgcagtggctgaaccgcatccccctgtgtgagtggccccggcgggtgcggcccttcttctgccagtggaccctgggcctgctgagcagctgtggctacgtgaacaatgctgctgtgaatgtggccgtgcaggccttcctggccaccctgctgagcagcctgagcagcatctacccaggagtggagctgctgggccacgtgttcaacctgctgcggcggctgcacacagtgttctgcagcggctgcagcctcttcccccccaccgtgcacaagggcagcgctggcacccctgtgatgtttaatgaaaatggagatgcccctggccgctatgacatcttccagtaccaggccaccaatggaagtgccagcagcggcggctaccaggccgtgggccagtgggccgagaccctgcggctggatgtgtctgtgcagacagagccccaggtgggcatgggccctggcagccggcggcagaccccccagcccgtcttctgtgccagccaggtggaggccctgcagtggagcggggacccccatgaggtgcccagcagcctgtgcagcctgccctgtggccctggagagaggaagaagatggtgaagggcgtgccctgctgctggcactgtgaggcctgtgatggctaccgcttccaggtggatgagttcacctgtgaggcctgccctggggacatgaggcccacccccaaccacacaggctgccggcccacccctgtggtgcggctgtcctggagcagcccctgggccgccccacccctgctgctggccgtgctgggcatcgtggccaccaccaccgtggtggccacctttgtgcgctacaacaacacccccatcgtgcgggccagcggccgggagctgtcctatgtgctgctgaccggcatcttcctgatctatgccatcaccttcctgatggtggccgagcctggagctgctgtgtgtgccgcccggcggctcttcctgggcctgggcaccaccctgagctacagcgccctgctgaccaagaccaaccgcatctaccgcatctttgagcagggcaagaggtctgtgaccccaccacccttcatcagccccaccagccagctggtgatcaccttcagcctgaccagcctgcagatcaatgctgtgttccgggtgaccctcttctacttcggcagcctgcagtggcactacctgagcagcctgcaggccctgcccagcggggacctgtctgtgcagcacctgagcgcctctgtgtccctgggcatgctgtacagcaagagcaagacccctgtggacctggaggtgggcagcgagccctggggctacctgggagatggagtgctgcaggccgagcactggggcgagggccgcggggactggccccacgtgaaggtgatggtggtggtgtaccagagcagcctggtgtactacatgaagcaggcccaggccggccgggtgaagacagagctgctgaaggtggcccaccaccaggtggccaagtctgtgcctgaggagagccagatcgtggtgctgcacctggtgacagctggctacgtggacatggccatccgcaccacccgggccagcctgcacctgatgcccctgaccctggtgcctggagctgctgctgaggtgaatgagacccaggtggccgcccggctgggccctggcagcacagtgggcacctaccaggtggtggtggtgctgatgaggagcctgcagattgacaagaccaccaaccagctgagcctggagacctgcttcagcggcatccagggcttcctggcctctgtgaacagcctggtgatggacaagtag

SEQ ID NO: 16505 - DNA, 3276 bp, Artificial Sequence
  derived and/or modified sequence
atgcagctggacggcctgcaggccctgtgctggggcagcctgttcaggacccagctggttcccgtatacgtcgcagttttacctagcccacagccctgcatcccccccacgtgtaccgctttcactgagttctcgggcccactggccaaacatcattcgttccaacctttccaagtggccgcccccgccggtccccgtagccctcctcaaccattccaccttccctcagtttcccaagttcatgccacacacctgctgtgcccggtgagagtgctcggacccccctatccacccagtctagaattgttgaccagcattcattcaccagctgttctaccagcccctcagattcctcagatttcatacgcctctacagcccctgagctctcagattctacacgatacgacttctttagccgtgtggtgccgcccgactcataccaggctcaggctatggtagatatcgttagggccctgggatggaattacgttagcacactggccagtgagggtaactacggagagtccggtgtggaagcatttgtacagatcagccgcgaggctggagagctgggggcacctaggcatcagggagtgtacatcgtgtgggcgcggggacctcagctcggtcagaagcagaaggacggtggaccaagaagcatgctgggaagaggttgtctggcgggagcaccgtgcggtcgggacctgtttgtattagatgattctgcccttcctcaagcttggcgccgcgtacaagcccgcctccacccatgtagacccttctcacaacccacacagagctcagccgccgtggccagatggagtataaagatcccccgggagccaaagcctggagaattctctaaggtgatcagaaggctgatggagaccccaaatgcccgcggtataatcatctttgccaacgaggatgacatcagccctgccccaacgcgccgtgtgcttgaggctgctaggcaggctaaccttaccggtcatttcctttgggtgggctccgattcatggggcgctaagaccagccctatcctgtccctcgaggacgtggccgtaggcgccataaccatcctgcccaagcgcgcttccatagatggtttcgaccagtactttatgacccgcagcctcgaaaacaacagacgaaacatatggttcgccgaattttgggaggaaaattttaattgcaagctaacttcatctgggactcagagcgacgactctactagaaagtgtacaggagagtcttgccctggatggaccggagaagagcgaataggccgtgactccacgtatgaacaagaagggaaggtgcagttcgtgatagacgccgtgtacgctatagcccatgctctgcactcgatgcaccaagctctgtgccccggccataccgggctctgtcctgccatggagcctaccgatggtcgaatgttattgcaatatatccgatgtcccctccagtggcttaatcggatcccattatgtgagtggccgcgtagggtgaggcccttcttctgtcaatggacgctcggcctgctgtctagctgtggttatgtgaacaacgctgccgtaaacgttgcggtgcaggccttcttggctacactgttaagcagcctgtcctctatctaccccggagtggagctgttgggccatgtgttcaacctgcttcggcgcctgcacacggtcttctgttccgggtgttccttgtttccaccaaccgttcacaaaggctccgccggtacccctgtaatgtttaatgagaatggagatgctcccggacgttacgatattttccagtatcaagccactaatgggagtgcatcctccggaggatatcaggccgttgggcagtgggccgagacactgcgtttggatgtttccgtgcagactgagcctcaagtcggtatgggacccgggtcgaggaggcagactccacagccggtcttttgtgccagccaggtagaggcattgcagtggagcggcgatcctcatgaagtgccgagctctttatgttcgctcccatgcggacccggggagagaaagaagatggtgaaaggggtgccctgctgttggcactgtgaagcctgcgacggatacaggttccaggttgacgaattcacgtgtgaggcttgtccaggcgatatgcgcccaacacccaaccatactggatgcagacccacaccagtcgttcggttatcttggagctctccgtgggccgccccaccactgctgctcgcagtcctgggaatcgtggccactacgacagtagtggctaccttcgttcggtacaacaatactccgatcgtcagagcttcaggcagagaattatcctacgtgcttctcaccggcatcttcctgatttacgctatcactttcctcatggtcgctgagccaggcgcagccgtgtgtgctgcccgccggctgttcctcggtctggggacaacactgtcctacagcgctcttctgaccaaaaccaaccgcatttacaggatattcgaacagggaaaacgttctgtaaccccccctccgtttatcagtcccaccagccaactggtgatcacattttcgcttacttcactgcaaatcaacgccgtgttccgtgtgacactcttctatttcggtagtttgcaatggcattacctgtcaagcttgcaagcactgccttcaggcgacctgtccgtgcagcacctttcagcctctgtatctctgggcatgctgtactccaaaagtaaaacacccgtcgacctcgaggtgggaagcgagccttgggggtacttgggcgacggcgtgctgcaggccgaacactggggagagggaagaggggactggccacatgtaaaggttatggtggtcgtgtatcagagctcactggtttactacatgaagcaggctcaggccggaagggtgaaaaccgaactcctgaaggtcgctcaccaccaggttgctaagtccgtacctgaagaaagccagattgtggtccttcatttggtgacagcaggttatgttgatatggccatccgaactaccagggcctcattacatcttatgcccttgactcttgtcccaggagccgccgccgaggtgaacgaaacccaagttgctgctcgcttaggcccggggtcaactgtcgggacctaccaggtggtggtggtactgatgagaagcttgcagatcgataaaacgaccaaccagctcagcctggagacttgcttttcaggcatccaggggttccttgccagtgtaaacagcctggtgatggataaatag

SEQ ID NO: 16506 - DNA, 2634 bp, Artificial Sequence
  derived and/or modified sequence
atggcccggccccggcgggcccgggagcccctgctggtggccctgttgccactggcctggctggctcaggccgggctggctagagcagccggcagtgtcagactcgcgggaggcctgaccctgggagggcttttcccggtgcacgctagaggcgcggccggccgggcctgtgggcagttgaagaaggaacagggtgtccatcggttagaggcaatgctgtatgcacttgaccgggtcaacgctgacccggaactcctgcctggggtccggctgggagccaggttgctggatacctgtagtagggatacctatgctctcgagcaagcacttagcttcgtgcaggcattaatccggggaaggggagacggagatgaagtgggcgtgcgctgtcctggtggagtccctcccctgaggccagcaccacccgagagagtggttgctgtcgttggtgcgtctgcttccagtgtgtctatcatggttgctaatgtactccgcctgttcgccattccccagatctcgtatgccagcacagcccctgaactcagcgactcaactaggtatgatttcttctcacgggtggtaccaccagactcttaccaggcccaagccatggtggatatcgtccgagctttgggttggaattacgtcagtactctggcctcggaggggaactatggcgagagcggtgtggaggcgtttgtccagatttctagggaagctgggggcgtttgcatcgctcagtcaatcaaaatacccagggagcctaaacccggcgagttcagtaaggtgattcgcagattaatggagacccctaacgcgcgcgggattatcatattcgccaatgaggacgacattcgcagggtgctcgaagccgcacgccaggcgaacctcacagggcactttttgtgggtagggtcagacagctggggagccaagacctctccaatccttagtctggaggacgttgctgttggcgcaatcaccatcttacccaagcgtgcctcgatagatgggttcgatcagtacttcatgactagaagtctggagaataataggcgtaacatttggttcgcagagttttgggaagaaaactttaattgtaaattgacaagctcaggaacacagagcgacgactcaacgaggaagtgcacgggggaggaaagaattggtcgagattcaacatatgagcaagaagggaaagtgcagttcgtgattgatgccgtgtacgccatagcgcacgctctccacagcatgcaccaggctctgtgcccaggacatacagggttgtgccccgcgatggagcccaccgatggccgtatgttgctgcagtacattagggcggtccgctttaatggtagcgcaggtacgcctgttatgtttaacgagaacggcgacgcccctggcagatatgacatcttccaataccaggctacaaacggttctgccagttctggaggctaccaggcggtggggcaatgggccgaaaccctgcgactggacgttgaggccctgcagtggtctggagatccccacgaggtgccttcctccttatgttcactaccctgcggacctggcgagcgcaaaaagatggttaagggagttccttgctgctggcactgcgaagcctgcgatggttacaggtttcaggtggatgagttcacttgtgaagcctgtcctggcgatatgagaccaacacccaatcacacaggctgccggccgacgcccgttgtgcggctgagctggtccagtccctgggccgcccctccgctcctcctagcagtgcttggcattgtggctacaactactgttgtcgccacttttgttcggtacaataataccccgatcgtgagggcctctggaagggaactgagctacgtactgctgaccggcatattcctgatttatgctatcacctttctgatggtggccgagcctggcgcggccgtgtgcgccgctcgtagattgttcctgggtctgggcaccacattatcatatagtgcactcctgaccaaaaccaaccgtatctatcgcatctttgagcagggcaagcgctccgtcactccgcctcctttcatatccccaacatcacaattggttattacctttagcctgacttcattgcaggtggtcggaatgatcgcatggttgggtgcacgccctccccactcagtgattgattacgaggagcaaaggactgttgatccagagcaggctcggggcgtcctgaaatgtgatatgtccgacctttcactgatcggctgtctgggatattctctgctgctcatggtgacctgcactgtctacgccattaaagctcgtggggttcccgagacgtttaatgaggccaagccaattggctttaccatgtatactacgtgcatcatttggctcgctttcgtaccaatttttttcggcactgctcagtcagcagaaaagatatacatacaaacaaccaccctcacagtgtccctctctctgtctgcctccgtttctctcgggatgttatacgtgcctaagacctacgtaatcctcttccatcccgaacagaatgtacagaagcgaaagaggtcgctgaaggcgacttccaccgtggcagccccaccaaaaggcgaggatgccgaggcccataagtag

SEQ ID NO: 16507 - DNA, 3276 bp, Artificial Sequence
  derived and/or modified sequence
atgcagcttgatggactgcaagcgctttgttggggctcactgttcaggacgcagctggttccagtgtacgtggctgtgctgccttctcctcaaccttgtattccgccaacctgcacggcgttcaccgagttctctggcccactcgctaagcaccattcgtttcagccttttcaagtcgctgctcccgcagggcctcgttcccctccacagccattccacctgccctctgtctctcaggtgcatgcgacccacctgctatgtcccgtgagagtgctcggaccaccatatccgccttcactggagctgctgacatcaattcatagccccgctgtcctaccagcaccccagatcccccagattagctacgcaagcacagcacccgaactaagcgacagcaccaggtatgatttcttttcacgagttgtgccacccgatagctaccaagctcaggctatggtggatattgtgagggccctaggctggaactatgtgagcaccctagcatccgagggcaactatggcgaaagtggagtggaagccttcgtccagatcagcagagaagcaggggaactcggtgcccctcgccatcaaggtgtgtacatcgtgtgggctagaggcccacagctgggtcaaaagcagaaggacgggggaccgagaagcatgcttggccgtggttgcctggctggcgcaccttgtggccgtgacctgttcgttcttgacgattcagccctgcctcaggcctggcgacgggtgcaggctcggctccacccctgccgcccttttagccagcctactcagagttccgccgcagtggctaggtggtccattaagatacctcgggagccaaaacctggcgagtttagtaaggttatccggcgattgatggaaacccccaacgcgaggggcattatcatttttgcaaacgaagatgacattagtccagcccctactaggcgtgtgttggaagctgccagacaagccaatcttaccgggcactttctttgggtggggtccgacagttggggtgcgaaaacatcccctatcttatcccttgaggacgtggccgtgggggcaataaccatcttgcccaagagggccagcatcgatggatttgatcagtactttatgacccgcagcttggagaacaaccgtcggaacatttggttcgctgagttttgggaggagaactttaattgtaaactcacctcaagcggcacccagagcgacgactccacacgcaagtgtactggagagagctgcccaggctggacgggcgaggagcgcattggaagggacagcacatatgagcaagagggcaaggtgcaattcgtcattgacgccgtctacgctatcgcccatgccctgcatagtatgcatcaggcgctgtgtccaggccacactgggctctgccccgctatggagcccacagatggtaggatgctactccaatatattagatgtcccttacagtggttgaataggataccattgtgtgaatggccaaggagggtccggcctttcttctgccagtggacacttgggttactctcttcttgcggctatgtgaataacgccgctgtaaatgtggctgtccaggcgttcctggctacactgctgtcgagtctgtcttccatctatccaggggtcgagctgctcgggcatgtcttcaatctgttgcgcagactgcataccgtgttttgttccggctgttccttattccccccaacggtgcataagggcagtgccggaacacctgtgatgttcaatgagaacggggacgcacccggaagatacgacatattccagtaccaagccaccaatggttccgcgtcgagcggtggttaccaagcagtcggccaatgggccgaaacactgcgacttgacgtcagtgtgcaaactgaaccccaggttggcatgggccctggatcgcgtaggcaaacaccacaacccgtgttctgtgcctctcaggtggaagcgctgcagtggtccggggatccacacgaagtgccgtccagcctttgtagcctcccttgcggcccaggagaaagaaagaagatggtgaagggagtgccgtgctgctggcattgtgaggcgtgcgacggctacagattccaggtcgacgagttcacttgtgaagcgtgccccggtgacatgagacccacgccaaatcacacaggatgtagaccaactcctgtcgtccgtctaagttggtcttccccctgggccgcaccacccttgctgctagctgtgttgggcattgtagccaccaccaccgtggttgcaaccttcgtaaggtacaacaacactcctatcgtcagggcctccggccgagagctctcgtacgtgctcctgactggaatcttcctgatatacgccattacgttcctgatggtggcagaaccaggcgctgccgtgtgcgccgctagacgcctgttcttaggcctgggcaccactctgagctacagtgctttactcacaaagactaatcggatctatcgaattttcgaacaagggaagcgttcagtcacgccacctccctttatctccccgacgagccagctcgttatcacgtttagcctgacatctttacagataaacgccgtattcagagtgaccctgttttacttcggctcccttcaatggcactacctctcctccctccaggcactgccaagtggcgacctcagcgtgcagcatctgtctgcctcagtgtcactcgggatgttatatagtaagtcaaaaacccctgtggatctggaggtcggctccgagccatggggttacctaggcgatggtgttcttcaggccgagcattggggtgaaggaaggggcgattggccccacgtgaaggtcatggtcgtagtgtaccagtctagcctggtgtattatatgaagcaggcccaagccggtagggtgaagacagagctgttaaaagtagctcaccatcaggtcgccaagtcagtccccgaagagtctcagatcgtggtgctgcatttggtgaccgcaggctatgtggacatggccatccgcacaaccagggcctccctgcatttgatgcccctaactctcgtacctggtgctgcagccgaagttaatgaaactcaggttgcggcacgtcttggtcctggctccactgtgggaacctaccaggtcgtcgttgtcctaatgaggtcattacagatagataagaccaccaatcaattgtctcttgaaacctgttttagcgggattcaaggcttcctcgccagcgtaaacagcctcgtgatggataagtag

SEQ ID NO: 16508 - DNA, 2634 bp, Artificial Sequence
  derived and/or modified sequence
atggcacgcccacggcgagccagggagccacttctcgtcgccctcttacccctggcctggctggcccaggcaggactagccagggcagccggatctgtgcgcctggctggagggttgaccttgggcggtctgtttcccgtacatgcccgaggcgctgccggacgcgcatgcgggcaactcaaaaaagaacagggcgtccaccgcctggaggcaatgttgtacgctcttgaccgggtcaacgccgatccggagctgctccccggagtgaggctgggggctcgcctgctggacacctgctcccgggatacttacgccctggaacaagccctaagttttgtgcaggcccttatcagaggccgaggtgacggcgatgaagtcggcgtgcgttgtcccggaggggtccctccccttcgaccagcccctccagaaagggtggtcgccgtggtgggagcttccgcatcctccgtatctataatggtggctaacgtgctccgcctgtttgctatcccgcaaatttcttacgcaagcacagccccagaattgtcagatagtacccggtacgacttttttagccgagtggtccccccagactcctaccaggctcaggccatggttgacatagtgcgggcactgggctggaattacgtgtccacacttgcgtccgaaggaaactatggagaaagcggagtagaggccttcgtccaaatctccagagaggcaggaggggtgtgtattgcccaatccatcaaaattccgagagaacccaaacccggtgagtttagcaaggtgatacggagactgatggaaacccccaacgccaggggcattatcattttcgccaatgaggatgacattaggcgagtccttgaagctgccagacaggcgaacctgactggccacttcctatgggttggctccgactcgtggggggctaaaaccagccccatccttagtctggaggatgtggccgtaggagcaatcacgatactccctaagagggcaagcatcgatggtttcgaccagtacttcatgactcgcagcctggagaataatagaagaaatatctggtttgccgaattttgggaggaaaattttaattgcaagctgaccagctcagggacgcaatctgacgatagcacgagaaagtgtaccggcgaagaacggattggcagggattcaacatatgaacaagaaggtaaggtgcagttcgtgattgatgcagtgtacgccattgcacacgctctgcactccatgcaccaggcgctctgcccagggcatacaggactgtgcccagcgatggagcctacagatggacgaatgctcttacaatatataagggccgtgaggtttaatggcagtgctgggacgccagttatgttcaatgagaacggtgatgcgccaggacgatacgacatatttcaatatcaggctacgaacggatccgctagctctggaggctatcaggccgtgggtcagtgggcggagacccttcgtctggacgtcgaagctttgcagtggagcggtgacccccatgaagttccgagcagtttatgcagcctgccatgcggcccaggggagagaaaaaaaatggtgaagggagtcccgtgttgctggcactgcgaagcctgcgacggatataggtttcaggtcgatgaatttacctgtgaggcctgtcccggagatatgcgacccacccctaaccatacgggttgtaggccaacacccgtggtcaggttgtcttggagttcgccctgggctgcccctcctctacttttggctgtcttgggcattgttgctacgacaaccgtggtagccacatttgtaaggtacaataatactcccattgtcagagcttcaggcagagaactctcttacgttctgctcacaggtatctttcttatttacgcaattacttttttgatggtggccgaaccgggtgccgctgtctgcgccgcacgcagactttttctagggcttgggacaacgttgtcctatagcgcactactgacgaaaacaaatcgcatctaccgcatttttgaacagggcaagcgtagcgtgacgcccccacccttcatcagccccactagtcagttagttataactttttctttaaccagcttgcaggttgttggaatgatcgcgtggctcggcgctcgacccccacacagcgtgattgactatgaagaacagaggacggttgaccccgagcaagccaggggagtgctcaagtgcgacatgtcagatctgtcactgatcggctgtcttggctactccctgttattaatggtgacgtgcactgtctatgctattaaagcgcgtggtgttcccgaaacgttcaatgaggcaaagccaattggcttcacgatgtacaccacctgcatcatttggttggcattcgtgcctattttcttcggcaccgctcaatcagccgaaaaaatatatattcagactacaacgctgaccgttagccttagcttgtcagccagtgtcagtctgggcatgctatatgtcccgaagacttatgtgatcctcttccatccagagcagaatgtgcagaagagaaaacgcagtctgaaagctacctcaactgtcgcggcacctcctaagggcgaagacgccgaagcacataaatag

SEQ ID NO: 16509 - DNA, 3276 bp, Artificial Sequence
  derived and/or modified sequence
atgcagctggacggcctgcaggccctgtgctggggcagcctgttcagaacccagctggtgcccgtgtacgtggccgtgctgcccagcccccagccctgcatcccccccacctgcaccgccttcaccgagttcagcggccccctggccaagcaccacagcttccagcccttccaggtggccgcccccgccggccccagaagccccccccagcccttccacctgcccagcgtgagccaggtgcacgccacccacctgctgtgccccgtgagagtgctgggccccccctacccccccagcctggagctgctgaccagcatccacagccccgccgtgctgcccgccccccagatcccccagatcagctacgccagcaccgcccccgagctgagcgacagcaccagatacgacttcttcagcagagtggtgccccccgacagctaccaggcccaggccatggtggacatcgtgagagccctgggctggaactacgtgagcaccctggccagcgagggcaactacggcgagagcggcgtggaggccttcgtgcagatcagcagagaggccggcgagctgggcgcccccagacaccagggcgtgtacatcgtgtgggccagaggcccccagctgggccagaagcagaaggacggcggccccagaagcatgctgggcagaggctgcctggccggcgccccctgcggcagagacctgttcgtgctggacgacagcgccctgccccaggcctggagaagagtgcaggccagactgcacccctgcagacccttcagccagcccacccagagcagcgccgccgtggccagatggagcatcaagatccccagagagcccaagcccggcgagttcagcaaggtgatcagaagactgatggagacccccaacgccagaggcatcatcatcttcgccaacgaggacgacatcagccccgcccccaccagaagagtgctggaggccgccagacaggccaacctgaccggccacttcctgtgggtgggcagcgacagctggggcgccaagaccagccccatcctgagcctggaggacgtggccgtgggcgccatcaccatcctgcccaagagagccagcatcgacggcttcgaccagtacttcatgaccagaagcctggagaacaacagaagaaacatctggttcgccgagttctgggaggagaacttcaactgcaagctgaccagcagcggcacccagagcgacgacagcaccagaaagtgcaccggcgagagctgccccggctggaccggcgaggagagaatcggcagagacagcacctacgagcaggagggcaaggtgcagttcgtgatcgacgccgtgtacgccatcgcccacgccctgcacagcatgcaccaggccctgtgccccggccacaccggcctgtgccccgccatggagcccaccgacggcagaatgctgctgcagtacatcagatgccccctgcagtggctgaacagaatccccctgtgcgagtggcccagaagagtgagacccttcttctgccagtggaccctgggcctgctgagcagctgcggctacgtgaacaacgccgccgtgaacgtggccgtgcaggccttcctggccaccctgctgagcagcctgagcagcatctaccccggcgtggagctgctgggccacgtgttcaacctgctgagaagactgcacaccgtgttctgcagcggctgcagcctgttcccccccaccgtgcacaagggcagcgccggcacccccgtgatgttcaacgagaacggcgacgcccccggcagatacgacatcttccagtaccaggccaccaacggcagcgccagcagcggcggctaccaggccgtgggccagtgggccgagaccctgagactggacgtgagcgtgcagaccgagccccaggtgggcatgggccccggcagcagaagacagaccccccagcccgtgttctgcgccagccaggtggaggccctgcagtggagcggcgacccccacgaggtgcccagcagcctgtgcagcctgccctgcggccccggcgagagaaagaagatggtgaagggcgtgccctgctgctggcactgcgaggcctgcgacggctacagattccaggtggacgagttcacctgcgaggcctgccccggcgacatgagacccacccccaaccacaccggctgcagacccacccccgtggtgagactgagctggagcagcccctgggccgccccccccctgctgctggccgtgctgggcatcgtggccaccaccaccgtggtggccaccttcgtgagatacaacaacacccccatcgtgagagccagcggcagagagctgagctacgtgctgctgaccggcatcttcctgatctacgccatcaccttcctgatggtggccgagcccggcgccgccgtgtgcgccgccagaagactgttcctgggcctgggcaccaccctgagctacagcgccctgctgaccaagaccaacagaatctacagaatcttcgagcagggcaagagaagcgtgacccccccccccttcatcagccccaccagccagctggtgatcaccttcagcctgaccagcctgcagatcaacgccgtgttcagagtgaccctgttctacttcggcagcctgcagtggcactacctgagcagcctgcaggccctgcccagcggcgacctgagcgtgcagcacctgagcgccagcgtgagcctgggcatgctgtacagcaagagcaagacccccgtggacctggaggtgggcagcgagccctggggctacctgggcgacggcgtgctgcaggccgagcactggggcgagggcagaggcgactggccccacgtgaaggtgatggtggtggtgtaccagagcagcctggtgtactacatgaagcaggcccaggccggcagagtgaagaccgagctgctgaaggtggcccaccaccaggtggccaagagcgtgcccgaggagagccagatcgtggtgctgcacctggtgaccgccggctacgtggacatggccatcagaaccaccagagccagcctgcacctgatgcccctgaccctggtgcccggcgccgccgccgaggtgaacgagacccaggtggccgccagactgggccccggcagcaccgtgggcacctaccaggtggtggtggtgctgatgagaagcctgcagatcgacaagaccaccaaccagctgagcctggagacctgcttcagcggcatccagggcttcctggccagcgtgaacagcctggtgatggacaagtag

SEQ ID NO: 16510 - protein, 915 aa, Artificial Sequence
  derived and/or modified sequence
MVQLRKLLRVLTLMKFPCCVLEVLLCALAAAARGQEMYAPHSIRIEGDVTLGGLFPVHAKGPSGVPCGDIKRENGIHRLEAMLYALDQINSDPNLLPNVTLGARILDTCSRDTYALEQSLTFVQALIQKDTSDVRCTNGEPPVFVKPEKVVGVIGASGSSVSIMVANILRLFQIPQISYASTAPELSDDRRYDFFSRVVPPDSFQAQAMVDIVKALGWNYVSTLASEGSYGEKGVESFTQISKEAGGLCIAQSVRIPQERKDRTIDFDRIIKQLLDTPNSRAVVIFANDEDIKQILAAAKRADQVGHFLWVGSDSWGSKINPLHQHEDIAEGAITIQPKRATVEGFDAYFTSRTLENNRRNVWFAEYWEENFNCKLTISGSKKEDTDRKCTGQERIGKDSNYEQEGKVQFVIDAVYAMAHALHHMNKDLCADYRGVCPEMEQAGGKKLLKYIRNVNFNGSAGTPVMFNKNGDAPGRYDIFQYQTTNTSNPGYRLIGQWTDELQLNIEDMQWGKGVREIPASVCTLPCKPGQRKKTQKGTPCCWTCEPCDGYQYQFDEMTCQHCPYDQRPNENRTGCQDIPIIKLEWHSPWAVIPVFLAMLGIIATIFVMATFIRYNDTPIVRASGRELSYVLLTGIFLCYIITFLMIAKPDVAVCSFRRVFLGLGMCISYAALLTKTNRIYRIFEQGKKSVTAPRLISPTSQLAITSSLISVQLLGVFIWFGVDPPNIIIDYDEHKTMNPEQARGVLKCDITDLQIICSLGYSILLMVTCTVYAIKTRGVPENFNEAKPIGFTMYTTCIVWLAFIPIFFGTAQSAEKLYIQTTTLTISMNLSASVALGMLYMPKVYIIIFHPELNVQKRKRSFKAVVTAATMSSRLSHKPSDRPNGEAKTELCENVDPNSPAAKKKYVSYNNLVI

SEQ ID NO: 16511 - protein, 906 aa, Artificial Sequence
  derived and/or modified sequence
MVQLRKLLRVLTLMKFPCCVLEVLLCALAAAARGQEMYAPHSIRIEGDVTLGGLFPVHAKGPSGVPCGDIKRENGIHRLEAMLYALDQINSDPNLLPNVTLGARILDTCSRDTYALEQSLTFVQALIQKDTSDVRCTNGEPPVFVKPEKVVGVIGASGSSVSIMVANILRLFQIPQISYASTAPELSDDRRYDFFSRVVPPDSFQAQAMVDIVKALGWNYVSTLASEGSYGEKGVESFTQISKEAGGLCIAQSVRIPQERKDRTIDFDRIIKQLLDTPNSRAVVIFANDEDIKQILAAAKRADQVGHFLWVGSDSWGSKINPLHQHEDIAEGAITIQPKRATVEGFDAYFTSRTLENNRRNVWFAEYWEENFNCKLTISGSKKEDTDRKCTGQERIGKDSNYEQEGKVQFVIDAVYAMAHALHHMNKDLCADYRGVCPEMEQAGGKKLLKYIRNVNFNGSAGTPVMFNKNGDAPGRYDIFQYQTTNTSNPGYRLIGQWTDELQLNIEDMQWGKGVREIPASVCTLPCKPGQRKKTQKGTPCCWTCEPCDGYQYQFDEMTCQHCPYDQRPNENRTGCQDIPIIKLEWHSPWAVIPVFLAMLGIIATIFVMATFIRYNDTPIVRASGRELSYVLLTGIFLCYIITFLMIAKPDVAVCSFRRVFLGLGMCISYAALLTKTNRIYRIFEQGKKSVTAPRLISPTSQLAITSSLISVQLLGVFIWFGVDPPNIIIDYDEHKTMNPEQARGVLKCDITDLQIICSLGYSILLMVTCTVYAIKTRGVPENFNEAKPIGFTMYTTCIVWLAFIPIFFGTAQSAEKLYIQTTTLTISMNLSASVALGMLYMPKVYIIIFHPELNVQKRKRSFKAVVTAATMSSRLSHKPSDRPNGEAKTELCENVDPNSEKCNCY

SEQ ID NO: 16512 - protein, 911 aa, Artificial Sequence
  derived and/or modified sequence
MVQLRKLLRVLTLMKFPCCVLEVLLCALAAAARGQEMYAPHSIRIEGDVTLGGLFPVHAKGPSGVPCGDIKRENGIHRLEAMLYALDQINSDPNLLPNVTLGARILDTCSRDTYALEQSLTFVQALIQKDTSDVRCTNGEPPVFVKPEKVVGVIGASGSSVSIMVANILRLFQIPQISYASTAPELSDDRRYDFFSRVVPPDSFQAQAMVDIVKALGWNYVSTLASEGSYGEKGVESFTQISKEAGGLCIAQSVRIPQERKDRTIDFDRIIKQLLDTPNSRAVVIFANDEDIKQILAAAKRADQVGHFLWVGSDSWGSKINPLHQHEDIAEGAITIQPKRATVEGFDAYFTSRTLENNRRNVWFAEYWEENFNCKLTISGSKKEDTDRKCTGQERIGKDSNYEQEGKVQFVIDAVYAMAHALHHMNKDLCADYRGVCPEMEQAGGKKLLKYIRNVNFNGSAGTPVMFNKNGDAPGRYDIFQYQTTNTSNPGYRLIGQWTDELQLNIEDMQWGKGVREIPASVCTLPCKPGQRKKTQKGTPCCWTCEPCDGYQYQFDEMTCQHCPYDQRPNENRTGCQDIPIIKLEWHSPWAVIPVFLAMLGIIATIFVMATFIRYNDTPIVRASGRELSYVLLTGIFLCYIITFLMIAKPDVAVCSFRRVFLGLGMCISYAALLTKTNRIYRIFEQGKKSVTAPRLISPTSQLAITSSLISVQLLGVFIWFGVDPPNIIIDYDEHKTMNPEQARGVLKCDITDLQIICSLGYSILLMVTCTVYAIKTRGVPENFNEAKPIGFTMYTTCIVWLAFIPIFFGTAQSAEKLYIQTTTLTISMNLSASVALGMLYMPKVYIIIFHPELNVQKRKRSFKAVVTAATMSSRLSHKPSDRPNGEAKTELCENVDPNITSEDLSLHKED

SEQ ID NO: 16513 - protein, 824 aa, Artificial Sequence
  derived and/or modified sequence
MVQLRKLLRVLTLMKFPCCVLEVLLCALAAAARGQEMYAPHSIRIEGDVTLGGLFPVHAKGPSGVPCGDIKRENGIHRLEAMLYALDQINSDPNLLPNVTLGARILDTCSRDTYALEQSLTFVQALIQKDTSDVRCTNGEPPVFVKPEKVVGVIGASGSSVSIMVANILRLFQIPQISYASTAPELSDDRRYDFFSRVVPPDSFQAQAMVDIVKALGWNYVSTLASEGSYGEKGVESFTQISKEAGGLCIAQSVRIPQERKDRTIDFDRIIKQLLDTPNSRAVVIFANDEDIKQILAAAKRADQVGHFLWVGSDSWGSKINPLHQHEDIAEGAITIQPKRATVEGFDAYFTSRTLENNRRNVWFAEYWEENFNCKLTISGSKKEDTDRKCTGQERIGKDSNYEQEGKVQFVIDAVYAMAHALHHMNKDLCADYRGVCPEMEQAGGKKLLKYIRNVNFNGDAGTPVMFNKNGDAPGRYDIFQYQTTNTSNPGYRLIGQWTDELQLNIEDMQWGKGVREIPASVCTLPCKPGQRKKTQKGTPCCWTCEPCDGYQYQFDEMTCQHCPYDQRPNENRTGCQDIPIIKLEWHSPWAVIPVFLAMLGIIATIFVMATFIRYNDTPIVRASGRELSYVLLTGIFLCYIITFLMIAKPDVAVCSFRRVFLGLGMCISYAALLTKTNRIYRIFEQGKKSVTAPRLISPTSQLAITSSLISVQLLGVFIWFGVDPPNIIIDYDEHKTMNPEQARGVLKCDITDLQIICSLGYSILLMVTCTVYAIKTRGVPENFNEAKPIGFTMYTTCIVWLAFIPIFFGTAQSAEKVILCCIS

SEQ ID NO: 16514 - protein, 924 aa, Artificial Sequence
  derived and/or modified sequence
MVQLRKLLRVLTLMKFPCCVLEVLLCALAAAARGQEMYAPHSIRIEGDVTLGGLFPVHAKGPSGVPCGDIKRENGIHRLEAMLYALDQINSDPNLLPNVTLGARILDTCSRDTYALEQSLTFVQALIQKDTSDVRCTNGEPPVFVKPEKVVGVIGASGSSVSIMVANILRLFQIPQISYASTAPELSDDRRYDFFSRVVPPDSFQAQAMVDIVKALGWNYVSTLASEGSYGEKGVESFTQISKEAGGLCIAQSVRIPQERKDRTIDFDRIIKQLLDTPNSRAVVIFANDEDIKQILAAAKRADQVGHFLWVGSDSWGSKINPLHQHEDIAEGAITIQPKRATVEGFDAYFTSRTLENNRRNVWFAEYWEENFNCKLTISGSKKEDTDRKCTGQERIGKDSNYEQEGKVQFVIDAVYAMAHALHHMNKDLCADYRGVCPEMEQAGGKKLLKYIRNVNFNGSAGTPVMFNKNGDAPGRYDIFQYQTTNTSNPGYRLIGQWTDELQLNIEDMQWGKGVREIPASVCTLPCKPGQRKKTQKGTPCCWTCEPCDGYQYQFDEMTCQHCPYDQRPNENRTGCQDIPIIKLEWHSPWAVIPVFLAMLGIIATIFVMATFIRYNDTPIVRASGRELSYVLLTGIFLCYIITFLMIAKPDVAVCSFRRVFLGLGMCISYAALLTKTNRIYRIFEQGKKSVTAPRLISPTSQLAITSSLISVQLLGVFIWFGVDPPNIIIDYDEHKTMNPEQARGVLKCDITDLQIICSLGYSILLMVTCTVYAIKTRGVPENFNEAKPIGFTMYTTCIVWLAFIPIFFGTAQSAEKLYIQTTTLTISMNLSASVALGMLYMPKVYIIIFHPELNVQKRKRSFKAVVTAATMSSRLSHKPSDRPNGEAKTELCENVDPNIFFFGCTVELGLHFKLTFSRNQSNL

SEQ ID NO: 16515 - DNA, 2748 bp, Artificial Sequence
  derived and/or modified sequence
atggtgcagcttagaaagctgctgagagtcctgaccctaatgaagtttccatgttgtgtcttggaagtgctgctttgtgcactggcagcagcggcccgcggccaggagatgtacgccccccactccattaggattgagggtgacgtgaccctcggaggcctctttcctgtccacgccaagggccccagcggggtaccgtgtggtgacatcaagcgcgagaacgggattcacagacttgaggctatgttatacgccctggaccagattaattcggacccaaatctgctccccaacgtgaccttaggtgcgcgcattctggacacgtgcagcagggatacgtatgcgttagaacagagcctcacatttgtgcaggctctgatacagaaagataccagtgatgttcggtgtaccaacggcgagccgccagttttcgtgaagccagaaaaagttgtaggagtcataggggcctccgggtccagcgtctctatcatggttgctaatatcctgagactgttccagatcccccaaatcagctatgcttctaccgcacctgagctttcagatgaccgcagatatgacttctttagccgcgtcgtcccacctgattccttccaggcacaggccatggttgacattgtgaaggccctggggtggaactacgtttccactttggcctcggaggggagctacggcgaaaagggcgtcgagtcattcacccagatctctaaagaggccggaggactctgtatcgctcagagcgttaggatccctcaagagcggaaggacaggacaatcgacttcgaccggatcatcaagcagctacttgacacacctaatagcagagccgttgtgattttcgctaacgatgaggatattaaacagattctggctgcagctaagcgggccgatcaggtcgggcacttcctgtgggttggaagcgactcttggggatccaagatcaacccattgcaccaacatgaggacatcgctgagggcgcaattaccatccagcccaaaagagctactgtggaaggcttcgatgcgtattttacatctaggaccctcgagaacaaccgccgaaacgtctggttcgcagaatattgggaggaaaattttaattgcaaactgaccatctcagggagtaagaaggaggatacagataggaagtgcaccgggcaggagcgcatcggaaaagattccaattatgagcaggagggtaaagttcagtttgtaatcgatgccgtgtatgccatggcgcatgctctgcatcacatgaataaggatttgtgtgcggattacagaggcgtctgtcccgagatggaacaggctggggggaagaagttactgaaatacatccgcaatgtgaatttcaacggctcagcgggaacccccgtcatgttcaataaaaacggtgatgcccccggccggtacgatatcttccagtatcagacaacaaatacatcgaatccaggctatcggctgatcggccagtggactgacgagctgcagctgaacatcgaagacatgcagtgggggaagggcgttagggaaatccctgctagcgtttgtacgctgccatgtaaaccaggacagcggaagaagacgcagaaaggcacaccatgttgctggacttgtgaaccgtgcgatgggtaccagtaccagtttgatgaaatgacatgccagcactgcccatatgatcagcgcccaaatgagaatcgaactggttgccaggatattcctataattaagctggagtggcactccccctgggccgttatcccagttttccttgctatgcttggcatcattgccacaatcttcgtaatggcgacttttatccgctacaatgatacacctatagttagagcatcaggcagggaactgtcttacgttctgctgactgggatcttcctatgctatatcatcacattcttgatgatagcgaaacccgacgtcgctgtgtgctcttttcgacgtgtgttcttagggctgggcatgtgcatctcctatgctgcactgttgaccaaaacaaatcgcatatatcggatctttgaacagggcaaaaagtctgtcaccgccccacggctaattagccctacgtcacagctggctatcactagcagcctgatatccgtgcagctcctgggcgtatttatttggttcggcgtggatccccccaatataatcatcgattatgatgaacataaaaccatgaaccctgagcaggcccgcggggtgctcaagtgtgatattactgacctgcagattatctgttcacttggctactctattttgctgatggttacttgtaccgtgtatgccataaagacgcggggagtaccagagaactttaatgaggccaagcctatcgggttcacgatgtacactacttgtatcgtgtggctggcttttatccctattttttttggcaccgcccaatcagctgagaaactttacattcagaccacaaccttaacgatcagcatgaatctctctgctagtgtggctctggggatgctgtacatgccaaaggtttacattatcattttccatccggaactcaacgtacagaaacgcaagcgaagcttcaaggccgtggtgaccgctgcgacaatgtccagcagactcagccataagccctctgacagacccaacggcgaggcaaagacggagttatgtgagaacgtggaccccaacagccccgccgccaaaaagaaatacgtgagctataataacctggtgatatag

SEQ ID NO: 16516 - DNA, 2721 bp, Artificial Sequence
  derived and/or modified sequence
atggtgcaactgcgaaaacttttgagggtacttacgctgatgaagttcccttgttgcgtgctggaggtgctgctgtgtgcacttgctgctgcagctcgggggcaggaaatgtacgcccctcatagcattcgaattgagggcgacgtcaccctcggcggcctgtttccagttcacgctaagggcccaagtggagtcccctgcggagacataaagagagaaaatggtatccacagattagaagcaatgctatatgcactcgaccagatcaactcggacccgaacctgttaccgaatgtgacactgggagctagaatcctagatacttgctctcgcgacacttacgccttggagcaatccctgaccttcgtccaggctctgatccagaaggacacatctgatgtgcggtgcaccaacggcgagccaccagtctttgtaaaacccgaaaaagtggtgggagtaataggcgccagcgggagttctgtctccataatggttgccaacatcctccgacttttccagattcctcagatatcttatgccagcacagctccagaactgagcgatgatagacgatacgacttcttttcaagggttgtgccgcccgattcctttcaggcccaggcgatggttgacattgtgaaagctctgggttggaactatgtatctactctggcttctgaaggtagctacggggaaaagggtgtggaaagcttcacacagatttcgaaagaggctggaggcctgtgcattgcacagtctgtacgaataccacaggagagaaaggaccggaccatagacttcgatcggattataaagcagttgctggacaccccaaacagccgagccgtggtcatattcgccaatgatgaggatatcaagcaaatcctggccgcggccaaacgcgccgaccaggtaggtcattttctttgggttgggagtgactcttggggcagcaaaatcaaccctcttcatcagcacgaagacattgcagaaggtgctataaccatccagccaaagagagcgactgtagagggttttgacgcctacttcacatcaaggacactggaaaacaataggcgcaatgtatggttcgctgagtactgggaagaaaattttaattgtaaactaaccatcagcgggagtaagaaggaagataccgataggaaatgcactggacaagagaggattgggaaagattctaactacgaacaagaaggaaaggtgcagttcgtgattgacgctgtatatgcaatggcacatgccttgcatcatatgaataaggacctgtgcgccgattaccgaggagtctgtcccgagatggagcaggcaggcgggaagaagttgctgaagtatattaggaacgtgaacttcaatggaagtgctggcacccctgtgatgttcaacaaaaatggagatgcgccagggcgatacgacatttttcagtaccagactaccaatacatccaacccagggtataggctcataggacagtggaccgatgagctgcagcttaatattgaggatatgcagtggggaaaaggcgtgcgtgaaataccagcctcagtctgtactctcccctgcaaaccgggccagcgcaagaaaacgcaaaaggggacgccttgttgttggacttgtgagccctgtgatgggtaccagtaccagttcgacgaaatgacatgtcagcactgcccatacgaccaacggcccaatgagaatcgaactggctgccaagacatccccattatcaagctggagtggcattcgccctgggcagttatacccgtttttcttgcgatgctcggtatcatcgccacaatctttgtgatggccactttcattcggtataacgatacccccatcgtgcgcgccagcggtcgggaactgtcttacgtgctgttaactggaatatttctatgttatatcattacttttctaatgatcgcaaaaccagatgttgcagtatgttcgttcagacgagtctttctgggcctcggaatgtgcatttcgtatgccgcgttgctgaccaagactaataggatctacaggatattcgagcaaggtaaaaagtccgtgacggctccccgcctgatcagcccaacatctcagctcgctattacgtcaagtctcatctcagtgcagctcctgggcgtgtttatatggttcggcgtagacccaccgaacatcattatcgattacgacgaacacaaaaccatgaaccctgagcaggcaagaggagttctgaaatgcgatatcacagatctccagatcatctgctcactgggatattcaattctgttgatggtcacatgtacagtctacgcaattaaaacgcggggagtccctgaaaactttaatgaggccaaacctatcggctttactatgtatactacatgtatcgtgtggctggctttcatacctatattttttggcactgctcagtccgccgagaagctctacatacagaccacaactctgacaataagcatgaatctttctgcatctgttgccttgggaatgctttatatgccaaaagtgtacatcatcatattccacccagagctgaacgtacagaaaaggaagaggtctttcaaagccgtggtgaccgccgccactatgagttcacgcctgagtcataagccgtctgatagacccaatggagaagccaaaactgagctctgcgagaacgttgacccaaacagcgagaagtgtaactgctattag

SEQ ID NO: 16517 - DNA, 4127 bp, Artificial Sequence
  derived and/or modified sequence
agtgctgggctgttggagagagcgagcagcaagccggtgagcgcgagcgcggcgcgccggccggctaacccgagagcgcgaggcgccccaggctggcaggcgccgcgggacccctcaccctctctggtcgcccctccccggattcccccaccctccgtgcctgcaggagcccctgggctttcccggaggagctcgccctgaagggcccggacctcggcgagcccaccaccgttccctccagcgccgccgccgccaccgcagcagccggagcagcatggtccagctgaggaagctgctccgcgtcctgactttgatgaagttcccctgctgcgtgctggaggtgctcctgtgcgcgctggcggcggcggcgcgcggccaggagatgtacgccccgcactcaatccggatcgagggggacgtcaccctcggggggctgttccccgtgcacgccaagggtcccagcggagtgccctgcggcgacatcaagagggaaaacgggatccacaggctggaagcgatgctctacgccctggaccagatcaacagtgatcccaacctactgcccaacgtgacgctgggcgcgcggatcctggacacttgttccagggacacttacgcgctcgaacagtcgcttactttcgtccaggcgctcatccagaaggacacctccgacgtgcgctgcaccaacggcgaaccgccggttttcgtcaagccggagaaagtagttggagtgattggggcttcggggagttcggtctccatcatggtagccaacatcctgaggctcttccagatcccccagattagttatgcatcaacggcacccgagctaagtgatgaccggcgctatgacttcttctctcgcgtggtgccacccgattccttccaagcccaggccatggtagacattgtaaaggccctaggctggaattatgtgtctaccctcgcatcggaaggaagttatggagagaaaggtgtggagtccttcacgcagatttccaaagaggcaggtggactctgcattgcccagtccgtgagaatcccccaggaacgcaaagacaggaccattgactttgatagaattatcaaacagctcctggacacccccaactccagggccgtcgtgatttttgccaacgatgaggatataaagcagatccttgcagcagccaaaagagctgaccaagttggccattttctttgggtgggatcagacagctggggatccaaaataaacccactgcaccagcatgaagatatcgcagaaggggccatcaccattcagcccaagcgagccacggtggaagggtttgatgcctactttacgtcccgtacacttgaaaacaacagaagaaatgtatggtttgccgaatactgggaggaaaacttcaactgcaagttgacgattagtgggtcaaaaaaagaagacacagatcgcaaatgcacaggacaggagagaattggaaaagattccaactatgagcaggagggtaaagtccagttcgtgattgacgcagtctatgctatggctcacgcccttcaccacatgaacaaggatctctgtgctgactaccggggtgtctgcccagagatggagcaagctggaggcaagaagttgctgaagtatatacgcaatgttaatttcaatggtagtgctggcactccagtgatgtttaacaagaacggggatgcacctgggcgttatgacatctttcagtaccagaccacaaacaccagcaacccgggttaccgtctgatcgggcagtggacagacgaacttcagctcaatatagaagacatgcagtggggtaaaggagtccgagagatacccgcctcagtgtgcacactaccatgtaagccaggacagagaaagaagacacagaaaggaactccttgctgttggacctgtgagccttgcgatggttaccagtaccagtttgatgagatgacatgccagcattgcccctatgaccagaggcccaatgaaaatcgaaccggatgccaggatattcccatcatcaaactggagtggcactccccctgggctgtgattcctgtcttcctggcaatgttggggatcattgccaccatctttgtcatggccactttcatccgctacaatgacacgcccattgtccgggcatctgggcgggaactcagctatgttcttttgacgggcatctttctttgctacatcatcactttcctgatgattgccaaaccagatgtggcagtgtgttctttccggcgagttttcttgggcttgggtatgtgcatcagttatgcagccctcttgacgaaaacaaatcggatttatcgcatatttgagcagggcaagaaatcagtaacagctcccagactcataagcccaacatcacaactggcaatcacttccagtttaatatcagttcagcttctaggggtgttcatttggtttggtgttgatccacccaacatcatcatagactatgatgaacacaagacaatgaaccctgagcaagccagaggggttctcaagtgtgacattacagatctccaaatcatttgctccttgggatatagcattcttctcatggtcacatgtactgtgtatgccatcaagactcggggtgtacccgagaattttaacgaagccaagcccattggattcactatgtacacgacatgtatagtatggcttgccttcattccaattttttttggcaccgctcaatcagcggaaaagctctacatacaaactaccacgcttacaatctccatgaacctaagtgcatcagtggcgctggggatgctatacatgccgaaagtgtacatcatcattttccaccctgaactcaatgtccagaaacggaagcgaagcttcaaggcggtagtcacagcagccaccatgtcatcgaggctgtcacacaaacccagtgacagacccaacggtgaggcaaagaccgagctctgtgaaaacgtagacccaaacagccctgctgcaaaaaagaagtatgtcagttataataacctggttatctaacctgttccattccatggaaccatggaggaggaagaccctcagttattttgtcacccaacctggcataggactctttggtcctacccgcttcccatcaccggaggagcttccccggccgggagaccagtgttagaggatccaagcgacctaaacagctgctttatgaaatatccttactttatctgggcttaataagtcactgacatcagcactgccaactcggctgcaattgtggaccttccctaccaaagggagtgttgaaactcaagtcccgccctggctctttagaatggaccactgagagccacaggaccgttttggggctgacctgtcttattacgtatgtacttctaggttgcaaggttttgaaattttctgtacagtttgtgaggacctttgcactttgccatctgatgtcgtacctcggttcactgtttgttttcgaatgccttgttttcatagagccctattctctcagacggtggaatatttggaaaaattttaaaacaattaaaattttaaagcaatcttggcagactaaaacaagtacatctgtacatgactgtataattacgattatagtaccactgcacatcatgtttttttttttaagacaaaaaagatgtttaaagaccaaaaactgtgctgagaaagtatgccccacctatctttggtatatgataggttacataaaaggaaggtattggctgaactgaatagaggtcttgatctttggaatgcatgccagtaatgtattttacagtacatgtttattatgttcaatatttgtatttgtgttctcttttgttatttttaattagggtatatgaatattttgcaataattttaataattattaagctgtttgaaggaaagaatatggatttttcatgtcttgaggttttgttcatgccccctttgactgatcagtgtgataaggactttaggaaaaaaagcatgtatgttttttactgtttgtaataagtactttcgttaatcttgctgcttatgtgccaatttagtggaaaaaaacaacccttgctgaaaaattccctctttccattctctttcaattctgtgatattgtccaagaatgtatcaataa

SEQ ID NO: 16518 - DNA, 2901 bp, Artificial Sequence
  derived and/or modified sequence
ggtcgcccctccccggattcccccaccctccgtgcctgcaggagcccctgggctttcccggaggagctcgccctgaagggcccggacctcggcgagcccaccaccgttccctccagcgccgccgccgccaccgcagcagccggagcagcatggtccagctgaggaagctgctccgcgtcctgactttgatgaagttcccctgctgcgtgctggaggtgctcctgtgcgcgctggcggcggcggcgcgcggccaggagatgtacgccccgcactcaatccggatcgagggggacgtcaccctcggggggctgttccccgtgcacgccaagggtcccagcggagtgccctgcggcgacatcaagagggaaaacgggatccacaggctggaagcgatgctctacgccctggaccagatcaacagtgatcccaacctactgcccaacgtgacgctgggcgcgcggatcctggacacttgttccagggacacttacgcgctcgaacagtcgcttactttcgtccaggcgctcatccagaaggacacctccgacgtgcgctgcaccaacggcgaaccgccggttttcgtcaagccggagaaagtagttggagtgattggggcttcggggagttcggtctccatcatggtagccaacatcctgaggctcttccagatcccccagattagttatgcatcaacggcacccgagctaagtgatgaccggcgctatgacttcttctctcgcgtggtgccacccgattccttccaagcccaggccatggtagacattgtaaaggccctaggctggaattatgtgtctaccctcgcatcggaaggaagttatggagagaaaggtgtggagtccttcacgcagatttccaaagaggcaggtggactctgcattgcccagtccgtgagaatcccccaggaacgcaaagacaggaccattgactttgatagaattatcaaacagctcctggacacccccaactccagggccgtcgtgatttttgccaacgatgaggatataaagcagatccttgcagcagccaaaagagctgaccaagttggccattttctttgggtgggatcagacagctggggatccaaaataaacccactgcaccagcatgaagatatcgcagaaggggccatcaccattcagcccaagcgagccacggtggaagggtttgatgcctactttacgtcccgtacacttgaaaacaacagaagaaatgtatggtttgccgaatactgggaggaaaacttcaactgcaagttgacgattagtgggtcaaaaaaagaagacacagatcgcaaatgcacaggacaggagagaattggaaaagattccaactatgagcaggagggtaaagtccagttcgtgattgacgcagtctatgctatggctcacgcccttcaccacatgaacaaggatctctgtgctgactaccggggtgtctgcccagagatggagcaagctggaggcaagaagttgctgaagtatatacgcaatgttaatttcaatggtagtgctggcactccagtgatgtttaacaagaacggggatgcacctgggcgttatgacatctttcagtaccagaccacaaacaccagcaacccgggttaccgtctgatcgggcagtggacagacgaacttcagctcaatatagaagacatgcagtggggtaaaggagtccgagagatacccgcctcagtgtgcacactaccatgtaagccaggacagagaaagaagacacagaaaggaactccttgctgttggacctgtgagccttgcgatggttaccagtaccagtttgatgagatgacatgccagcattgcccctatgaccagaggcccaatgaaaatcgaaccggatgccaggatattcccatcatcaaactggagtggcactccccctgggctgtgattcctgtcttcctggcaatgttggggatcattgccaccatctttgtcatggccactttcatccgctacaatgacacgcccattgtccgggcatctgggcgggaactcagctatgttcttttgacgggcatctttctttgctacatcatcactttcctgatgattgccaaaccagatgtggcagtgtgttctttccggcgagttttcttgggcttgggtatgtgcatcagttatgcagccctcttgacgaaaacaaatcggatttatcgcatatttgagcagggcaagaaatcagtaacagctcccagactcataagcccaacatcacaactggcaatcacttccagtttaatatcagttcagcttctaggggtgttcatttggtttggtgttgatccacccaacatcatcatagactatgatgaacacaagacaatgaaccctgagcaagccagaggggttctcaagtgtgacattacagatctccaaatcatttgctccttgggatatagcattcttctcatggtcacatgtactgtgtatgccatcaagactcggggtgtacccgagaattttaacgaagccaagcccattggattcactatgtacacgacatgtatagtatggcttgccttcattccaattttttttggcaccgctcaatcagcggaaaagctctacatacaaactaccacgcttacaatctccatgaacctaagtgcatcagtggcgctggggatgctatacatgccgaaagtgtacatcatcattttccaccctgaactcaatgtccagaaacggaagcgaagcttcaaggcggtagtcacagcagccaccatgtcatcgaggctgtcacacaaacccagtgacagacccaacggtgaggcaaagaccgagctctgtgaaaacgtagacccaaacagtgagaagtgcaactgctactgaccatctgcactggcatctagtcaagcgattg

SEQ ID NO: 16519 - DNA, 2748 bp, Artificial Sequence
  derived and/or modified sequence
atggtgcagctgaggaagctgctgcgggtgctgaccctgatgaagttcccctgctgcgtgctggaggtgctgctgtgtgccctggccgctgctgcccggggccaggagatgtatgccccccacagcatcagaattgaaggagatgtgaccctgggcggcctcttccctgtgcacgccaagggccccagcggcgtgccctgtggggacatcaagagagaaaatggcatccaccggctggaggccatgctgtatgccctggaccagatcaacagcgaccccaacctgctgcccaacgtgaccctgggcgcccgcatcctggacacctgcagccgggacacctacgccctggagcagagcctgacctttgtgcaggccctgatccagaaggacaccagtgatgtgcgctgcaccaacggggagccccctgtgtttgtgaagccagagaaggtggtgggcgtcatcggggccagcggcagctctgtgtccatcatggtggccaacatcctgcggctcttccagatcccccagatctcctatgccagcacagcccctgagctgagtgatgaccggcgctatgacttcttcagccgggtggtgcccccagacagcttccaggcccaggccatggtggacatcgtgaaggccctgggctggaactacgtgtccaccctggccagcgagggcagctatggagagaagggcgtggagagcttcacccagatcagcaaggaggccggcggcctgtgcatcgcccagagcgtgcgcatcccccaggagaggaaggacaggaccatcgactttgaccgcatcatcaagcagctgctggacacccccaacagcagagctgtggtgatctttgccaatgatgaggacatcaagcagatcctggccgccgccaagagagctgaccaggtgggccacttcctgtgggtgggcagtgacagctggggcagcaagatcaaccccctgcaccagcatgaagatattgctgagggcgccatcaccatccagcccaagagggccaccgtggagggctttgatgcctacttcaccagcaggaccctggagaacaacagaagaaatgtgtggtttgctgagtactgggaggagaacttcaactgcaagctgaccatcagcggcagcaagaaggaggacacagacagaaaatgtacaggccaggagcgcatcggcaaggacagcaactatgagcaggagggcaaggtgcagtttgtgattgatgctgtgtatgccatggcccacgccctgcaccacatgaacaaggacctgtgtgccgactacagaggagtgtgcccagagatggagcaggccggcggcaagaagctgctgaagtacatcagaaatgtgaacttcaacggcagcgctggcacccctgtgatgttcaacaagaatggagatgcccctggccgctatgacatcttccagtaccagaccaccaacaccagcaaccctggctaccgcctgattggccagtggacagatgagctgcagctgaacatcgaggacatgcagtggggcaaaggagtgcgggagatcccagcctctgtgtgcaccctgccctgcaagccaggccagaggaagaagacccagaagggcaccccctgctgctggacctgtgagccctgtgatggctaccagtaccagtttgatgagatgacctgccagcactgcccctatgaccagaggcccaatgaaaatagaacaggctgccaggacatccccatcatcaagctggagtggcacagcccctgggccgtcatccctgtgttcctggccatgctgggcatcatcgccaccatctttgtgatggccaccttcatccgctacaatgacacccccatcgtgcgggccagcggccgggagctgtcctatgtgctgctgaccggcatcttcctgtgctacatcatcaccttcctgatgattgccaagccagatgtggccgtgtgcagcttccggcgggtcttcctgggcctgggcatgtgcatctcctatgctgccctgctgaccaagaccaaccgcatctaccgcatctttgagcagggcaagaagtctgtgacagcccccaggctcatcagccccaccagccagctggccatcaccagcagcctcatctctgtgcagctgctgggcgtcttcatctggtttggagtggacccccccaacatcatcatcgactatgatgagcacaagaccatgaaccctgagcaggcccggggcgtgctgaagtgtgacatcacagacctgcagatcatctgcagcctgggctacagcatcctgctgatggtgacctgcaccgtgtatgccatcaagacccggggcgtgcctgagaacttcaatgaggccaagcccatcggcttcaccatgtacaccacctgcatcgtgtggctggccttcatccccatcttctttggaacagcccagagcgctgagaagctgtacatccagaccaccaccctgaccatctccatgaacctgagcgcctctgtggccctgggcatgctgtacatgcccaaggtgtacatcatcatcttccaccctgagctgaatgtgcagaagaggaagaggagcttcaaggctgtggtgacagctgccaccatgagcagccggctgagccacaagcccagcgaccggcccaatggagaggccaagacagagctgtgtgaaaatgtggaccccaacagccctgctgccaagaagaagtatgtgtcctacaacaacctggtgatctag

SEQ ID NO: 16520 - DNA, 2721 bp, Artificial Sequence
  derived and/or modified sequence
atggtgcagctgaggaagctgctgcgggtgctgaccctgatgaagttcccctgctgcgtgctggaggtgctgctgtgtgccctggccgctgctgcccggggccaggagatgtatgccccccacagcatcagaattgaaggagatgtgaccctgggcggcctcttccctgtgcacgccaagggccccagcggcgtgccctgtggggacatcaagagagaaaatggcatccaccggctggaggccatgctgtatgccctggaccagatcaacagcgaccccaacctgctgcccaacgtgaccctgggcgcccgcatcctggacacctgcagccgggacacctacgccctggagcagagcctgacctttgtgcaggccctgatccagaaggacaccagtgatgtgcgctgcaccaacggggagccccctgtgtttgtgaagccagagaaggtggtgggcgtcatcggggccagcggcagctctgtgtccatcatggtggccaacatcctgcggctcttccagatcccccagatctcctatgccagcacagcccctgagctgagtgatgaccggcgctatgacttcttcagccgggtggtgcccccagacagcttccaggcccaggccatggtggacatcgtgaaggccctgggctggaactacgtgtccaccctggccagcgagggcagctatggagagaagggcgtggagagcttcacccagatcagcaaggaggccggcggcctgtgcatcgcccagagcgtgcgcatcccccaggagaggaaggacaggaccatcgactttgaccgcatcatcaagcagctgctggacacccccaacagcagagctgtggtgatctttgccaatgatgaggacatcaagcagatcctggccgccgccaagagagctgaccaggtgggccacttcctgtgggtgggcagtgacagctggggcagcaagatcaaccccctgcaccagcatgaagatattgctgagggcgccatcaccatccagcccaagagggccaccgtggagggctttgatgcctacttcaccagcaggaccctggagaacaacagaagaaatgtgtggtttgctgagtactgggaggagaacttcaactgcaagctgaccatcagcggcagcaagaaggaggacacagacagaaaatgtacaggccaggagcgcatcggcaaggacagcaactatgagcaggagggcaaggtgcagtttgtgattgatgctgtgtatgccatggcccacgccctgcaccacatgaacaaggacctgtgtgccgactacagaggagtgtgcccagagatggagcaggccggcggcaagaagctgctgaagtacatcagaaatgtgaacttcaacggcagcgctggcacccctgtgatgttcaacaagaatggagatgcccctggccgctatgacatcttccagtaccagaccaccaacaccagcaaccctggctaccgcctgattggccagtggacagatgagctgcagctgaacatcgaggacatgcagtggggcaaaggagtgcgggagatcccagcctctgtgtgcaccctgccctgcaagccaggccagaggaagaagacccagaagggcaccccctgctgctggacctgtgagccctgtgatggctaccagtaccagtttgatgagatgacctgccagcactgcccctatgaccagaggcccaatgaaaatagaacaggctgccaggacatccccatcatcaagctggagtggcacagcccctgggccgtcatccctgtgttcctggccatgctgggcatcatcgccaccatctttgtgatggccaccttcatccgctacaatgacacccccatcgtgcgggccagcggccgggagctgtcctatgtgctgctgaccggcatcttcctgtgctacatcatcaccttcctgatgattgccaagccagatgtggccgtgtgcagcttccggcgggtcttcctgggcctgggcatgtgcatctcctatgctgccctgctgaccaagaccaaccgcatctaccgcatctttgagcagggcaagaagtctgtgacagcccccaggctcatcagccccaccagccagctggccatcaccagcagcctcatctctgtgcagctgctgggcgtcttcatctggtttggagtggacccccccaacatcatcatcgactatgatgagcacaagaccatgaaccctgagcaggcccggggcgtgctgaagtgtgacatcacagacctgcagatcatctgcagcctgggctacagcatcctgctgatggtgacctgcaccgtgtatgccatcaagacccggggcgtgcctgagaacttcaatgaggccaagcccatcggcttcaccatgtacaccacctgcatcgtgtggctggccttcatccccatcttctttggaacagcccagagcgctgagaagctgtacatccagaccaccaccctgaccatctccatgaacctgagcgcctctgtggccctgggcatgctgtacatgcccaaggtgtacatcatcatcttccaccctgagctgaatgtgcagaagaggaagaggagcttcaaggctgtggtgacagctgccaccatgagcagccggctgagccacaagcccagcgaccggcccaatggagaggccaagacagagctgtgtgaaaatgtggaccccaacagcgagaagtgcaactgctactag

SEQ ID NO: 16521 - DNA, 2748 bp, Artificial Sequence
  derived and/or modified sequence
atggtgcagctgcggaagctgctgcgggtgctgaccctgatgaagttcccttgttgtgtcctggaagtgctactctgcgctcttgcagcagccgctcgcgggcaggaaatgtacgcccctcattccatccggattgagggagacgtgacattgggtggactcttccctgtccacgccaagggaccatcaggggtaccatgcggtgacattaaacgggagaatggcatccataggctagaggccatgctatacgctctcgatcagatcaactctgatccaaacctgctgcctaacgtgaccctgggagcccgcatcctcgacacctgcagtagagatacgtatgcgcttgagcagagcttaacatttgtgcaggccttgattcagaaggacacctcagatgtgcgatgcaccaacggtgaaccccccgtctttgtgaagccggaaaaggtggtcggcgtgatcggggccagtggctcctcagtgtccataatggtcgcaaatatcctcagactcttccagatccctcagattagctacgcctcaaccgccccagaactgtctgatgatcgcaggtatgatttctttagtcgcgtggtccctcccgatagcttccaagcacaagctatggttgatatcgtgaaagctcttggttggaattatgtgagtactctcgcatctgagggcagctatggagagaagggggttgaatccttcacccagattagtaaagaggctggtggcttgtgcatcgcccagtctgtgcggattccgcaggaaaggaaggaccggactatcgacttcgatcgaatcattaagcagttgttagacacccccaacagtagagccgtggtgatcttcgccaatgatgaggacatcaagcagattctcgctgcggctaaaagagccgatcaggtcggccatttcctttgggttggttcagatagctgggggtcaaagatcaatccattgcatcagcatgaggatatcgctgaaggagcgatcaccattcagccaaaacgggctaccgtggagggctttgacgcctactttacctcacggacccttgaaaataatagacgaaacgtctggttcgcagagtattgggaggagaattttaattgcaagcttaccattagcggcagtaagaaggaggacactgatcggaagtgcactgggcaggaacgtataggtaaggacagtaactatgaacaagagggaaaggtacagttcgtaattgatgctgtttacgctatggcccatgccttgcaccacatgaataaggacctgtgtgcggattataggggagtgtgtccggagatggagcaagcgggaggaaaaaagctcttgaagtacatacgaaatgtgaacttcaacggttcagcaggcactccggtgatgttcaataaaaacggggacgctcccgggcgctatgatatctttcagtaccagaccaccaacacctccaatccaggctatcgactgattggacagtggactgatgagctgcaactgaatatcgaagacatgcaatggggtaaaggcgtaagagaaatacctgcatcagtctgcacgttgccttgtaagcccgggcagcgcaagaaaacccagaagggaaccccctgttgctggacatgcgaaccatgtgacggctaccagtatcagttcgacgagatgacatgtcagcactgtccctacgatcagcggccgaatgaaaataggaccggatgtcaagatattcccattatcaagctggagtggcacagtccatgggccgtcatacctgtcttcctcgccatgcttggaattattgcaaccatcttcgtcatggccacctttattagatacaacgacaccccaattgtgcgcgcctcaggacgcgaactttcatatgtcttgctgacgggtattttcctttgctatataattactttcttaatgattgccaaaccagacgtggctgtgtgcagtttccggcgcgtgtttctcggcctcggcatgtgcatatcctatgctgctctgctcacaaagaccaacaggatttacagaatcttcgaacagggcaagaaatcagttacagcgcccaggctaattagcccaacttcacaactcgccatcacttcatcccttataagtgtgcaactgttaggcgtctttatctggttcggcgtcgaccctccaaacattatcattgactacgatgagcataaaacaatgaatcctgagcaagcccgcggagtcctaaagtgcgacataacggatctgcagatcatctgttcattgggatactccattctgctgatggtcacttgtacagtctacgccatcaagacacggggagtgcccgaaaactttaatgaagcaaaacctatcggcttcacaatgtataccacctgtattgtctggcttgcttttatccccatcttctttggtaccgctcagtcagccgaaaagctgtacatccaaactaccaccctcaccatctcgatgaatctcagcgcctccgtagcattagggatgttgtatatgcccaaagtctatatcattatttttcacccagagcttaatgtccaaaagcggaaacggtcattcaaggctgttgtcactgcagccactatgtcatctcgtctctcacataagcctagcgaccgccccaacggcgaagcaaaaaccgagctgtgcgagaatgttgatcccaattcgcctgctgccaagaagaaatatgtgtcatataataacttggttatatag

SEQ ID NO: 16522 - DNA, 2721 bp, Artificial Sequence
  derived and/or modified sequence
atggtgcagctgcggaagctgctgcgggtgctgaccctgatgaagtttccctgctgcgtgctggaggttctcctgtgcgcgctggctgccgccgcaaggggccaggagatgtatgctccacactccatccgaatcgaaggagacgttacactcggaggcctcttcccagttcatgcaaagggaccgagcggcgtgccctgcggggacattaaacgcgagaacggaatccataggctggaggccatgctgtatgcactggaccagataaatagtgatcctaatctgctccccaacgttacccttggcgctcgaattttggacacgtgcagtagggatacttacgcactggagcaatcccttacctttgtccaagccttaattcagaaggacacttcggatgtcaggtgcaccaacggagaaccccccgtgttcgttaagcctgaaaaagtggtcggggtgattggtgctagcggaagctccgtgtccattatggtggcaaatatcctcagactctttcagataccacagatctcctatgcctcaacagcccccgagctgagcgacgacagaaggtacgactttttctcaagggtggtgcctcctgactcatttcaggcacaggctatggtggatattgtgaaagccctcggctggaactacgttagtaccttagcctctgaggggagctacggcgaaaagggagtggaatcttttactcaaatctctaaggaggcaggaggactttgcattgcgcagtcagtgcgtatccctcaagaaaggaaagataggactattgacttcgatcgtattatcaagcagctgctggacacgcctaattccagagctgttgtcatctttgctaatgacgaagacatcaaacagatcctagccgcggccaagcgggccgaccaagtcggccattttctctgggtggggtcggatagttgggggagtaagatcaaccctctgcaccagcacgaagacattgcagaaggagctatcaccatccagcccaaaagagccacagtggagggtttcgacgcctacttcacgtctagaactttggagaataacaggaggaatgtgtggttcgccgaatattgggaggagaatttcaactgcaagctcacaatctccggctcaaagaaagaggatacagaccgtaagtgtaccggacaagagcgaatagggaaggattctaactatgagcaggagggcaaggtgcagtttgtcatcgacgctgtctacgccatggctcatgctctgcatcatatgaataaagatctttgtgcagactacaggggagtctgtcctgagatggaacaagcgggtggaaaaaagctacttaagtatattcgaaacgtgaattttaacggctctgccggcacgcccgtcatgttcaataaaaacggcgatgctcctggcagatacgatatctttcagtaccagacaaccaacacgtccaatcccgggtatcgcctgatcggccagtggacagacgagctgcagctgaatattgaggacatgcagtggggcaagggggtccgagaaatccctgcgagtgtgtgtacccttccttgcaaaccagggcaacggaagaaaacccaaaaaggaacaccttgttgttggacctgtgagccctgtgacggctatcagtaccagttcgatgaaatgacctgccagcattgcccctacgatcagcgacctaatgagaaccgtaccgggtgccaggatatccctattataaagctggaatggcactcgccctgggctgtcatccccgtctttttggcaatgctgggaataatcgcgaccattttcgtgatggcaacctttatccgatacaacgacacacctattgtgagggcctcaggtagagagctgtcctatgtgctcctgaccgggattttcttatgttatatcatcaccttcctgatgatagcaaaacccgatgttgccgtttgcagtttccgcagggtgttcttagggcttgggatgtgtattagctacgcggctctcctgactaagaccaatagaatctaccgtattttcgagcagggcaaaaagtccgttactgcgccccgacttatttccccaacatctcagttggctattacttctagtctgatctccgtccagcttttgggcgtgtttatctggtttggtgtggaccctccgaacattattatcgactacgatgagcacaaaactatgaaccctgagcaagcaaggggtgtactcaaatgcgacatcacagatctgcaaatcatttgctcacttggatacagcattctactgatggtgacgtgcaccgtctacgccattaaaaccagaggggtcccagagaacttcaacgaggcaaaaccaattggctttactatgtatacaacttgtattgtttggcttgcttttattcccatttttttcggcacagcacagtcagccgagaagctttatatccagactaccactctcacgatttccatgaacctgtctgcttctgtggctctgggaatgttgtatatgccaaaggtctacatcatcatctttcatcctgaactgaacgtgcagaagagaaagcgttcatttaaggccgttgtgacggcagcaaccatgtcaagtcgattgtcacacaagccgtccgatcggcctaacggcgaggcgaaaactgaactatgtgagaacgtcgaccctaacagtgaaaagtgcaactgttattag

SEQ ID NO: 16523 - DNA, 2748 bp, Artificial Sequence
  derived and/or modified sequence
atggtgcaactcaggaagcttctcagagtactaacgttgatgaaattcccgtgttgcgtgctggaggtactgttatgcgctctggctgctgctgcacgcggacaggagatgtacgcccctcattctataagaattgagggcgacgtgacattgggaggactgttcccagtccacgccaagggtccatcaggcgtgccttgtggagatataaaaagagagaatggtatacaccggctggaagctatgctctatgcccttgaccagattaacagcgacccgaatttattacctaatgtgacattaggggctcggatactcgacacctgctcgcgtgacacgtatgcactggagcaatccttgacctttgtgcaggccctgatccaaaaagatacctccgacgtgagatgtacaaatggagagcccccagtgtttgtgaaacctgaaaaagttgtcggagtgattggagcctccggttctagcgtgtctatcatggtggccaatatcctgcggctgttccaaatcccccagatctcctacgcatcaacagccccagagctgtccgatgacagacggtacgattttttttccagggtcgtcccgcctgacagcttccaggctcaggccatggtcgatattgtgaaggccctcggatggaattacgtttctaccctggcctcagaagggagctacggggaaaagggtgtggaatcttttacccagatctcaaaagaggccggaggcctctgtatcgctcagtcagtaaggattccccaggaacgaaaggatcgcactatcgattttgaccgcattatcaagcagctgctggacacacctaacagtcgcgcagtagtcatcttcgccaatgacgaagacattaaacagattcttgccgctgcaaagcgggcagatcaagtaggccactttctttgggtcggttccgattcttggggctctaaaatcaacccactccaccagcacgaggacatcgctgagggcgctatcaccatccagccaaaaagggccaccgttgaaggcttcgatgcttatttcacctcccgaactctcgaaaataaccggcgtaacgtgtggtttgcagagtattgggaggagaacttcaattgtaaactaacaatttctgggagcaagaaggaagatacggaccgcaagtgcaccgggcaagagcggatcgggaaggactcaaattacgagcaggaaggcaaggtgcagttcgtcattgatgctgtttacgcgatggctcacgctttgcaccatatgaacaaagacctttgtgccgactatcgaggggtgtgccccgagatggagcaggcaggaggcaagaagctgctgaagtacatcaggaatgtcaatttcaatggtagtgctggtacccctgtgatgtttaataagaacggcgatgcacccggtaggtacgatatcttccaatatcagacaaccaataccagcaatccaggctaccgcctgatcgggcagtggaccgacgaactgcagctgaatatcgaggatatgcaatggggtaagggcgtgcgggagattccagctagtgtgtgcactttgccttgtaagcctgggcagcgcaagaagacccaaaagggcacaccttgttgctggacctgcgaaccttgcgatggctaccagtatcagtttgatgaaatgacgtgtcagcactgcccgtatgatcagagacctaatgagaacagaaccggctgccaggacattcccatcataaaattagaatggcactctccatgggcagtgatccctgtgtttctggccatgcttggcatcatcgccaccatttttgtcatggccacctttatccgctacaacgacacccctatagtgcgcgcatcagggcgtgagttatcttacgtactactaacagggattttcctttgctacatcatcacttttttgatgatcgccaaaccggatgtggcagtgtgttctttccgaagggttttcctaggccttggaatgtgtatctcatatgctgccctgctgacaaagacgaaccgaatttatagaatcttcgagcaggggaaaaagagcgttaccgcacccaggctgatttcccccacttcccagttggctatcacgtcaagcctgattagcgtacagctcttgggcgtgttcatatggttcggggtagatcctcctaacatcatcatcgactatgacgaacataagacgatgaatcccgaacaggccagaggggtgttaaagtgtgatatcactgaccttcagataatctgtagtcttggctattcaatcctgctgatggttacatgtacggtttatgccattaaaacaagaggggtgcctgagaattttaacgaggccaaacctatcgggttcactatgtacactacatgcattgtttggctggcctttattcctatcttcttcggaacagcccaaagtgccgagaaactgtatatccagacaacaaccctgactattagcatgaacctgtccgcctccgtggcattaggcatgctgtatatgcccaaggtttacatcattatctttcatccagaactgaatgtccagaagaggaagaggagctttaaagccgtcgtgacagcagctacaatgtcctccagactctctcacaagccaagcgaccggccaaatggagaggctaaaaccgaactctgtgagaacgtggatccgaattccccggcagccaagaagaaatacgtcagttacaataacctggtgatctag

SEQ ID NO: 16524 - DNA, 2721 bp, Artificial Sequence
  derived and/or modified sequence
atggtccagctgagaaaactcctgcgcgttctcacccttatgaagttcccttgttgtgttttggaagtgctgctgtgtgcgttggcagccgctgccagaggccaggagatgtatgcccctcacagtataagaatcgaaggagatgtgactctggggggtctgtttccagtccacgccaagggcccttctggggtgccttgtggggacatcaagcgggaaaatggtattcacaggctcgaagcaatgctgtatgctcttgaccagatcaattccgatcccaatctgctgcccaatgtcactttgggcgcacggattctggacacttgttctcgagatacttacgcattggagcagagtttaacctttgtgcaggcgctgatccaaaaagacacatctgacgtccggtgtacaaacggtgagccgcctgtattcgtgaagccagaaaaggttgtcggggtgatcggggcaagtggcagctcggtcagtatcatggtggctaatatcctgaggctgtttcaaattccccagatcagttatgcctctaccgcgccagaattgtctgatgacaggaggtacgatttttttagcagagtggtcccacctgactcattccaggcccaggctatggtggatatcgtgaaggcactgggttggaattacgtaagcacattagcgtctgagggatcatatggtgagaagggagtggagtctttcacacagatctctaaggaggcaggcggactgtgcatcgctcagtcagtccgaatccctcaggagcgcaaggataggaccatcgacttcgatagaataatcaagcagctgctagatactcctaattctcgggctgttgtcatctttgctaatgatgaggacataaagcaaattttggccgctgccaagcgggctgaccaggtggggcattttttatgggtgggcagtgattcctggggctccaaaattaacccactgcatcaacacgaggacatagcggagggagctatcaccatacagccaaaaagagctaccgtagaaggcttcgatgcatactttacctcaaggacactggagaataaccggagaaacgtctggttcgctgagtactgggaggagaatttcaattgcaaactcaccattagcggatctaagaaggaggacacggatcgcaagtgtacaggccaggagaggatcgggaaggattcaaattacgaacaggagggcaaagttcagtttgttatcgacgctgtctatgctatggcccacgcgcttcaccacatgaacaaggacctttgtgccgattatcgaggcgtatgccctgagatggaacaggcgggagggaagaaactgctcaaatatattaggaacgtgaactttaatggctctgctggcaccccagttatgttcaacaagaatggggacgccccaggccgttacgacattttccagtatcagactacaaacacgagtaacccagggtacaggctgatcggacagtggaccgatgaactacagttgaatatagaagatatgcaatggggcaagggtgttagggagattcctgccagcgtgtgcaccctgccatgcaaaccgggtcaaagaaagaagacccagaaaggaaccccatgctgttggacttgtgaaccgtgcgacggataccagtaccagtttgacgaaatgacctgccagcactgcccatatgaccagcgacctaatgagaaccgtacgggatgtcaggatatacctataattaagctggagtggcattccccatgggcagtcatccccgtcttcctggctatgcttggcatcatcgccacgatcttcgtgatggccacattcattagatacaacgatactccaatcgtccgagcatctggtcgggaactctcctacgtgctgcttaccggtatcttcctttgttatatcatcaccttccttatgattgcaaagccagacgtggcggtgtgcagcttccgcagagtctttctgggtctcggaatgtgtatcagctatgccgcactgctgactaaaaccaatcggatctaccggattttcgaacaggggaaaaaaagcgtgaccgctccaaggcttatctcccctacatcccagctggctattacttcctcgctgatttctgtgcagcttctcggcgtgttcatctggttcggtgtcgaccccccaaacattatcatcgattacgatgagcacaaaacaatgaaccctgagcaagcacgcggagtgctgaagtgcgacattactgatctccagattatttgttctctcggttactccattttgctcatggtcacatgtacggtgtatgcaataaaaacgagaggtgtgcctgaaaacttcaatgaggccaaacctatcgggttcaccatgtacaccacgtgcatcgtttggctggcatttataccaattttctttggcactgcccagagtgctgaaaagttgtatattcagactacgacccttaccatctcgatgaacctctctgcctcagtggctttgggcatgctttatatgcccaaagtgtatatcattattttccaccccgagctcaacgtccagaagaggaagcgcagctttaaagctgtcgtgaccgcagcaacaatgtcaagcaggctttcgcataaaccctccgacaggccaaacggggaggccaagacagaactgtgtgagaacgtggatcccaattccgaaaagtgtaattgttattag

SEQ ID NO: 16525 - DNA, 2748 bp, Artificial Sequence
  derived and/or modified sequence
atggtgcagctgagaaagctgctgagagtgctgaccctgatgaagttcccctgctgcgtgctggaggtgctgctgtgcgccctggccgccgccgccagaggccaggagatgtacgccccccacagcatcagaatcgagggcgacgtgaccctgggcggcctgttccccgtgcacgccaagggccccagcggcgtgccctgcggcgacatcaagagagagaacggcatccacagactggaggccatgctgtacgccctggaccagatcaacagcgaccccaacctgctgcccaacgtgaccctgggcgccagaatcctggacacctgcagcagagacacctacgccctggagcagagcctgaccttcgtgcaggccctgatccagaaggacaccagcgacgtgagatgcaccaacggcgagccccccgtgttcgtgaagcccgagaaggtggtgggcgtgatcggcgccagcggcagcagcgtgagcatcatggtggccaacatcctgagactgttccagatcccccagatcagctacgccagcaccgcccccgagctgagcgacgacagaagatacgacttcttcagcagagtggtgccccccgacagcttccaggcccaggccatggtggacatcgtgaaggccctgggctggaactacgtgagcaccctggccagcgagggcagctacggcgagaagggcgtggagagcttcacccagatcagcaaggaggccggcggcctgtgcatcgcccagagcgtgagaatcccccaggagagaaaggacagaaccatcgacttcgacagaatcatcaagcagctgctggacacccccaacagcagagccgtggtgatcttcgccaacgacgaggacatcaagcagatcctggccgccgccaagagagccgaccaggtgggccacttcctgtgggtgggcagcgacagctggggcagcaagatcaaccccctgcaccagcacgaggacatcgccgagggcgccatcaccatccagcccaagagagccaccgtggagggcttcgacgcctacttcaccagcagaaccctggagaacaacagaagaaacgtgtggttcgccgagtactgggaggagaacttcaactgcaagctgaccatcagcggcagcaagaaggaggacaccgacagaaagtgcaccggccaggagagaatcggcaaggacagcaactacgagcaggagggcaaggtgcagttcgtgatcgacgccgtgtacgccatggcccacgccctgcaccacatgaacaaggacctgtgcgccgactacagaggcgtgtgccccgagatggagcaggccggcggcaagaagctgctgaagtacatcagaaacgtgaacttcaacggcagcgccggcacccccgtgatgttcaacaagaacggcgacgcccccggcagatacgacatcttccagtaccagaccaccaacaccagcaaccccggctacagactgatcggccagtggaccgacgagctgcagctgaacatcgaggacatgcagtggggcaagggcgtgagagagatccccgccagcgtgtgcaccctgccctgcaagcccggccagagaaagaagacccagaagggcaccccctgctgctggacctgcgagccctgcgacggctaccagtaccagttcgacgagatgacctgccagcactgcccctacgaccagagacccaacgagaacagaaccggctgccaggacatccccatcatcaagctggagtggcacagcccctgggccgtgatccccgtgttcctggccatgctgggcatcatcgccaccatcttcgtgatggccaccttcatcagatacaacgacacccccatcgtgagagccagcggcagagagctgagctacgtgctgctgaccggcatcttcctgtgctacatcatcaccttcctgatgatcgccaagcccgacgtggccgtgtgcagcttcagaagagtgttcctgggcctgggcatgtgcatcagctacgccgccctgctgaccaagaccaacagaatctacagaatcttcgagcagggcaagaagagcgtgaccgcccccagactgatcagccccaccagccagctggccatcaccagcagcctgatcagcgtgcagctgctgggcgtgttcatctggttcggcgtggacccccccaacatcatcatcgactacgacgagcacaagaccatgaaccccgagcaggccagaggcgtgctgaagtgcgacatcaccgacctgcagatcatctgcagcctgggctacagcatcctgctgatggtgacctgcaccgtgtacgccatcaagaccagaggcgtgcccgagaacttcaacgaggccaagcccatcggcttcaccatgtacaccacctgcatcgtgtggctggccttcatccccatcttcttcggcaccgcccagagcgccgagaagctgtacatccagaccaccaccctgaccatcagcatgaacctgagcgccagcgtggccctgggcatgctgtacatgcccaaggtgtacatcatcatcttccaccccgagctgaacgtgcagaagagaaagagaagcttcaaggccgtggtgaccgccgccaccatgagcagcagactgagccacaagcccagcgacagacccaacggcgaggccaagaccgagctgtgcgagaacgtggaccccaacagccccgccgccaagaagaagtacgtgagctacaacaacctggtgatctag

SEQ ID NO: 16526 - DNA, 2721 bp, Artificial Sequence
  derived and/or modified sequence
atggtgcagctgagaaagctgctgagagtgctgaccctgatgaagttcccctgctgcgtgctggaggtgctgctgtgcgccctggccgccgccgccagaggccaggagatgtacgccccccacagcatcagaatcgagggcgacgtgaccctgggcggcctgttccccgtgcacgccaagggccccagcggcgtgccctgcggcgacatcaagagagagaacggcatccacagactggaggccatgctgtacgccctggaccagatcaacagcgaccccaacctgctgcccaacgtgaccctgggcgccagaatcctggacacctgcagcagagacacctacgccctggagcagagcctgaccttcgtgcaggccctgatccagaaggacaccagcgacgtgagatgcaccaacggcgagccccccgtgttcgtgaagcccgagaaggtggtgggcgtgatcggcgccagcggcagcagcgtgagcatcatggtggccaacatcctgagactgttccagatcccccagatcagctacgccagcaccgcccccgagctgagcgacgacagaagatacgacttcttcagcagagtggtgccccccgacagcttccaggcccaggccatggtggacatcgtgaaggccctgggctggaactacgtgagcaccctggccagcgagggcagctacggcgagaagggcgtggagagcttcacccagatcagcaaggaggccggcggcctgtgcatcgcccagagcgtgagaatcccccaggagagaaaggacagaaccatcgacttcgacagaatcatcaagcagctgctggacacccccaacagcagagccgtggtgatcttcgccaacgacgaggacatcaagcagatcctggccgccgccaagagagccgaccaggtgggccacttcctgtgggtgggcagcgacagctggggcagcaagatcaaccccctgcaccagcacgaggacatcgccgagggcgccatcaccatccagcccaagagagccaccgtggagggcttcgacgcctacttcaccagcagaaccctggagaacaacagaagaaacgtgtggttcgccgagtactgggaggagaacttcaactgcaagctgaccatcagcggcagcaagaaggaggacaccgacagaaagtgcaccggccaggagagaatcggcaaggacagcaactacgagcaggagggcaaggtgcagttcgtgatcgacgccgtgtacgccatggcccacgccctgcaccacatgaacaaggacctgtgcgccgactacagaggcgtgtgccccgagatggagcaggccggcggcaagaagctgctgaagtacatcagaaacgtgaacttcaacggcagcgccggcacccccgtgatgttcaacaagaacggcgacgcccccggcagatacgacatcttccagtaccagaccaccaacaccagcaaccccggctacagactgatcggccagtggaccgacgagctgcagctgaacatcgaggacatgcagtggggcaagggcgtgagagagatccccgccagcgtgtgcaccctgccctgcaagcccggccagagaaagaagacccagaagggcaccccctgctgctggacctgcgagccctgcgacggctaccagtaccagttcgacgagatgacctgccagcactgcccctacgaccagagacccaacgagaacagaaccggctgccaggacatccccatcatcaagctggagtggcacagcccctgggccgtgatccccgtgttcctggccatgctgggcatcatcgccaccatcttcgtgatggccaccttcatcagatacaacgacacccccatcgtgagagccagcggcagagagctgagctacgtgctgctgaccggcatcttcctgtgctacatcatcaccttcctgatgatcgccaagcccgacgtggccgtgtgcagcttcagaagagtgttcctgggcctgggcatgtgcatcagctacgccgccctgctgaccaagaccaacagaatctacagaatcttcgagcagggcaagaagagcgtgaccgcccccagactgatcagccccaccagccagctggccatcaccagcagcctgatcagcgtgcagctgctgggcgtgttcatctggttcggcgtggacccccccaacatcatcatcgactacgacgagcacaagaccatgaaccccgagcaggccagaggcgtgctgaagtgcgacatcaccgacctgcagatcatctgcagcctgggctacagcatcctgctgatggtgacctgcaccgtgtacgccatcaagaccagaggcgtgcccgagaacttcaacgaggccaagcccatcggcttcaccatgtacaccacctgcatcgtgtggctggccttcatccccatcttcttcggcaccgcccagagcgccgagaagctgtacatccagaccaccaccctgaccatcagcatgaacctgagcgccagcgtggccctgggcatgctgtacatgcccaaggtgtacatcatcatcttccaccccgagctgaacgtgcagaagagaaagagaagcttcaaggccgtggtgaccgccgccaccatgagcagcagactgagccacaagcccagcgacagacccaacggcgaggccaagaccgagctgtgcgagaacgtggaccccaacagcgagaagtgcaactgctactag

SEQ ID NO: 16527 - protein, 210 aa, Artificial Sequence
  derived and/or modified sequence
MPPYTVVYFPVRGRCAALRMLLADQGQSWKEEVVTVETWQEGSLKASCLYGQLPKFQDGDLTLYQSNTILRHLGRTLGLYGKDQQEAALVDMVNDGVEDLRCKYISLIYTNYEAGKDDYVKALPGQLKPFETLLSQNQGGKTFIVGDQISFADYNLLDLLLIHEVLAPGCLDAFPLLSAYVGRLSARPKLKAFLASPEYVNLPINGNGKQ

SEQ ID NO: 16528 - DNA, 633 bp, Artificial Sequence
  derived and/or modified sequence
atgcccccctacaccgtggtgtacttccccgtgagaggcagatgcgccgccctgagaatgctgctggccgaccagggccagagctggaaggaggaggtggtgaccgtggagacctggcaggagggcagcctgaaggccagctgcctgtacggccagctgcccaagttccaggacggcgacctgaccctgtaccagagcaacaccatcctgagacacctgggcagaaccctgggcctgtacggcaaggaccagcaggaggccgccctggtggacatggtgaacgacggcgtggaggacctgagatgcaagtacatcagcctgatctacaccaactacgaggccggcaaggacgactacgtgaaggccctgcccggccagctgaagcccttcgagaccctgctgagccagaaccagggcggcaagaccttcatcgtgggcgaccagatcagcttcgccgactacaacctgctggacctgctgctgatccacgaggtgctggcccccggctgcctggacgccttccccctgctgagcgcctacgtgggcagactgagcgccagacccaagctgaaggccttcctggccagccccgagtacgtgaacctgcccatcaacggcaacggcaagcagtag

SEQ ID NO: 16529 - DNA, 633 bp, Artificial Sequence
  derived and/or modified sequence
atgcctccctatactgttgtgtactttccagtccggggcaggtgtgctgccctgaggatgctattagccgaccaaggccaatcttggaaggaggaggtcgtcactgtggagacttggcaggagggaagcctgaaggcttcctgcctgtacggccagcttccaaagtttcaggacggtgacctgaccctgtaccaatctaacactatcctccggcatctcggtagaacacttggactgtacggtaaggatcagcaggaggccgccctggtagatatggtgaatgacggtgttgaggacctccggtgtaaatatatatccttaatctatacaaactatgaagccggtaaggacgattatgtgaaggccctccctgggcagttgaaaccattcgaaactttgctctcccagaaccagggaggtaagactttcatagtgggcgaccagatttcttttgctgactataatctactcgatttgcttctcatccacgaggtgctggctccaggctgtctcgatgcttttcctctgctcagtgcttacgttggccggctcagtgccaggccaaagctgaaggcattccttgcgtctcccgaatacgttaacttacctattaatggaaatggaaagcagtag

SEQ ID NO: 16530 - DNA, 965 bp, Artificial Sequence
  derived and/or modified sequence
tgggaaagagggaaaggcttccccggccagctgcgcggcgactccggggactccagggcgcccctctgcggccgacgcccggggtgcagcggccgccggggctggggccggcgggagtccgcgggaccctccagaagagcggccggcgccgtgactcagcactggggcggagcggggcgggaccacccttataaggctcggaggccgcgaggccttcgctggagtttcgccgccgcagtcttcgccaccatgccgccctacaccgtggtctatttcccagttcgaggccgctgcgcggccctgcgcatgctgctggcagatcagggccagagctggaaggaggaggtggtgaccgtggagacgtggcaggagggctcactcaaagcctcctgcctatacgggcagctccccaagttccaggacggagacctcaccctgtaccagtccaataccatcctgcgtcacctgggccgcacccttgggctctatgggaaggaccagcaggaggcagccctggtggacatggtgaatgacggcgtggaggacctccgctgcaaatacatctccctcatctacaccaactatgaggcgggcaaggatgactatgtgaaggcactgcccgggcaactgaagccttttgagaccctgctgtcccagaaccagggaggcaagaccttcattgtgggagaccagatctccttcgctgactacaacctgctggacttgctgctgatccatgaggtcctagcccctggctgcctggatgcgttccccctgctctcagcatatgtggggcgcctcagtgcccggcccaagctcaaggccttcctggcctcccctgagtacgtgaacctccccatcaatggcaacgggaaacagtgagggttggggggactctgagcgggaggcagagtttgccttcctttctccaggaccaataaaatttctaagagagctactatgag

SEQ ID NO: 16531 - DNA, 633 bp, Artificial Sequence
  derived and/or modified sequence
atgccaccctacacagtggtgtacttccctgtgcggggccgctgtgccgccctgaggatgctgctggccgaccagggccagagctggaaggaggaggtggtgacagtggagacctggcaggagggcagcctgaaggccagctgcctgtatggccagctgcccaagttccaggatggagacctgaccctgtaccagagcaacaccatcctgcggcacctgggccgcaccctgggcctgtatggcaaggaccagcaggaggccgccctggtggacatggtgaatgatggagtggaggacctgcgctgcaagtacatcagcctcatctacaccaactatgaggccggcaaggatgattatgtgaaggccctgcccggccagctgaagccctttgagaccctgctgagccagaaccagggcggcaagaccttcatcgtgggggaccagatcagctttgctgactacaacctgctggacctgctgctgattcatgaggtgctggcccctggctgcctggatgccttccccctgctgagcgcctacgtgggccgcctgagcgcccggcccaagctgaaggccttcctggccagcccagaatatgtgaacctgcccatcaatggaaatggcaagcagtag

SEQ ID NO: 16532 - DNA, 633 bp, Artificial Sequence
  derived and/or modified sequence
atgcccccctacaccgtggtgtacttccccgtgcggggccggtgcgcagccctgcggatgttactggcagaccagggtcagagctggaaagaggaagttgtgaccgttgagacttggcaggaaggatctctgaaggcctcctgtctgtacggccagttgcctaaatttcaggacggagatctcaccctgtaccaatccaataccatcttaaggcatctcggcagaacactgggtctctatgggaaggaccaacaagaagcggccctggtggatatggtcaacgatggcgtggaggacctccgctgcaagtacatcagcctgatctacaccaactacgaggccggtaaagatgactatgttaaggccttacctggacagctcaagccattcgaaactctgctgagtcagaaccaagggggcaaaacattcattgtgggagaccaaatttccttcgctgattacaatctgctggatttgctgctaattcatgaggtgctcgccccaggttgcctcgatgccttcccactgttgtccgcctatgtgggcagactatccgcgcgccccaaactgaaagctttcctggcctcaccagagtatgttaatttgcctattaacggaaatggaaaacagtag

SEQ ID NO: 16533 - DNA, 633 bp, Artificial Sequence
  derived and/or modified sequence
atgccaccctatacagtggtgtatttcccagtccgcggacggtgtgctgccctgcgaatgctgttagctgatcaaggacaaagctggaaggaagaggtggttaccgtggaaacgtggcaggagggttctctgaaggcatcatgtctgtatggtcagcttccaaagttccaggatggagatctcaccctgtaccaatcaaacaccatccttaggcatcttggccgtacattgggtctctatggtaaagatcagcaggaggctgccctcgttgacatggtgaatgacggggtcgaggatttgaggtgcaaatatatttctctcatctatacaaactatgaggccggaaaggatgactacgtgaaggcattgcctggccaactaaagcctttcgagacactgctctctcagaatcagggtgggaagacttttatcgtgggagaccaaatttcttttgcagactacaatctgctggatctgctgctgattcacgaagttttggccccaggctgtctggatgcgttccccctgctgtccgcttatgtgggtcgcctgtctgcccgtcccaaactgaaggccttcctggcttctcccgagtatgtcaacctcccgatcaacggtaatggcaaacagtag

SEQ ID NO: 16534 - protein, 240 aa, Artificial Sequence
  derived and/or modified sequence
MGLELYLDLLSQPCRAVYIFAKKNDIPFELRIVDLIKGQHLSDAFAQVNPLKKVPALKDGDFTLTESVAILLYLTRKYKVPDYWYPQDLQARARVDEYLAWQHTTLRRSCLRALWHKVMFPVFLGEPVSPQTLAATLAELDVTLQLLEDKFLQNKAFLTGPHISLADLVAITELMHPVGAGCQVFEGRPKLATWRQRVEAAVGEDLFQEAHEVILKAKDFPPADPTIKQKLMPWVLAMIR

SEQ ID NO: 16535 - protein, 122 aa, Artificial Sequence
  derived and/or modified sequence
MFPVFLGEPVSPQTLAATLAELDVTLQLLEDKFLQNKAFLTGPHISLADLVAITELMHPVGAGCQVFEGRPKLATWRQRVEAAVGEDLFQEAHEVILKAKDFPPADPTIKQKLMPWVLAMIR

SEQ ID NO: 16536 - DNA, 723 bp, Artificial Sequence
  derived and/or modified sequence
atgggcctggaactgtacctcgaccttctgtcacagccgtgccgggccgtttacatctttgccaagaaaaatgacatcccatttgagctgcgaatcgttgacctaataaaaggccaacacctgtctgacgcgttcgctcaggtcaatccgctgaaaaaagtgccagcattaaaggatggagactttacattaactgaatccgtggcaatactactttaccttaccagaaagtacaaggttcctgactattggtacccccaagatcttcaggcccgggcacgcgtcgacgaatacctggcctggcaacatactacattacgccgcagctgcctccgagccctgtggcacaaagtgatgtttccggtcttcttgggggagcccgttagcccacagacactcgcagccactctcgccgagctcgacgtcacactgcagctcctggaagacaagtttttgcaaaataaggcctttctcaccgggccccacatttctctggccgacctggtggccattaccgaactcatgcaccccgtgggggctggctgccaagtgttcgaaggtcgcccgaagctggccacttggaggcaaagagtagaggccgccgtaggcgaggacctatttcaagaagcccatgaggttatcttgaaggctaaagatttcccccctgctgatcccaccataaagcagaaactgatgccctgggtcttggccatgattcggtag

SEQ ID NO: 16537 - DNA, 1066 bp, Artificial Sequence
  derived and/or modified sequence
actggagtttgctgactccctctggtttccggtcaggtcggtcggtccccactatgggcctggagctgtacctggacctgctgtcccagccctgccgcgctgtttacatctttgccaagaagaacgacattcccttcgagctgcgcatcgtggatctgattaaaggtcagcacttaagcgatgcctttgcccaggtgaaccccctcaagaaggtgccagccttgaaggacggggacttcaccttgacggagagtgtggccatcctgctctacctgacgcgcaaatataaggtccctgactactggtaccctcaggacctgcaggcccgtgcccgtgtggatgagtacctggcatggcagcacacgactctgcggagaagctgcctccgggccttgtggcataaggtgatgttccctgttttcctgggtgagccagtatctccccagacactggcagccaccctggcagagttggatgtgaccctgcagttgctcgaggacaagttcctccagaacaaggccttccttactggtcctcacatctccttagctgacctcgtagccatcacggagctgatgcatcccgtgggtgctggctgccaagtcttcgaaggccgacccaagctggccacatggcggcagcgcgtggaggcagcagtgggggaggacctcttccaggaggcccatgaggtcattctgaaggccaaggacttcccacctgcagaccccaccataaagcagaagctgatgccctgggtgctggccatgatccggtgagctgggaaacctcacccttgcaccgtcctcagcagtccacaaagcattttcatttctaatggcccatgggagccaggcccagaaagcaggaatggcttgcctaagacttgcccaagtcccagagcacctcacctcccgaagccaccatccccaccctgtcttccacagccgcctgaaagccacaatgagaatgatgcacactgaggccttgtgtcctttaatcactgcatttcattttgattttggataataaacctgggctcagcctgagcctctgcttctaactctaa

SEQ ID NO: 16538 - DNA, 778 bp, Artificial Sequence
  derived and/or modified sequence
cggtccccactatgggcctggagctgtacctggacctgctgtcccagccctgccgcgctgtttacatctttgccaagaagaacgacattcccttcgagctgcgcatcgtggatctgattaaagtgtggccatcctgctctacctgacgcgcaaatataaggtccctgactactggtaccctcaggacctgcaggcccgtgcccgtgtggatgagtacctggcatggcagcacacgactctgcggagaagctgcctccgggccttgtggcataaggtgatgttccctgttttcctgggtgagccagtatctccccagacactggcagccaccctggcagagttggatgtgaccctgcagttgctcgaggacaagttcctccagaacaaggccttccttactggtcctcacatctccttagctgacctcgtagccatcacggagctgatgcatcccgtgggtgctggctgccaagtcttcgaaggccgacccaagctggccacatggcggcagcgcgtggaggcagcagtgggggaggacctcttccaggaggcccatgaggtcattctgaaggccaaggacttcccacctgcagaccccaccataaagcagaagctgatgccctgggtgctggccatgatccggtgagctgggaaacctcacccttgcaccgtcctcagcagtccacaaagcattttcatttctaatggcccatgggagccaggcccagaaagcaggaatggcttgcctaagacttgcccaagtcccagagcacctcac

SEQ ID NO: 16539 - DNA, 723 bp, Artificial Sequence
  derived and/or modified sequence
atgggcctggagctgtacctggacctgctgagccagccctgcagagctgtgtacatctttgccaagaagaatgacatcccctttgagctgcgcatcgtggacctgatcaagggccagcacctgagtgatgcctttgcccaggtgaaccccctgaagaaggtgcctgccctgaaggatggagacttcaccctgacagaatctgtggccatcctgctgtacctgaccaggaagtacaaggtgcctgactactggtacccccaggacctgcaggcccgggcccgggtggatgagtacctggcctggcagcacaccaccctgcggcgcagctgcctgcgggccctgtggcacaaggtgatgtttcctgtgttcctgggggagcctgtgagcccccagaccctggccgccaccctggccgagctggatgtgaccctgcagctgctggaggacaagttcctgcagaacaaggccttcctgaccggcccccacatcagcctggccgacctggtggccatcacagagctgatgcaccctgtgggcgccggctgccaggtgtttgagggccggcccaagctggccacctggaggcagagggtggaggccgctgtgggggaggacctcttccaggaggcccatgaagtcatcctgaaggccaaggacttccccccagctgaccccaccatcaagcagaagctgatgccctgggtgctggccatgatcagatag

SEQ ID NO: 16540 - DNA, 723 bp, Artificial Sequence
  derived and/or modified sequence
atgggcctggagctgtacctggacctgctgagccagccctgccgggcagtttatattttcgcaaaaaagaatgatatcccgttcgaattacgtattgtcgatctgatcaaagggcagcacctgagcgatgccttcgcccaggtcaaccctctcaagaaagtgccagctttaaaagatggcgacttcaccctcaccgaaagtgtagccatcctgctgtatcttaccaggaagtataaggtccccgactactggtaccctcaggacctgcaagccagggcccgggtggatgaatatctcgcctggcagcacaccactttgcgccgaagctgcctgcgggccctgtggcacaaggttatgtttcctgtgttcctcggcgaacctgtgagtccccagaccctagctgctaccctggccgaacttgatgtgactttgcagctccttgaagataagtttctccaaaataaggcctttctgaccggacctcacatctccctggcagatctagtcgcaattaccgaacttatgcatcccgtgggtgccggatgccaagtgtttgagggaagacccaaactcgccacatggagacaacgcgtggaagcggcagtcggtgaggatctttttcaggaggcgcacgaggtgattcttaaagcaaaagattttccacccgctgatcccaccattaaacagaaactcatgccatgggtgttggcgatgataaggtag

SEQ ID NO: 16541 - DNA, 723 bp, Artificial Sequence
  derived and/or modified sequence
atggggctggagctctacctggatctgctgagccaaccctgtcgcgctgtgtacattttcgccaaaaaaaacgacatcccgtttgaattaagaatcgtggatctgatcaagggtcagcacctgagcgatgcatttgcgcaagtcaatccattaaagaaggtgccggcactcaaagacggcgattttaccctgaccgagagtgttgcaatcctcctctacctgactaggaaatacaaggtgcccgattattggtatccacaagatctgcaggccagagcaagagtggatgagtatcttgcttggcagcacaccacactgaggaggagctgcctccgcgctctctggcacaaggtgatgtttcccgtgttcctgggggagccagtatccccccagaccctagctgccacacttgctgaactggatgttactctacagttactggaggataagtttttacagaataaagcatttctcacagggcctcacatatccctcgccgaccttgtcgcaattaccgagctgatgcaccccgtcggtgctggatgtcaagtgtttgaaggtcgacccaaactggcaacatggcggcaaagggttgaggcagccgtgggcgaggacctattccaggaggcccacgaagtgatcctcaaggccaaggacttcccaccagcagatcccactatcaagcaaaagctgatgccttgggttctggccatgattcggtag

SEQ ID NO: 16542 - DNA, 723 bp, Artificial Sequence
  derived and/or modified sequence
atgggcctggagctgtacctggacctgctgagccagccctgcagagccgtgtacatcttcgccaagaagaacgacatccccttcgagctgagaatcgtggacctgatcaagggccagcacctgagcgacgccttcgcccaggtgaaccccctgaagaaggtgcccgccctgaaggacggcgacttcaccctgaccgagagcgtggccatcctgctgtacctgaccagaaagtacaaggtgcccgactactggtacccccaggacctgcaggccagagccagagtggacgagtacctggcctggcagcacaccaccctgagaagaagctgcctgagagccctgtggcacaaggtgatgttccccgtgttcctgggcgagcccgtgagcccccagaccctggccgccaccctggccgagctggacgtgaccctgcagctgctggaggacaagttcctgcagaacaaggccttcctgaccggcccccacatcagcctggccgacctggtggccatcaccgagctgatgcaccccgtgggcgccggctgccaggtgttcgagggcagacccaagctggccacctggagacagagagtggaggccgccgtgggcgaggacctgttccaggaggcccacgaggtgatcctgaaggccaaggacttcccccccgccgaccccaccatcaagcagaagctgatgccctgggtgctggccatgatcagatag

SEQ ID NO: 16543 - protein, 244 aa, Artificial Sequence
  derived and/or modified sequence
MGLELFLDLVSQPSRAVYIFAKKNGIPLELRTVDLVKGQHKSKEFLQINSLGKLPTLKDGDFILTESSAILIYLSCKYQTPDHWYPSDLQARARVHEYLGWHADCIRGTFGIPLWVQVLGPLIGVQVPKEKVERNRTAMDQALQWLEDKFLGDRPFLAGQQVTLADLMALEELMQPVALGYELFEGRPRLAAWRGRVEAFLGAELCQEAHSIILSILEQAAKKTLPTPSPEAYQAMLLRIARIP

SEQ ID NO: 16544 - DNA, 1094 bp, Artificial Sequence
  derived and/or modified sequence
ccgcgctcagcgccttcactgccatccccgctgtccttgccgcccccgccatgggcctagagctgtttcttgacctggtgtcccagcccagccgcgccgtctacatcttcgccaagaagaatggcatccccttagagctgcgcaccgtggatttggtcaaagggcagcacaagagcaaggagttcttgcagatcaacagcctggggaaactgccgacgctcaaggatggtgatttcatcttgaccgaaagctcggccatcctgatttacctgagctgtaagtaccagacgccggaccactggtatccatctgacctgcaggctcgtgcccgtgttcatgagtacctgggctggcatgccgactgcatccgtggcacctttggtatacccctgtgggtccaggtgttggggccactcattggggtccaggtgcccaaggagaaggtggaacgcaacaggactgccatggaccaggccctgcaatggctggaggacaagttcctgggggacaggcccttcctcgctggccagcaggtgacactggctgatctcatggccctggaggagctgatgcagccggtggctctcggctatgaactgtttgagggacggccacgactggcagcatggcgtggacgagtggaggctttcctgggtgctgagctatgccaggaggcccacagcatcatcttgagcatcctggaacaggcggccaagaaaaccctcccaacaccctcaccagaggcctatcaggctatgctgcttcgaatcgccaggatcccctgaagggtctgggatgggggccaggagattagcaacaaggattcattctgttacttacttgcccctttttatctttccctcttgccccagtcccttctctccagcttcatgtgaagctctgcacagacaagacactcagtgtccttggcagtgctgctactcctcaggtgcagcatacataaccagtaagagactaaatctgcaatatataaagagctcctacaaatcagtaacatgaagaacactcaaaaattggcaaatgtcatcagtgttttaaacagaataaagattccaaacactttgaatagagaa

SEQ ID NO: 16545 - DNA, 735 bp, Artificial Sequence
  derived and/or modified sequence
atggggctagaattatttctagatctggtcagccagccctcccgcgccgtctacatctttgctaagaagaacggaatccctctcgaactgcggactgtggatctagttaaaggacagcacaaaagtaaggaattcttacaaatcaatagcctgggaaagctgcctactttgaaggacggagatttcattctcacagaatctagtgctattctgatataccttagctgcaagtatcagacacccgatcactggtacccgtctgacttacaggcacgagccagagttcacgagtatttaggatggcatgccgattgcattcgcggcacattcggcatcccgttgtgggttcaggtcctaggccctttaatcggagttcaagtacccaaagaaaaggtggaacggaaccgtacagctatggaccaggcattgcagtggctggaggacaaatttctgggggatcggccgtttctggcggggcaacaggtgaccctcgccgacctgatggccctggaggaacttatgcagcctgtggcccttggttacgagctcttcgaagggcggcctcggctagctgcttggcggggacgcgttgaagcttttctcggagccgaattgtgtcaggaggctcacagtatcatacttagcatcctggaacaggcagccaagaagaccttgcccaccccctcaccggaagcttaccaagccatgcttttaagaattgcccgtatcccatag

SEQ ID NO: 16546 - DNA, 735 bp, Artificial Sequence
  derived and/or modified sequence
atgggcctggagctgttcctggacctggtgtcccagcccagcagagctgtgtacatctttgccaagaagaatggcatccccctggagctgaggacagtggacctggtgaagggccagcacaagagcaaggagttcctgcagatcaacagcctgggcaagctgcccaccctgaaggatggagacttcatcctgacagagagcagcgccatcctgatctacctgagctgcaagtaccagaccccagaccactggtaccccagcgacctgcaggcccgggcccgggtgcatgagtacctgggctggcatgctgactgcatccggggcaccttcggcatccccctgtgggtgcaggtgctgggccccctgattggagtgcaggtgcccaaggagaaggtggagaggaacagaacagccatggaccaggccctgcagtggctggaggacaagttcctgggggaccggcccttcctggccggccagcaggtgaccctggccgacctgatggccctggaggagctgatgcagcctgtggccctgggctatgagctgtttgagggccggccccggctggccgcctggaggggccgggtggaggccttcctgggcgctgagctgtgccaggaggcccacagcatcatcctgagcatcctggagcaggccgccaagaagaccctgcccacccccagccctgaggcctaccaggccatgctgctgcgcatcgcccgcatcccctag

SEQ ID NO: 16547 - DNA, 735 bp, Artificial Sequence
  derived and/or modified sequence
atgggcctggagctgttcctggacctggtgagccagcccagccgggccgtgtatatcttcgctaaaaagaatggtatccctctagagctgcgtacggtggaccttgttaaggggcagcataaaagtaaggaattccttcaaatcaactccctgggaaaactgcctactctcaaggatggagatttcatcctgaccgagagctctgcaatcttgatttatctttcctgcaaataccagacgcctgatcactggtaccctagcgacctgcaggcgagagcaagggttcacgagtatctcggttggcacgctgactgcatcagggggacgtttggaatccctttgtgggttcaagtcctgggcccactgatcggtgtgcaggtgcctaaagaaaaggtcgagaggaaccggaccgcgatggatcaagctttgcagtggctggaggataagttcctgggcgatagaccgttcttagcaggtcagcaggtaacactagctgacctcatggccctggaggagttgatgcaaccagtggccctcggttatgagcttttcgagggacgccctcgcctggccgcctggaggggacgagtggaggccttcctcggggccgagctctgccaggaggctcattccataatcttatctatcttagaacaggccgccaagaaaactctccccacgccttcacctgaggcataccaggctatgctgctcagaattgctcggataccatag

SEQ ID NO: 16548 - DNA, 735 bp, Artificial Sequence
  derived and/or modified sequence
atgggactggaactgttcctggatcttgtgtcccagccctcccgggcagtttatatatttgctaaaaagaacggaattccactggagcttagaacggttgatctggtgaagggtcagcataagagcaaagaattcctccaaataaattcccttggcaagttacctaccctcaaagacggagatttcatccttaccgaatcatccgccattctcatctatctgtcgtgcaagtatcaaacacctgatcactggtacccaagtgacctgcaagctagggctcgagtacacgagtaccttggatggcatgccgactgcattagagggactttcggtatcccgctgtgggtccaggtactgggacccctgatcggtgtccaagtaccgaaggaaaaggttgagcggaatcgtaccgcgatggaccaagcccttcagtggctcgaagacaagttcctcggtgaccgacctttcttggcagggcagcaggtcaccttggccgacctaatggcactggaggaattgatgcaacctgttgcccttggctatgagctgtttgaaggacgccctcggttggccgcatggcggggtagagttgaagcctttctgggagcagaactctgccaggaggcccattctatcattctctccattctggagcaagccgcaaaaaagacattgcccaccccttcccccgaggcctatcaggcgatgttgctgcgcattgctaggatcccctag

SEQ ID NO: 16549 - DNA, 735 bp, Artificial Sequence
  derived and/or modified sequence
atgggcctggagctgttcctggacctggtgagccagcccagcagagccgtgtacatcttcgccaagaagaacggcatccccctggagctgagaaccgtggacctggtgaagggccagcacaagagcaaggagttcctgcagatcaacagcctgggcaagctgcccaccctgaaggacggcgacttcatcctgaccgagagcagcgccatcctgatctacctgagctgcaagtaccagacccccgaccactggtaccccagcgacctgcaggccagagccagagtgcacgagtacctgggctggcacgccgactgcatcagaggcaccttcggcatccccctgtgggtgcaggtgctgggccccctgatcggcgtgcaggtgcccaaggagaaggtggagagaaacagaaccgccatggaccaggccctgcagtggctggaggacaagttcctgggcgacagacccttcctggccggccagcaggtgaccctggccgacctgatggccctggaggagctgatgcagcccgtggccctgggctacgagctgttcgagggcagacccagactggccgcctggagaggcagagtggaggccttcctgggcgccgagctgtgccaggaggcccacagcatcatcctgagcatcctggagcaggccgccaagaagaccctgcccacccccagccccgaggcctaccaggccatgctgctgagaatcgccagaatcccctag

SEQ ID NO: 16550 - protein, 732 aa, Artificial Sequence
  derived and/or modified sequence
MSRRKISSESFSSLGSDYLETSPEEEGECPLSRLCWNGSRSPPGPLEPSPAAAAAAAAPAPTPAASAAAAAATAGARRVQRRRRVNLDSLGESISRLTAPSPQTIQQTLKRTLQYYEHQVIGYRDAEKNFHNISNRCSYADHSNKEEIEDVSGILQCTANILGLKFEEIQKRFGEEFFNICFHENERVLRAVGGTLQDFFNGFDALLEHIRTSFGKQATLESPSFLCKELPEGTLMLHYFHPHHIVGFAMLGMIKAAGKKIYRLDVEVEQVANEKLCSDVSNPGNCSCLTFLIKECENTNIMKNLPQGTSQVPADLRISINTFCRAFPFHLMFDPSMSVLQLGEGLRKQLRCDTHKVLKFEDCFEIVSPKVNATFERVLLRLSTPFVIRTKPEASGSENKDKVMEVKGQMIHVPESNSILFLGSPCVDKLDELMGRGLHLSDIPIHDATRDVILVGEQAKAQDGLKKRMDKLKATLERTHQALEEEKKKTVDLLYSIFPGDVAQQLWQGQQVQARKFDDVTMLFSDIVGFTAICAQCTPMQVISMLNELYTRFDHQCGFLDIYKVETIGDAYCVAAGLHRKSLCHAKPIALMALKMMELSEEVLTPDGRPIQMRIGIHSGSVLAGVVGVRMPRYCLFGNNVTLASKFESGSHPRRINVSPTTYQLLKREESFTFIPRSREELPDNFPKEIPGICYFLEVRTGPKPPKPSLSSSRIKKVSYNIGTMFLRETSL

SEQ ID NO: 16551 - DNA, 2199 bp, Artificial Sequence
  derived and/or modified sequence
atgtctagacgtaaaatatcaagcgagagcttctcctccctgggaagcgactatctggagacaagtcctgaagaggaaggggagtgtcctctctctcgcctgtgctggaacgggagcagaagccctcccgggccgctagagccttcacctgctgctgctgctgctgctgcggccccagctcctaccccagcagccagcgcagctgcagctgcagccacggccggggcccggagagtccagagaaggcgcagagtcaatctcgattccttgggcgagagcattagccgactcaccgccccctcacctcagacaatccagcaaaccctgaaacggaccctgcagtactatgagcaccaggtaattggataccgggatgctgagaagaacttccataatatctcaaatcgctgtagctacgccgatcactccaataaagaagaaatcgaggatgtctccggcatcctgcagtgtacggcaaatatcttgggcctgaagttcgaggagattcagaaacgctttggcgaagagttttttaacatctgcttccacgagaatgagcgcgtgctccgggcggtagggggcaccctgcaggacttcttcaacgggttcgacgccctattggaacatattaggacctcatttggaaagcaggccacgctggagtctccatcttttctttgtaaggagctaccagaagggaccctgatgctccattatttccacccccatcacatcgtgggtttcgctatgctgggcatgatcaaagcagccggcaagaaaatctaccgcctggacgtggaggtcgagcaagttgcaaatgagaagctgtgctcagatgtgtcaaatcctggtaattgttcctgcctgacttttctgattaaagaatgcgagaatactaacattatgaagaaccttccacagggcacctcccaagtgcccgccgacctccggatatctatcaacaccttctgccgcgcatttccgtttcatctgatgtttgatcctagtatgagcgttctgcaactaggagaaggcctgcggaagcagttgcgttgcgatacccacaaggtgttgaagttcgaagactgtttcgaaatcgtttctccaaaggtcaacgccacctttgagagagtcctgctcaggctctctacccctttcgtgatcaggactaagccagaagctagcggctctgaaaataaagacaaagtgatggaggtgaaagggcagatgatacacgtgcccgagtctaactctattctgtttcttggaagtccgtgtgtggataagcttgacgaattaatgggcagaggtttgcatctgagcgacatccctatccacgatgctactcgggatgtgattttggtgggagaacaggcgaaggcccaggacggtctcaagaaaaggatggataaactcaaggctaccttggagagaactcaccaggcactggaggaagaaaagaagaaaaccgtagatcttctgtatagtatctttccaggcgacgtagcccagcagctctggcaaggacagcaggttcaagcacgcaaattcgacgatgtaaccatgttattcagcgatatcgtgggtttcactgccatttgcgcccagtgcaccccgatgcaagtcatctccatgttgaacgaactttataccagatttgaccaccagtgtggcttcctagacatctataaggtcgaaacaattggcgatgcctattgtgtcgccgcgggcctgcaccgcaagagcctttgtcacgcgaagccaattgcgctgatggccctcaagatgatggagctgtcggaggaggtgttgacccctgacgggcggccgatacagatgagaatcggtattcatagcggttctgtactagcgggcgttgtcggagtgcggatgcctcgctactgtctgtttggcaacaatgtcacactcgcatcaaagtttgaatcaggatctcatccgcggagaattaacgtgtcgcctacgacataccagcttctgaagcgcgaagagtctttcacttttataccccggagcagagaagagctgcctgataacttccctaaagagattcctgggatttgctactttttggaggtgaggacgggaccgaaaccaccaaagcctagtttgagttcctctcgaatcaagaaggtttcctataatattggcacaatgttcctacgcgagacgtccctttag

SEQ ID NO: 16552 - DNA, 5795 bp, Artificial Sequence
  derived and/or modified sequence
gaggcgggagcagagagggaaagggggcgagataggcgcgcaggcggcagaagcctctgcctctgcctccccttctgcttgggccgcagccctccccgccccgccgaccgcggtcacacactctcggagcctccccgtgagcgggagcgcggcgcacggcgatgcgccgaggcgggcgctgaggcggcgccgcgcgagcagcagcagaggcggcggcggcccccagcccagcccggcgccgccgccgagcccgggccccaaggtgcggcggcgccccaagttcccgccatgagcagccggctcggggggctccgcggccccggggactcccgccccgccgggcgcgaccgcagcgccccgcggccccgacgcgcttaacgttgtcgcttgccggtcccgccaccgccgcctccgccgccgctcgcgtcctcgccgccaccgcctcggccgctgcagctccgccggcagcatgtctcgaaggaagatttcgtccgagtccttcagctccctgggctccgactacctggagaccagcccggaggaggagggggagtgccccctgtctaggctctgctggaatggcagccggagcccgcccgggccgctggagcccagcccggccgcagctgccgctgccgccgccccggccccgaccccggctgcttctgccgccgccgccgctgccactgccggggccaggagggtgcagcgccggaggcgggtcaacctggactcgctgggcgagagcatcagccgcctgacggcgccctcgcctcagacgatacagcagactctcaagaggacactgcagtattatgaacatcaagttattggttacagggatgcagaaaagaatttccacaatatctctaacagatgctcctatgcagaccactccaacaaagaagaaattgaagatgtctcaggaattcttcagtgtactgctaatatactcggtttgaagtttgaggaaattcaaaaaagatttggtgaagagttctttaatatatgctttcatgagaatgagagagtccttcgagctgtaggtggcactttgcaggacttttttaacggctttgatgctttgttggaacacattagaacttcttttggaaaacaggccactctggagtcaccatctttcctatgcaaagagctccctgaaggtactctcatgctccactacttccaccctcaccatattgtggggtttgcaatgctggggatgattaaggctgcaggaaagaagatctatcggctggatgtggaagtggaacaggttgcaaatgagaagctatgctctgatgtttcaaacccaggcaattgtagctgtcttactttccttatcaaagaatgtgaaaatactaatatcatgaagaaccttccacagggaacctcccaagttcctgcggacctcagaattagcatcaacaccttctgtagagccttccctttccacttgatgtttgatcccagcatgtcagtccttcagttgggggaaggtctaaggaagcagcttcgatgtgacactcacaaagtgctcaagtttgaggactgcttcgagattgtatctccaaaggttaatgccacctttgaaagggtcctgctgcgactgtctaccccgtttgtgattagaaccaagcctgaggcttctggctctgaaaataaagacaaggtgatggaagtcaaaggacaaatgatccatgttccagaatcaaattccattttatttttgggctctccatgtgtggacaagttggatgaactcatgggccgagggctacatctctcagacatccctatccatgatgccacccgagatgtcattttggttggtgagcaggcaaaggcccaagatgggttgaagaaaaggatggataaattaaaggcaactttagaaagaactcaccaggccctggaagaagagaaaaagaagacagtggatcttctatattctattttccctggtgatgtagcccagcaattatggcaagggcagcaagtacaggccagaaagtttgatgatgtcaccatgctcttttcagacattgttggcttcacagccatatgtgcccagtgtactcccatgcaagtaatcagcatgctgaatgaactgtacaccagatttgaccaccagtgtggatttttggatatttataaggtggaaacaataggtgatgcctactgtgttgcagcagggctccacagaaaaagcctctgccatgctaaacccattgctctgatggccttgaagatgatggaactttcagaagaggtgctgacacctgatggaagaccgattcagatgaggataggaattcactcaggctccgtgctggctggagttgttggggtgcgaatgccacgttattgcctgtttggaaataatgtcacactggcaagcaaattcgagtcgggaagtcaccctcggcgcatcaatgtcagcccaaccacttaccaattattaaaacgagaagaaagtttcacattcattccgcggtctcgtgaagagcttccagacaactttccaaaggaaattcctgggatctgctatttcctggaggtaaggactggtccaaagccaccaaagccttctctttcttcgtcgagaataaaaaaggtttcctacaacatcggcaccatgttcctccgggagacaagcctctgagacctgctacagatcaaagactcctccaaaaagcacaagcccagaacatgggtcaccaatggggggtggaaagagattgtgtctctttcattgctttgttgagaacaagcagcaaaatttctgtattatgtcaggcaataatcctactaaaaggtggaggtgaccgctgtcaataaaaagccggaggatgagggaaataagatgtgtccattcatatgagtggttttggtcatatatatacacatatattttaattacaagtgtgggtcccctttcagaactaaccaataaatagattccatgttttcttgtttatcacacatacaagtatctttccctatatatttgtaccacttttgagagccagttttgattatatattcctacatttagtgagttggtgggtgaggaatattttctaagtttctttttctgaacagacatttcatacatgtatcatggcagtgtggtaaacttcccaactggaagaattgtaactcggcaaaatattttagggatattacctatttttatacatatctcttctagataactacatttcgcacaacattattagattttcagaatctgcttctgtattgttagtatattatatataatgctaacctattaatctaatatagtttcccttatttagagagatcagtgcttcgactgagaatacatataaccaaggatttcagataccaagaaagcattatatgtctgcttagtaaatatatcttttagatttaactaatgtagcatggaatccagaggaaatggaatttcctaacaccagatgtatctgtaaccaagattaaagaaaggtctttttgccaccttctaacaaatatcagttaaaatgaaatgctttgctacactggatccttttcaacttagcacttacaaatataggtagcttttgcaacactaaactgcattctaataaacagcattcagctaaatgacatgttagttacccccttcctcttccccagttgatgcctcctaagagccgactgctattcttgagaacaaattcctggatactggcattagtgacaaagaagtgtcaggacagtttgccaagaatgttgtttcttcttgtacaacacaaagcaaggaaacctctgtattttatggctttgaggttttaaaaaatgttctgcagtttgattgatatggcttttaaattcagtgaatcactttcatgaatactgaagtaggtataatcttcagaactagtaatcattatagttacagataggattccatcgcatgtcctgctcaaatgaagacctgttctcattaatcaatactgcatgaaaatattactggctcacactaaaattaggagcatcaggtgtccagagttttcctgtttgggttcagatataaaatctaagtttctattgaggttaataagctggaagcatttgtttcctttaagccttggagaggtcattttcttactcattgatagcttatgtctactgaatgcaatattcttttctgttcagggattttggctgcattatgatttggttatgacataactcagttaaggaatatatttactaatttccaatgtagtctatgaggttcatttaatgtttttaaattttctatgtgtgtggctagaaggcatttgtagatatgcaaatatttgttataatcctgatcccttttataatttgagttattttcttgccctgggggtttacaaggacacgagtgcaacactctttatatggagaagacaggaaatagaccttgagctctaaacctttgcctgaccccctcttctgtgggcctgtgtttctggacaatggggaggtttacagccagtatgagcagagcagactgggagcacctcaatcctcatgcttatattagaaaatgccttagcaatgttgatgggctccttgtagcactggagcatggggagggaacaagctcactgatgtcatttatgcctattgtcttcagtaacttagaacttattatggtatattaaatcaataaaatgttggtgatgaacaatgtgttttgtaaccataaggctgaaagggacttccaggaatatccaatctatttctctcactttttataaagatttgtctaagcaactactctaaacacatatttattatctccatacttaagaatatctacgggaagcatatttgaaaagcatcattggaaatccacctcaatactagtgataggcctggagagaagtattgtatttatatatctcaatttatcagaagaatcacaaattctgtattagtttatatgattttacttagagaataagtatccatttacattgccataaatgtcacgatgaagaacgtgccagagatttcttatttatcactgacaggatgtcaactacatttttcatacattataacctaagtgtattttcacagctatagtccgagataatggtccaatttgttatcattttgctaatctattatagttgattattgtagttacaatgttgctatatatgtttatgaggtactatataaaatgtctgttcattcaaacttcaatcacagaagttagaagatggagaaaaaattatatttttatttgtcctacacaatgccatctacatctcttctcttaggaattgtgattgtaacaatgtggtggcatttgttatttcatatgacttttatctatacagtattctcacttacttacaaactattaccaacagcatgcattttagtatggcagatacaagaaatttgtgtgatgttcccttagaaaccaaatgatattaaattggggaaatggttttaacccactctgcaagggatactttaaaatataatttggcacctatagctcttgcattttaatattcttttaagctgctgtttggaagaaggcaccttataactagccattagcaccaaagcatcacgttggtatcaggattattttgatggagagaatgtcatcatttgcaaataaatcagttatctaacaaaatcagaatcccccaatatgtactcagaatgtactaccctgtatcttctttgtggaccttaatcattaggtaacattggccataataaaaaataataatatgcttcagaaa

SEQ ID NO: 16553 - DNA, 2199 bp, Artificial Sequence
  derived and/or modified sequence
atgagcaggaggaagatcagcagcgagagcttcagcagcctgggcagtgactacctggagaccagccctgaggaggagggggagtgccccctgagccggctgtgctggaatggcagccgcagccccccaggccccctggagcccagccctgctgctgctgctgctgctgctgccccagcccccaccccagctgccagcgctgctgctgctgctgccacagctggggccaggagagtgcagaggagaagaagagtgaacctggacagcctgggggagagcatcagccggctgacagcccccagcccccagaccatccagcagaccctgaagaggaccctgcagtactatgagcaccaggtgattggctacagagatgctgagaagaacttccacaacatcagcaaccgctgcagctatgctgaccacagcaacaaggaggagattgaagatgtgtctggcatcctgcagtgcacagccaacatcctgggcctgaagtttgaggagatccagaagagatttggagaggagttcttcaacatctgcttccatgaaaatgaaagagtgctgcgggctgtgggcggcaccctgcaggacttcttcaatggatttgatgccctgctggagcacatccgcaccagctttgggaagcaggccaccctggagagccccagcttcctgtgcaaggagctgcctgagggcaccctgatgctgcactacttccacccccaccacatcgtgggctttgccatgctgggcatgatcaaggctgctgggaagaagatctaccgcctggatgtggaggtggagcaggtggccaatgagaagctgtgcagtgatgtgagcaaccctggcaactgcagctgcctgaccttcctgatcaaggaatgtgagaacaccaacatcatgaagaacctgccccagggcaccagccaggtgcctgctgacctgcgcatcagcatcaacaccttctgccgggccttccccttccacctgatgtttgaccccagcatgtctgtgctgcagctgggggagggcctgaggaagcagctgcgctgtgacacccacaaggtgctgaagtttgaggactgctttgagatcgtgagccccaaggtgaatgccacctttgagcgggtgctgctgcggctgagcacccccttcgtcatccgcaccaagccagaggccagcggcagcgagaacaaggacaaggtgatggaggtgaagggccagatgatccacgtgcctgagagcaacagcatcctcttcctgggcagcccctgtgtggacaagctggatgagctgatgggccggggcctgcacctgagtgacatccccatccatgatgccaccagagatgtgatcctggtgggggagcaggccaaggcccaggacggcctgaagaagaggatggacaagctgaaggccaccctggagaggacccaccaggccctggaggaggagaagaagaagacagtggacctgctgtacagcatcttccctggagatgtggcccagcagctgtggcagggccagcaggtgcaggccaggaagtttgatgatgtgaccatgctgttcagtgacatcgtgggcttcaccgccatctgtgcccagtgcacccccatgcaggtgatctccatgctgaatgagctgtacaccaggtttgaccaccagtgtggcttcctggacatctacaaggtggagaccatcggagatgcctactgtgtggccgccggcctgcacaggaagagcctgtgccacgccaagcccatcgccctgatggccctgaagatgatggagctgtctgaggaggtgctgaccccagatggccggcccatccagatgagaattggcatccacagcggctctgtgctggccggcgtggtgggcgtgaggatgccccgctactgcctgtttggaaacaacgtgaccctggccagcaagtttgaaagtggcagccacccccggcgcatcaacgtgagccccaccacctaccagctgctgaagcgggaggagagcttcaccttcatccccaggagccgggaggagctgcctgacaacttccccaaggagatccctggcatctgctacttcctggaggtgaggacaggccccaagccacccaagcccagcctgagcagcagccgcatcaagaaggtgtcctacaacatcggcaccatgttcctgcgggagaccagcctgtag

SEQ ID NO: 16554 - DNA, 2199 bp, Artificial Sequence
  derived and/or modified sequence
atgagccggcggaagatcagcagcgagagcttcagcagcctgggctctgactacctggagaccagcccagaagaggagggagagtgcccactgagccggttgtgttggaacggttccaggtcccctcctgggcccctggaaccgagcccggccgctgcagcagcagctgctgctccagctcccacacccgccgcctccgcggccgccgcggccgccaccgcaggggcccggagagtgcagcggcgacggcgagttaatttggatagtcttggagagtccatttcaaggttgacagcaccttcaccccagactatccagcaaactctgaagcgcacactacaatactacgagcatcaggtcattggctaccgcgacgcagagaaaaacttccacaatatctccaatagatgttcttacgctgaccactcgaacaaagaggagattgaggatgtgtccggcatcctgcagtgcacggccaatattctgggcctcaagttcgaagagatccaaaaacgatttggagaagaattctttaatatttgttttcatgagaacgagcgagtcttgagggctgtaggggggacgctgcaagacttttttaatgggtttgatgccctgctcgagcatatccgcacctcctttggaaagcaagcgactcttgagagccctagcttcctctgtaaggagctaccggagggcactctcatgttacactattttcacccgcaccatatcgtgggattcgccatgctgggaatgatcaaagccgctggcaagaagatttatcgcctggacgtggaggtggagcaagtggccaatgaaaaactgtgctcggacgtgagtaatccaggcaactgttcttgtctgacatttctgatcaaggagtgcgagaacaccaacatcatgaaaaaccttcctcagggtacctctcaggtccccgccgatcttaggatttccattaatacattttgccgcgccttcccctttcacctgatgtttgatccctctatgagcgttctgcagctgggcgaagggttaaggaaacagctccgctgtgatacccataaggttctcaaatttgaagactgctttgagatagtttcacccaaagttaatgcaacatttgagagggtactgcttaggctatcgacaccttttgttatccggaccaaacctgaagcctcaggctccgagaacaaggacaaagtcatggaagtgaagggacaaatgattcacgtgcccgagagcaattccatcctctttctagggagtccatgtgtggacaaacttgatgagcttatgggacgcgggttgcaccttagcgatattccaatacacgacgctactcgtgacgtcatcttagttggggagcaggcaaaggctcaagatggactgaaaaagcggatggacaagcttaaggctacactagagcgaacacaccaggccttggaggaggagaaaaagaaaactgtcgacctcttgtattctatattccccggcgacgttgctcaacaactctggcaagggcagcaggtgcaggctaggaagtttgacgatgtaaccatgctcttttctgatatcgttggcttcaccgctatctgcgctcaatgcacccccatgcaagtgattagtatgctcaacgaattatacacgcggtttgatcaccagtgtgggttcctcgatatctacaaagtggaaactatcggcgatgcctactgcgtggcggccggtttacacaggaagtcactgtgccatgccaaacccatcgcactaatggctctaaaaatgatggaattgtccgaagaggtgctcacacctgatggaagaccaattcaaatgcgcattggaatacactccggttccgtgctagccggcgttgtcggcgttcggatgcctcgatactgtttattcggcaataacgtcactctcgcatctaaatttgaatcaggctcccacccacgcaggattaatgttagcccgactacctaccaattgcttaagcgagaagagagtttcacatttataccgcgtagtcgcgaggagctgccggataattttccgaaagaaatcccgggcatctgttacttcctcgaggttagaacggggccgaagccaccaaagccctctctatcaagcagccggattaagaaagtaagttacaatatcggtacaatgttccttcgagagacatctctatag

SEQ ID NO: 16555 - DNA, 2199 bp, Artificial Sequence
  derived and/or modified sequence
atgagccgacgcaagatctcatctgaatctttttctagcctagggtcagactatctggagacctctcctgaagaagagggtgaatgccctttgtctcggctgtgctggaacggtagcagatccccgccagggcctctcgagcctagccctgctgcagcagcggctgctgcagctcccgctccaactccagcggctagcgccgctgccgcagcggctaccgcaggggctcgacgcgtgcagcggcgaaggcgcgtgaacctcgactccctcggcgaatcaatttcacggctgactgcccctagcccacaaactatccagcagacactgaagcgcacactacagtactatgagcatcaagtcatcggataccgcgatgctgagaagaacttccataatatctctaaccgttgctcatacgcagaccattctaacaaggaggaaatcgaagatgtctcggggatcctgcagtgcaccgcgaacattttgggacttaaatttgaagagatccagaagaggttcggggaggaatttttcaacatttgtttccacgaaaatgagagagtgctcagggccgtgggcggaaccctgcaggacttttttaacggatttgacgccctactggagcacatccggaccagtttcggtaagcaggcaaccttagaatctccatccttcctgtgcaaggaacttccagagggcacgcttatgctgcattactttcacccccatcatattgtgggctttgcgatgctcggcatgatcaaggccgcagggaaaaaaatataccggctggatgtggaagtggagcaggtcgccaacgagaagctgtgctccgacgtcagcaaccctggcaattgtagctgcctgactttcctgatcaaagaatgtgagaatacgaacattatgaagaacctgccacaaggaacctcgcaggttcccgcagatctgcgcattagtatcaatacattctgcagagccttcccatttcatcttatgtttgatccatctatgagcgtcctgcagctgggagagggcctccgcaagcagttacgatgtgatacccataaagtgctgaaatttgaggattgctttgagatcgtgtccccaaaggtgaatgcgaccttcgaaagagttcttttgaggttgtccactccattcgtgatccggacaaagccagaagcctccggatctgaaaacaaggataaggtgatggaagtgaaaggtcagatgatacatgtccccgagagcaattctattctgtttctgggaagtccatgcgtagacaagctggacgagctgatgggtaggggtcttcacctgtctgatattcctatccatgacgccaccagagatgttattctggttggagagcaggccaaagcacaggacggtctgaagaaacggatggacaagttaaaggctacactggagaggactcatcaggccctggaggaggaaaagaagaaaactgttgacctcctctactccatctttccaggagatgtggcccagcagctatggcagggacagcaggtgcaggctcggaaattcgacgacgtcacaatgctgtttagtgatatcgtggggtttaccgctatttgtgcacagtgcacccccatgcaagtgattagcatgttgaatgagttatacactagattcgatcaccagtgtggcttcctggacatctacaaggtagagactatcggagacgcatactgtgttgccgctggcttacacaggaagtcactgtgccatgccaaacccatcgctctcatggccctcaagatgatggagctctctgaggaagtactcacccccgatggacgacccattcagatgcgaatcgggattcattctggcagcgtcttagctggagttgtcggagtccggatgcctcgctactgtctctttggaaataatgtgaccctggcgagcaagttcgaatctggctctcaccccaggagaatcaacgtgtcgcctacgacttaccaattgctcaaacgcgaggagagcttcacattcatacccaggtcccgagaggaacttcccgacaactttcccaaagagataccgggtatctgctatttcttggaagtgagaacaggtcctaagccacctaaaccatcactctccagtagccggatcaaaaaggtgtcctacaacataggaaccatgtttttgcgggagacgtcactgtag

SEQ ID NO: 16556 - DNA, 2199 bp, Artificial Sequence
  derived and/or modified sequence
atgagcagaagaaagatcagcagcgagagcttcagcagcctgggcagcgactacctggagaccagccccgaggaggagggcgagtgccccctgagcagactgtgctggaacggcagcagaagcccccccggccccctggagcccagccccgccgccgccgccgccgccgccgcccccgcccccacccccgccgccagcgccgccgccgccgccgccaccgccggcgccagaagagtgcagagaagaagaagagtgaacctggacagcctgggcgagagcatcagcagactgaccgcccccagcccccagaccatccagcagaccctgaagagaaccctgcagtactacgagcaccaggtgatcggctacagagacgccgagaagaacttccacaacatcagcaacagatgcagctacgccgaccacagcaacaaggaggagatcgaggacgtgagcggcatcctgcagtgcaccgccaacatcctgggcctgaagttcgaggagatccagaagagattcggcgaggagttcttcaacatctgcttccacgagaacgagagagtgctgagagccgtgggcggcaccctgcaggacttcttcaacggcttcgacgccctgctggagcacatcagaaccagcttcggcaagcaggccaccctggagagccccagcttcctgtgcaaggagctgcccgagggcaccctgatgctgcactacttccacccccaccacatcgtgggcttcgccatgctgggcatgatcaaggccgccggcaagaagatctacagactggacgtggaggtggagcaggtggccaacgagaagctgtgcagcgacgtgagcaaccccggcaactgcagctgcctgaccttcctgatcaaggagtgcgagaacaccaacatcatgaagaacctgccccagggcaccagccaggtgcccgccgacctgagaatcagcatcaacaccttctgcagagccttccccttccacctgatgttcgaccccagcatgagcgtgctgcagctgggcgagggcctgagaaagcagctgagatgcgacacccacaaggtgctgaagttcgaggactgcttcgagatcgtgagccccaaggtgaacgccaccttcgagagagtgctgctgagactgagcacccccttcgtgatcagaaccaagcccgaggccagcggcagcgagaacaaggacaaggtgatggaggtgaagggccagatgatccacgtgcccgagagcaacagcatcctgttcctgggcagcccctgcgtggacaagctggacgagctgatgggcagaggcctgcacctgagcgacatccccatccacgacgccaccagagacgtgatcctggtgggcgagcaggccaaggcccaggacggcctgaagaagagaatggacaagctgaaggccaccctggagagaacccaccaggccctggaggaggagaagaagaagaccgtggacctgctgtacagcatcttccccggcgacgtggcccagcagctgtggcagggccagcaggtgcaggccagaaagttcgacgacgtgaccatgctgttcagcgacatcgtgggcttcaccgccatctgcgcccagtgcacccccatgcaggtgatcagcatgctgaacgagctgtacaccagattcgaccaccagtgcggcttcctggacatctacaaggtggagaccatcggcgacgcctactgcgtggccgccggcctgcacagaaagagcctgtgccacgccaagcccatcgccctgatggccctgaagatgatggagctgagcgaggaggtgctgacccccgacggcagacccatccagatgagaatcggcatccacagcggcagcgtgctggccggcgtggtgggcgtgagaatgcccagatactgcctgttcggcaacaacgtgaccctggccagcaagttcgagagcggcagccaccccagaagaatcaacgtgagccccaccacctaccagctgctgaagagagaggagagcttcaccttcatccccagaagcagagaggagctgcccgacaacttccccaaggagatccccggcatctgctacttcctggaggtgagaaccggccccaagccccccaagcccagcctgagcagcagcagaatcaagaaggtgagctacaacatcggcaccatgttcctgagagagaccagcctgtag

SEQ ID NO: 16557 - protein, 619 aa, Artificial Sequence
  derived and/or modified sequence
MYGFVNHALELLVIRNYGPEVWEDIKKEAQLDEEGQFLVRIIYDDSKTYDLVAAASKVLNLNAGEILQMFGKMFFVFCQESGYDTILRVLGSNVREFLQNLDALHDHLATIYPGMRAPSFRCTDAEKGKGLILHYYSEREGLQDIVIGIIKTVAQQIHGTEIDMKVIQQRNEECDHTQFLIEEKESKEEDFYEDLDRFEENGTQESRISPYTFCKAFPFHIIFDRDLVVTQCGNAIYRVLPQLQPGNCSLLSVFSLVRPHIDISFHGILSHINTVFVLRSKEGLLDVEKLECEDELTGTEISCLRLKGQMIYLPEADSILFLCSPSVMNLDDLTRRGLYLSDIPLHDATRDLVLLGEQFREEYKLTQELEILTDRLQLTLRALEDEKKKTDTLLYSVLPPSVANELRHKRPVPAKRYDNVTILFSGIVGFNAFCSKHASGEGAMKIVNLLNDLYTRFDTLTDSRKNPFVYKVETVGDKYMTVSGLPEPCIHHARSICHLALDMMEIAGQVQVDGESVQITIGIHTGEVVTGVIGQRMPRYCLFGNTVNLTSRTETTGEKGKINVSEYTYRCLMSPENSDPQFHLEHRGPVSMKGKKEPMQVWFLSRKNTGTEETKQDDD

SEQ ID NO: 16558 - DNA, 1860 bp, Artificial Sequence
  derived and/or modified sequence
atgtatgggtttgtcaaccatgccctggaattgctggtgattcgaaattatgggcctgaagtttgggaggacattaagaaagaagctcaactagatgaggagggccagttcctagtgcgcataatctatgatgatagtaagacttatgatctcgttgctgcagcgtctaaggtactcaacctgaacgccggcgaaattttacagatgtttgggaaaatgttttttgtgttttgccaggaatccgggtatgacaccatccttcgcgtcctggggtcaaatgtaagggagttcttgcagaacttggacgcactccatgaccacctggccacaatttaccccggtatgagggccccatcctttagatgtactgacgcagagaaaggaaagggccttatactccactattactcggaaagggagggcttgcaggatatcgttatcggcattattaaaacggttgctcagcaaattcacggtaccgagatcgacatgaaagttattcagcagcggaatgaggaatgtgatcacacacaatttttgattgaagaaaaggaaagcaaggaggaggatttctacgaggatctggacagattcgaggagaatggcacacaagagtccaggatcagcccatacacgttttgtaaagcatttccctttcacatcattttcgacagggatctggtcgtcacacagtgcggaaatgccatatatagagtgctgccccagctgcaacctggtaattgctctctactgagtgtcttttccttggtcagacctcatatcgacatttctttccacggcatcctctcccatataaacaccgtctttgtgttacgaagtaaggagggcctcctggacgtcgaaaagttggagtgcgaggacgagctcacaggaaccgagattagctgtctaagactgaaaggccagatgatctatctgccagaagccgactcgatcctgttcttgtgcagcccttccgtgatgaatctcgacgatcttaccagaaggggcctttacctgtccgacattcccctccacgatgcgactcgggatctggtcctcctaggagagcagttcagagaggagtataaactcactcaggaactcgaaattcttaccgatcgactgcagctaactctgcgtgcgttggaggacgaaaaaaaaaaaacagatactctactctactctgtcttaccacctagcgttgccaatgagctgcggcacaagaggccagtgccagcaaagaggtacgataatgttacaattttgttcagtgggatcgtgggcttcaatgcattctgcagcaagcatgcctccggcgagggcgctatgaagatcgtgaacctcctgaatgatctgtacacacgcttcgacactctgactgactcacgaaagaatccatttgtttacaaggtcgagaccgtgggcgataagtatatgactgtcagcgggctgcccgagccatgcatacaccacgccaggagtatttgccatctcgcactggatatgatggagattgctggccaagtgcaagtggatggcgaatcagtgcaaatcaccattggtatccataccggcgaggtggtgaccggagtgattggacagaggatgccgcgctactgtctcttcggcaacacagtgaaccttacaagccgaaccgaaaccactggcgaaaaggggaaaattaatgtgagtgaatatacctatcgttgcctgatgagcccagagaattcggatccacaatttcacttagagcatagggggcctgttagcatgaaaggcaaaaaggagcctatgcaggtctggtttctcagccgcaaaaacaccgggacggaggagacaaaacaggacgacgactag

SEQ ID NO: 16559 - DNA, 3124 bp, Artificial Sequence
  derived and/or modified sequence
gtagccgctgccgcctctgcctgggtcccttcggccgtacctctgcgtgggggctgcctccccggctcccggtgcagacaccatgtacggatttgtgaatcacgccctggagttgctggtgatccgcaattacggccccgaggtgtgggaagacatcaaaaaagaggcacagttagatgaagaaggacagtttcttgtcagaataatatatgatgactccaaaacttatgatttggttgctgctgcaagcaaagtcctcaatctcaatgctggagaaatcctccaaatgtttgggaagatgtttttcgtcttttgccaagaatctggttatgatacaatcttgcgtgtcctgggctctaatgtcagagaatttctacagaaccttgatgctctgcacgaccaccttgctaccatctacccaggaatgcgtgcaccttcctttaggtgcactgatgcagaaaagggcaaaggactcattttgcactactactcagagagagaaggacttcaggatattgtcattggaatcatcaaaacagtggcacaacaaatccatggcactgaaatagacatgaaggttattcagcaaagaaatgaagaatgtgatcatactcaatttttaattgaagaaaaagagtcaaaagaagaggatttttatgaagatcttgacagatttgaagaaaatggtacccaggaatcacgcatcagcccatatacattctgcaaagcttttccttttcatataatatttgaccgggacctagtggtcactcagtgtggcaatgctatatacagagttctcccccagctccagcctgggaattgcagccttctgtctgtcttctcgctggttcgtcctcatattgatattagtttccatgggatcctttctcacatcaatactgtttttgtattgagaagcaaggaaggattgttggatgtggagaaattagaatgtgaggatgaactgactgggactgagatcagctgcttacgtctcaagggtcaaatgatctacttacctgaagcagatagcatactttttctatgttcaccaagtgtcatgaacctggacgatttgacaaggagagggctgtatctaagtgacatccctctgcatgatgccacgcgcgatcttgttcttttgggagaacaatttagagaggaatacaaactcacccaagaactggaaatcctcactgacaggctacagctcacgttaagagccctggaagatgaaaagaaaaagacagacacattgctgtattctgtccttcctccgtctgttgccaatgagctgcggcacaagcgtccagtgcctgccaaaagatatgacaatgtgaccatcctctttagtggcattgtgggcttcaatgctttctgtagcaagcatgcatctggagaaggagccatgaagatcgtcaacctcctcaacgacctctacaccagatttgacacactgactgattcccggaaaaacccatttgtttataaggtggagactgttggtgacaagtatatgacagtgagtggtttaccagagccatgcattcaccatgcacgatccatctgccacctggccttggacatgatggaaattgctggccaggttcaagtagatggtgaatctgttcagataacaatagggatacacactggagaggtagttacaggtgtcataggacagcggatgcctcgatactgtctttttgggaatactgtcaacctcacaagccgaacagaaaccacaggagaaaagggaaaaataaatgtgtctgaatatacatacagatgtcttatgtctccagaaaattcagatccacaattccacttggagcacagaggcccagtgtccatgaagggcaaaaaagaaccaatgcaagtttggtttctatccagaaaaaatacaggaacagaggaaacaaagcaggatgatgactgaatcttggattatggggtgaagaggagtacagactaggttccagttttctcctaacacgtgccaagcccaggagcagttcttccctatggatacagattttcttttgtccttgtccattaccccaagactttcttctagatatatctctcactatccgttattcaaccttagctctgctttctattactttttaggctttagtatattatctaaagtttggcttttgatgtggatgatgtgagcttcatgtgtcttaaaatctactacaagcattacctaacatggtgatctgcaagtagtaggcacccaataaatatttgttgaatttagttaaatgaaactgaacagtgtttggccatgtgtatatttatatcatgtttaccaaatctgtttagtgttccacatatatgtatatgtatattttaatgactataatgtaataaagtttatatcatgttggtgtatatcattatagaaatcattttctaaaggagtgaattctaagttttaggggaaaaaatgcaatttattttcagactcccaaagtaagaattaacatatcatgctaagaaaatagtgactattttgaagtatgctacttccctttcagaaatatagaatacacgtttctgttattaaagtatttgattactaattcaaatcatatggcaattataattcttctaaaatgctatcatttgtaactgtatcccctgtattaaatctcattaaccacaggcagctgttacagaaagctgcattgtttcacattgagctgttacattagttcaggctaaatgttgggagctccaaccacatccaagaataaatctggaaacacactgctgggatactgctgttagagcccttcttggccttgtattcccagaaatgagctccctttccttagcttagaagaatgtgattatatccaggacatcatgttcagaaaacttagtttactttcagcatagaatgcattactgttggaataattggcctctagctcttaaatgtctctgataacttattaatatctatctttataaaatagagtgcaactacttttgtgtaaaaatgtttgcctttaaatttagtatttcatatcagcacatcgatatatgtataaatgttccatgttaatgtgtaaaagagtctgtaataaattatttttttcacgtg

SEQ ID NO: 16560 - DNA, 2355 bp, Artificial Sequence
  derived and/or modified sequence
gctgagcgccagcggaagggaaggctccgggttcgcgtccccgcgctgcccccgatgcccagcctctcccggagcggtgacagtacggatttgtgaatcacgccctggagttgctggtgatccgcaattacggccccgaggtgtgggaagacatcaaaaaagaggcacagttagatgaagaaggacagtttcttgtcagaataatatatgatgactccaaaacttatgatttggttgctgctgcaagcaaagtcctcaatctcaatgctggagaaatcctccaaatgtttgggaagatgtttttcgtcttttgccaagaatctggttatgatacaatcttgcgtgtcctgggctctaatgtcagagaatttctacagaaccttgatgctctgcacgaccaccttgctaccatctacccaggaatgcgtgcaccttcctttaggtgcactgatgcagaaaagggcaaaggactcattttgcactactactcagagagagaaggacttcaggatattgtcattggaatcatcaaaacagtggcacaacaaatccatggcactgaaatagacatgaaggttattcagcaaagaaatgaagaatgtgatcatactcaatttttaattgaagaaaaagagtcaaaagaagaggatttttatgaagatcttgacagatttgaagaaaatggtacccaggaatcacgcatcagcccatatacattctgcaaagcttttccttttcatataatatttgaccgggacctagtggtcactcagtgtggcaatgctatatacagagttctcccccagctccagcctgggaattgcagccttctgtctgtcttctcgctggttcgtcctcatattgatattagtttccatgggatcctttctcacatcaatactgtttttgtattgagaagcaaggaaggattgttggatgtggagaaattagaatgtgaggatgaactgactgggactgagatcagctgcttacgtctcaagggtcaaatgatctacttacctgaagcagatagcatactttttctatgttcaccaagtgtcatgaacctggacgatttgacaaggagagggctgtatctaagtgacatccctctgcatgatgccacgcgcgatcttgttcttttgggagaacaatttagagaggaatacaaactcacccaagaactggaaatcctcactgacaggctacagctcacgttaagagccctggaagatgaaaagaaaaagacagacacattgctgtattctgtccttcctccgtctgttgccaatgagctgcggcacaagcgtccagtgcctgccaaaagatatgacaatgtgaccatcctctttagtggcattgtgggcttcaatgctttctgtagcaagcatgcatctggagaaggagccatgaagatcgtcaacctcctcaacgacctctacaccagatttgacacactgactgattcccggaaaaacccatttgtttataaggtggagactgttggtgacaagtatatgacagtgagtggtttaccagagccatgcattcaccatgcacgatccatctgccacctggccttggacatgatggaaattgctggccaggttcaagtagatggtgaatctgttcagataacaatagggatacacactggagaggtagttacaggtgtcataggacagcggatgcctcgatactgtctttttgggaatactgtcaacctcacaagccgaacagaaaccacaggagaaaagggaaaaataaatgtgtctgaatatacatacagatgtcttatgtctccagaaaattcagatccacaattccacttggagcacagaggcccagtgtccatgaagggcaaaaaagaaccaatgcaagtttggtttctatccagaaaaaatacaggaacagaggaaacaaagcaggatgatgactgaatcttggattatggggtgaagaggagtacagactaggttccagttttctcctaacacgtgccaagcccaggagcagttcttccctatggatacagattttcttttgtccttgtccattaccccaagactttcttctagatatatctctcactatccgttattcaaccttagctctgctttctattactttttaggctttagtatattatctaaagtttggcttttgatgtggatgatgtgagcttcatgtgtcttaaaatctactacaagcattacctaacatggtgatctgcaagtagtaggcacccaataaatatttgttgaatttagttaaatgaaactgaacagtgtttggccatgtgtatatttatatcatgtttaccaaatctgtttagtgttccacatatatgtatat

SEQ ID NO: 16561 - DNA, 1860 bp, Artificial Sequence
  derived and/or modified sequence
atgtatggctttgtgaaccacgccctggagctgctggtgatcagaaattatggccctgaggtgtgggaggacatcaagaaggaggcccagctggatgaggagggccagttcctggtgcgcatcatctatgatgacagcaagacctatgacctggtggccgccgccagcaaggtgctgaacctgaatgctggggagatcctgcagatgtttgggaagatgttctttgtgttctgccaggagagcggctatgacaccatcctgcgggtgctgggcagcaatgtgcgggagttcctgcagaacctggatgccctgcatgaccacctggccaccatctacccaggcatgagggcccccagcttccgctgcacagatgctgagaagggcaagggcctcatcctgcactactacagcgagcgggagggcctgcaggacatcgtgattggcatcatcaagacagtggcccagcagatccacggcacagaaattgacatgaaggtgatccagcagagaaatgaagaatgtgaccacacccagttcctgattgaggagaaggagagcaaggaggaggacttctatgaggacctggacagatttgaggagaatggcacccaggagagccgcatcagcccctacaccttctgcaaggccttccccttccacatcatctttgaccgggacctggtggtgacccagtgtggaaatgccatctacagagtgctgccccagctgcagcccggcaactgcagcctgctgagcgtcttcagcctggtgcggccccacatcgacatctccttccacggcatcctgagccacatcaacacagtgtttgtgctgcggagcaaggagggcctgctggatgtggagaagctggagtgtgaagatgagctgactggaacagagatcagctgcctgcggctgaagggccagatgatctacctgcctgaggccgacagcatcctcttcctgtgcagccccagcgtgatgaacctggatgacctgacccggcggggcctgtacctgagtgacatccccctgcatgatgccacccgggacctggtgctgctgggggagcagttccgggaggagtacaagctgacccaggagctggagatcctgacagaccggctgcagctgaccctgcgggccctggaggatgagaagaagaagacagacaccctgctgtacagcgtgctgcccccatctgtggccaatgagctgcggcacaagaggcctgtgcctgccaagagatatgacaacgtgaccatcctcttctctggaattgtgggcttcaatgccttctgcagcaagcacgccagcggggagggcgccatgaagatcgtgaacctgctgaatgacctgtacaccaggtttgacaccctgacagacagcaggaagaacccctttgtgtacaaggtggagaccgtgggggacaagtacatgacagtgtctggcctgcctgagccctgcatccaccacgcccggagcatctgccacctggccctggacatgatggagattgctggccaggtgcaggtggatggagagagcgtgcagatcaccatcggcatccacactggagaggtggtgactggagtgattggccagaggatgccccgctactgcctgtttggaaacacagtgaacctgaccagcaggacagagaccaccggggagaagggcaagatcaacgtgtctgagtacacctaccgctgcctgatgagccctgagaacagcgacccccagttccacctggagcaccggggccctgtgtccatgaagggcaagaaggagcccatgcaggtgtggttcctgagcaggaagaacacaggaacagaggagaccaagcaggatgatgactag

SEQ ID NO: 16562 - DNA, 1860 bp, Artificial Sequence
  derived and/or modified sequence
atgtacggcttcgtgaaccacgccctggagctgctggtgatccggaattatgggcccgaggtgtgggaagatatcaagaaagaggcacagctagacgaggagggacaatttttggtgcgcatcatatatgatgattctaagacgtatgacctagttgccgctgcaagcaaagtgcttaacctaaatgccggggagatcctgcaaatgtttgggaagatgttcttcgtattctgtcaagagtcgggctacgacaccatcctgagagtgctgggaagcaacgtgcgggagtttttacaaaatcttgatgccttgcacgaccacctggcaaccatctatcctggaatgcgcgccccctctttccggtgtaccgacgcggagaaggggaagggactgattctgcactactactcagaaagagagggccttcaggatatcgttatcggcattattaaaacagtggcccaacagatccacggtacagaaatcgacatgaaggtaatacagcagagaaatgaggagtgcgaccacacgcaatttcttatcgaggagaaagaatccaaagaggaagacttctacgaagaccttgatcgtttcgaagagaacgggacccaggaaagcaggatttctccttacacgttttgcaaggcattccccttccatataatttttgatcgagatcttgtggtgacccaatgtggaaatgcgatttacagagtccttccgcagctacagcccgggaattgctcactactgagtgttttttctctcgtaaggccacatattgatatttcattccacggaatcttgtcgcacatcaacactgtgttcgtactgcgaagcaaggaaggattgctcgacgtagaaaaactggagtgcgaggatgagctgacgggaactgaaatctcatgcttgcgattgaaaggtcaaatgatttacctgccagaggctgactccattctgtttttatgttctccaagcgtcatgaatctagacgatctgactagacgcgggctgtacctgtcagacatcccactgcatgatgcaaccagggatctcgttctccttggcgaacagtttcgggaagaatacaagttaactcaggagctggagatcctgactgatcggctacagctgaccctccgcgcactggaagacgagaaaaaaaaaactgacacgttgctctattctgtgctccccccctcagttgccaatgaactcagacacaaaagaccagtgcctgcaaaaaggtatgacaatgtaaccatcctgttctccggcatcgtcggattcaatgccttctgctctaagcacgctagcggggagggggccatgaagatcgtcaatctgttgaacgatctgtatacccgattcgatacccttactgacagccgcaagaacccttttgtttataaggtcgaaactgtgggagacaagtacatgaccgtcagcggcctgcccgaaccctgtattcaccacgcccgctctatttgtcatttagctctcgacatgatggagattgcaggacaggtgcaggtagatggtgaatccgtccagatcaccattggaattcataccggagaggtggtcactggagttattgggcagagaatgcccaggtattgtctttttgggaatactgtgaatcttaccagccggactgagaccaccggagagaagggcaaaatcaacgtttctgaatacacttatcgctgccttatgtcaccagagaattcagacccacagttccatctggagcatcgggggcctgtgtccatgaaggggaagaaagagcccatgcaggtatggttcctttcaagaaagaacactggaactgaggagactaagcaggatgatgattag

SEQ ID NO: 16563 - DNA, 1860 bp, Artificial Sequence
  derived and/or modified sequence
atgtacggctttgtgaatcatgcccttgagttgcttgtcatccggaattacggcccagaggtgtgggaggatattaagaaggaagcccagctggacgaagaggggcagtttctggtcaggattatctatgacgatagcaaaacctacgacctagttgcagcagcttccaaggtcctaaacctcaacgctggcgagatcctccaaatgtttgggaaaatgttcttcgtgttctgccaggaaagtgggtatgacacgatcttacgggtcctaggaagcaacgttagagaattcctgcagaatctcgatgctctccatgaccacctggcaacaatctatccgggaatgagagcgccatcttttcgctgcaccgacgccgagaagggaaagggcctgatcttgcattactacagcgagcgagaagggctgcaggacatcgtgatcggtatcatcaaaacggttgcgcaacaaatccacgggaccgaaatcgacatgaaagtgatccaacagcgtaacgaggagtgtgaccatacacagtttttaatcgaggagaaggagtccaaggaagaagacttctacgaggaccttgaccggttcgaggaaaatggaacccaagagtccaggatttctccttatacattctgcaaggccttcccttttcacataatttttgaccgtgatcttgtggtgacgcagtgcgggaacgctatttacagagtcctgcctcagctgcagccaggtaattgctccctgctgagcgtgttttctctagtcaggccacacatcgatatctcttttcatggtattctgagtcacattaacaccgtcttcgtcctgcgaagcaaagaggggctgcttgatgtagagaagttagagtgcgaagacgagctgactggaaccgagatatcgtgcctccgccttaaaggacagatgatttacctgcccgaagctgactcaatccttttcctctgctccccttcagtgatgaatcttgatgatcttacgagacgagggctgtatctgtctgatattcccctgcatgacgccacccgtgacctcgtgctgctgggcgaacagttcagggaagagtataagttaacccaagagctggagatcctcactgatcggcttcaactcaccctccgggctctcgaggatgagaaaaagaaaaccgataccctcctgtactctgtgctgccaccctccgtagccaacgaactccgacataagcggccagtgcctgctaaacgctacgataacgtgactattttattctccggcattgttgggttcaacgctttctgcagcaaacatgcctccggcgagggcgctatgaaaatagtgaacctcctgaacgatctctacacacgtttcgacactctcaccgattcacggaagaatccgttcgtgtacaaagttgagaccgtcggtgataagtacatgacagtgtcaggtcttccggagccctgcatccatcatgctcgctctatctgtcacttggcattggacatgatggagattgccggacaggtacaggtcgacggagaatctgtccagataacaattggaattcacacgggggaggtggtgaccggcgtaattggccagcgtatgccaaggtattgtttgtttggaaatacagtgaacctaaccagcagaaccgagactacaggcgagaaagggaagattaacgtatccgaatacacttataggtgcctcatgtcccctgagaacagcgaccctcagtttcatctggaacacagagggcctgtctctatgaagggaaaaaaggagccgatgcaagtgtggtttctgagccgaaagaatactggaactgaggaaaccaaacaggacgacgactag

SEQ ID NO: 16564 - DNA, 1860 bp, Artificial Sequence
  derived and/or modified sequence
atgtacggcttcgtgaaccacgccctggagctgctggtgatcagaaactacggccccgaggtgtgggaggacatcaagaaggaggcccagctggacgaggagggccagttcctggtgagaatcatctacgacgacagcaagacctacgacctggtggccgccgccagcaaggtgctgaacctgaacgccggcgagatcctgcagatgttcggcaagatgttcttcgtgttctgccaggagagcggctacgacaccatcctgagagtgctgggcagcaacgtgagagagttcctgcagaacctggacgccctgcacgaccacctggccaccatctaccccggcatgagagcccccagcttcagatgcaccgacgccgagaagggcaagggcctgatcctgcactactacagcgagagagagggcctgcaggacatcgtgatcggcatcatcaagaccgtggcccagcagatccacggcaccgagatcgacatgaaggtgatccagcagagaaacgaggagtgcgaccacacccagttcctgatcgaggagaaggagagcaaggaggaggacttctacgaggacctggacagattcgaggagaacggcacccaggagagcagaatcagcccctacaccttctgcaaggccttccccttccacatcatcttcgacagagacctggtggtgacccagtgcggcaacgccatctacagagtgctgccccagctgcagcccggcaactgcagcctgctgagcgtgttcagcctggtgagaccccacatcgacatcagcttccacggcatcctgagccacatcaacaccgtgttcgtgctgagaagcaaggagggcctgctggacgtggagaagctggagtgcgaggacgagctgaccggcaccgagatcagctgcctgagactgaagggccagatgatctacctgcccgaggccgacagcatcctgttcctgtgcagccccagcgtgatgaacctggacgacctgaccagaagaggcctgtacctgagcgacatccccctgcacgacgccaccagagacctggtgctgctgggcgagcagttcagagaggagtacaagctgacccaggagctggagatcctgaccgacagactgcagctgaccctgagagccctggaggacgagaagaagaagaccgacaccctgctgtacagcgtgctgccccccagcgtggccaacgagctgagacacaagagacccgtgcccgccaagagatacgacaacgtgaccatcctgttcagcggcatcgtgggcttcaacgccttctgcagcaagcacgccagcggcgagggcgccatgaagatcgtgaacctgctgaacgacctgtacaccagattcgacaccctgaccgacagcagaaagaaccccttcgtgtacaaggtggagaccgtgggcgacaagtacatgaccgtgagcggcctgcccgagccctgcatccaccacgccagaagcatctgccacctggccctggacatgatggagatcgccggccaggtgcaggtggacggcgagagcgtgcagatcaccatcggcatccacaccggcgaggtggtgaccggcgtgatcggccagagaatgcccagatactgcctgttcggcaacaccgtgaacctgaccagcagaaccgagaccaccggcgagaagggcaagatcaacgtgagcgagtacacctacagatgcctgatgagccccgagaacagcgacccccagttccacctggagcacagaggccccgtgagcatgaagggcaagaaggagcccatgcaggtgtggttcctgagcagaaagaacaccggcaccgaggagaccaagcaggacgacgactag

SEQ ID NO: 16565 - DNA, 2667 bp, Artificial Sequence
  derived and/or modified sequence
atgcttagtcggctgttcagaatgcacggactattcgtcgcctcacacccatgggaagtgatcgtgggcaccgtcacattgacaatttgcatgatgagcatgaacatgtttactggtaataataagatatgtgggtggaattatgagtgtccaaaattcgaagaggacgtcctgagctcagacattattatacttaccattacaaggtgcattgcgattttgtacatttactttcagttccagaatctacgacagcttggttcaaagtatatactggggattgccgggctcttcactatcttcagttccttcgtcttcagtaccgttgtgattcattttctggacaaggaactcactggcctgaatgaggctctgcctttcttcctgctgctgatcgatctgagtcgagcatccaccctagcgaaatttgcgctgagtagcaattcccaggacgaagtgcgcgagaacattgcaaggggaatggccattctgggcccaactttcactttagatgcattggttgagtgcctggtgatcggagtgggaacaatgtcgggggtgaggcaacttgaaattatgtgttgtttcggctgcatgagcgtgctggccaactacttcgtgttcatgacattctttcccgcctgcgtgagtttggtcctggagctgtccagggagagcagggagggcagacccatctggcagctgagccatttcgcccgtgtcctcgaggaggaagagaacaaacccaaccctgtcacccaacgggtgaagatgattatgtcccttgggctggttctcgttcacgctcatagccgttggatcgccgatccttcgccacaaaatagtacggccgatacaagcaaggtgagcctgggtctcgatgaaaacgttagtaagagaatcgagccatctgtctcattgtggcagttctatctttcaaagatgatcagtatggacatcgagcaagtgatcaccctgagccttgctctcctgcttgccgtgaagtatatctttttcgaacagaccgaaacggaatccaccctctcccttaagaatcctataacttctccagttgtcacccaaaaaaaagtgcctgacaactgctgtcggagggaacctatgttagtccgaaacaatcagaagtgtgatagcgttgaggaggagaccggtatcaatagagaacggaaggttgaagtgattaaaccactggtggcggagactgatacacccaaccgcgccacatttgttgtcgggaactcttcactgctggatactagcagcgtactcgtgactcaggagccggaaatcgagcttcctcgcgaacctaggccaaatgaggaatgtctccagatcctgggcaacgctgagaagggagccaagtttctctccgacgctgagatcatccaattagtcaacgccaaacatattcccgcctataaactggagacccttatggaaactcatgagagaggggtgtcgatcagaaggcagctgctgagtaaaaaattgagtgaaccttcttccctccagtacctcccgtaccgcgactacaattacagtctcgtgatgggagcatgctgcgaaaatgtaatcgggtacatgccaattcctgttggcgtagcaggcccactctgtctggatgaaaaagagttccaagtgcccatggcaactaccgagggctgtctagtggcctcaacaaaccgtggctgtcgcgccattggattggggggcggtgcaagtagcagggtgctggcggatggcatgacacgcggccctgtggttaggctacccagagcctgcgatagcgccgaggtgaaagcatggctggagacctcagagggatttgcggtcatcaaagaggctttcgatagcactagccggttcgcgcgcctccagaagttacacaccagcattgcaggacggaatctatatatacgatttcagtctcggagcggtgatgcaatgggcatgaacatgatctccaaaggcacggagaaagcactctctaaacttcacgaatatttcccagagatgcagatccttgcagtgtccgggaactactgcacagataagaagccagctgccattaattggattgagggcagaggcaagtccgtggtatgtgaggccgtgataccagccaaagttgtgcgagaggtccttaaaacaaccacggaggccatgattgaagtgaatatcaataaaaatctcgtcggatcagctatggcggggtccattggaggttacaacgctcatgcagcaaacatagttactgcaatttacatagcatgcgggcaggacgctgcccagaacgtaggctcctctaattgtattacgctgatggaggcttctgggccaactaacgaagacctttatatatcttgtaccatgcccagcatcgaaattggaactgtcggcggtggaaccaatctcctgccccagcaggcctgcctccagatgctgggagtccagggggcctgtaaggataaccctggggaaaacgcgcgccagttggcaagaattgtttgtggcactgtcatggccggcgaactgtcccttatggccgccctcgcggctgggcacttggtcaagtcacacatgattcacaatcggtccaaaatcaatctgcaagatctccagggagcatgtacaaaaaagacagcctag

SEQ ID NO: 16566 - DNA, 2667 bp, Artificial Sequence
  derived and/or modified sequence
atgctgtcacgcctgttccggatgcacggactctttgtcgcctcccatccttgggaggttatagtcggcaccgttacactgactatctgtatgatgagtatgaacatgtttacagggaacaacaagatatgcggctggaattacgagtgtcctaagtttgaggaagacgttctctcgagtgatatcattatcctgacaattacccgttgcatcgccatcctctatatctatttccagttccagaacctacggcagctcggtagcaagtacattcttggcattgccggactcttcacgatcttctcttccttcgtcttctctacggtcgtgattcattttttagacaaagagttgacaggcttgaatgaagcgcttcccttcttcttactcctcatagacttatcccgggcgagcaccctggcgaagttcgccctcagttcgaacagtcaagacgaagtgagggaaaatatcgccagggggatggccatcctcggccctaccttcacactcgacgccttggtagagtgtctggttatcggagtcggcaccatgtctggagtacgtcagctggaaatcatgtgttgctttgggtgcatgtctgtgctcgctaactactttgtctttatgactttctttccagcatgtgtcagtctggtgctggagctaagtcgggagtctagggagggcaggcccatctggcaactgtcccacttcgcccgcgtgctcgaagaggaggaaaacaagcccaacccagtaacgcagagggtcaagatgattatgtcccttggactggtgctcgtgcatgcccattctcggtggattgctgaccccagccctcagaacagtacagcagacacgtctaaggtgtctctgggcctggacgaaaatgtttcgaaacggatagagccttcagtgtcgttatggcagttctacctcagtaaaatgattagcatggacatcgaacaggtgatcaccctctcattggctctgctgctggcagtgaagtacattttcttcgaacagaccgagacagaatcaactttgtctctgaagaacccaatcactagtccagtcgtgacccagaagaaggtccccgataattgctgtcgtagggaacctatgctggtcaggaacaaccagaaatgtgattctgtagaagaagagacaggcatcaatagagagaggaaagtggaggtcataaaacctctcgtggccgagactgacacccccaatcgggccaccttcgtggtcgggaattcctctttgcttgataccagttccgttctggtcacccaagagccagagatcgagcttccaagggaacctcgcccaaacgaggaatgtttgcaaatcctgggaaacgcagaaaagggggctaaattcctctctgatgctgaaattattcagctggtcaatgcgaagcacattcccgcctataaactggagacccttatggaaacacatgagaggggtgtgtcaatccggagacaactgctcagtaagaaactttccgaaccctcttccctgcaatacctgccctaccgtgactataactactcactcgtcatgggtgcttgctgtgagaatgtgatcggatacatgccaatccccgttggagtagcaggcccgctgtgtctagacgaaaaagaatttcaggtgcctatggcgacaactgaaggctgcctagtggcctccaccaatagaggctgccgagccataggtctaggagggggagcaagttctcgggtcctcgctgacggcatgaccagaggacccgtagtccgcctccccagggcctgcgacagtgcagaagttaaagcttggcttgaaacatccgagggatttgctgtcatcaaagaggcattcgattcaaccagcaggttcgcacggttgcaaaaacttcacaccagcatagctggacgaaacctttatatccgcttccagagccgtagcggggatgcaatgggtatgaatatgatctctaagggtaccgaaaaagctctgtctaagctccatgagtattttcccgaaatgcagatcttggctgtgtccggcaattattgtacagataagaagccagcagcaattaattggatcgaggggcgcgggaagagcgttgtctgcgaagctgtgatccccgcgaaagtggtgagagaagtgctgaaaactacaacggaggccatgattgaggttaacattaacaaaaatcttgtaggaagcgccatggcgggaagtatagggggttataatgctcatgcagctaatattgtaacagcaatttacatcgcttgcggccaagatgccgcccagaacgttggatctagcaattgcattacactaatggaggcctcaggcccaacgaacgaggatctgtacatctcatgtactatgccctctattgaaattggaaccgtgggtggcggcacaaacctgctgcctcaacaggcctgtttgcagatgttaggagtgcagggtgcttgcaaagacaacccaggcgaaaatgcccgccagctcgctcgaatcgtatgcgggactgtgatggcgggagagctctctctcatggcagccctggcagccggacatctggttaagtcccatatgatccacaatcggagtaaaataaacctccaggatttgcagggtgcatgtaccaagaagactgcctag

SEQ ID NO: 16567 - DNA, 2460 bp, Artificial Sequence
  derived and/or modified sequence
atgcatagccatccggtctacctcctacctgtgcctgaatttacaagcacatggatcaagatatatttcggctactgttggccctttcacaactttctgaagttctgcatccaatattcatgtcactctctcctgagacagaggatagataggttggaagaagctctgcccttctttctgctattaatcgacttgtcacgggctagtaccttagccaagtttgcactcagctcgaactcacaggatgaagtcagggagaatatcgcccgggggatggccatcttgggtcctacctttactcttgatgccctggtcgagtgcctggttatcggagtaggtactatgtctggggtgcgacagctcgagattatgtgctgcttcgggtgtatgagcgttctcgccaactactttgtgttcatgaccttttttcccgcctgtgtctcattggtgctggaactgtcacgggaaagccgggagggacggcctatctggcaattgagccacttcgctagggtcctggaagaagaggagaacaagcctaatccggtcacacagagagtgaagatgattatgagcctcggtctggtactggtgcacgctcatagtagatggatcgccgacccgtctccccagaacagtactgcggacacctctaaagtcagcctggggctggatgaaaatgtgtcaaaaaggatcgagcctagtgtgtctctctggcagttttatctctctaaaatgattagtatggatattgagcaggtaatcacactaagtttggcattacttctcgctgtgaagtacatctttttcgaacagaccgagactgagtcaacgctatctctcaagaatccgatcactagccccgtagtgacccagaaaaaagtgcccgacaactgttgtagaagggagccaatgttagtgagaaacaaccaaaagtgtgacagtgttgaagaagagactggaatcaatcgggagagaaaggtggaggtgattaaaccattagtagcagaaacggatacgcctaaccgggccacgttcgtcgtcggaaactctagccttctggacacatcctccgtcctagtaacccaggagcctgaaatcgagctgccccgggagccacgccccaacgaggagtgtctgcaaattttgggaaatgcagaaaagggggcaaagtttctctccgatgcagagataatccagcttgtcaacgcgaagcatatccccgcttacaaactggagacactcatggagacacatgagagaggagtatccatcaggcgtcagctcctgtccaagaaactgagcgaaccctcgagcttgcagtaccttccctaccgtgactataactacagcctggtgatgggggcgtgttgcgaaaacgtgattgggtacatgccaattcccgtgggcgtagccggacccctctgtttggatgagaaggaatttcaggtccccatggctaccactgaagggtgtctggtggcatccacaaaccggggctgccgtgcaataggacttgggggtggggcaagtagccgagtgctggccgacgggatgacccgaggcccggtggtgcggctgcctcgcgcctgcgatagtgcagaagtaaaagcatggctcgaaacaagtgagggattcgccgtgatcaaggaagccttcgacagtacttctcggtttgctagacttcagaaactccacactagcattgcaggcagaaatctgtacatccggttccagtcccggagcggagatgcaatgggcatgaatatgatttctaaagggaccgagaaagccctgtccaagcttcatgagtacttcccagaaatgcagattctggccgtgtctggcaactactgcacagataaaaagcccgcggccataaactggattgagggaagagggaaaagcgtggtgtgcgaagccgttataccagccaaagttgtgagggaagtgctaaaaaccaccacggaagctatgattgaggtgaacataaataagaatctggtggggtctgctatggctggttcaataggaggctacaacgcccacgcagccaacatcgtgacggcgatatacatagcttgtggtcaggacgccgctcagaacgttggatccagtaattgtatcacattaatggaggcttcaggccctacaaacgaggacctctacatttcgtgtacaatgccctctattgagattggaacagttggaggggggactaacttacttccccagcaggcgtgcctgcagatgcttggggttcagggggcctgtaaggataaccccggcgaaaacgcacggcagcttgccaggattgtgtgcggcacagtcatggctggcgagctgagtctgatggctgctctggcagcaggccatctcgtgaagtcacatatgattcacaaccggagcaaaatcaacctccaggatcttcagggagcatgcacaaagaaaacggcctag

SEQ ID NO: 16568 - DNA, 3394 bp, Artificial Sequence
  derived and/or modified sequence
ctttctttaatccagtagacaatgagaaacgctgatttgggtctatggcataataggaagtagtatgccacatactgcatgtgggagttctgcaggacagattgggaagtgcatgcgtgtaagactgggaagaccagttaggagaggctattgcactgttttaagtaagacataataaagccctgcaccaggcggagagcagaaggaacgcacagaagacgcaggagaggcacatttcagagagaatccagtatgcaatggatgtcgcacacaagagagagagacgcaggatccaaggattctgtagctacaatgttgtcaagactttttcgaatgcatggcctctttgtggcctcccatccctgggaagtcatagtggggacagtgacactgaccatctgcatgatgtccatgaacatgtttactggtaacaataagatctgtggttggaattatgaatgtccaaagtttgaagaggatgttttgagcagtgacattataattctgacaataacacgatgcatagccatcctgtatatttacttccagttccagaatttacgtcaacttggatcaaaatatattttgggtattgctggccttttcacaattttctcaagttttgtattcagtacagttgtcattcacttcttagacaaagaattgacaggcttgaagaagctttgccctttttcctacttttgattgacctttccagagcaagcacattagcaaagtttgccctcagttccaactcacaggatgaagtaagggaaaatattgctcgtggaatggcaattttaggtcctacgtttaccctcgatgctcttgttgaatgtcttgtgattggagttggtaccatgtcaggggtacgtcagcttgaaattatgtgctgctttggctgcatgtcagttcttgccaactacttcgtgttcatgactttcttcccagcttgtgtgtccttggtattagagctttctcgggaaagccgcgagggtcgtccaatttggcagctcagccattttgcccgagttttagaagaagaagaaaataagccgaatcctgtaactcagagggtcaagatgattatgtctctaggcttggttcttgttcatgctcacagtcgctggatagctgatccttctcctcaaaacagtacagcagatacttctaaggtttcattaggactggatgaaaatgtgtccaagagaattgaaccaagtgtttccctctggcagttttatctctctaaaatgatcagcatggatattgaacaagttattaccctaagtttagctctccttctggctgtcaagtacatcttctttgaacaaacagagacagaatctacactctcattaaaaaaccctatcacatctcctgtagtgacacaaaagaaagtcccagacaattgttgtagacgtgaacctatgctggtcagaaataaccagaaatgtgattcagtagaggaagagacagggataaaccgagaaagaaaagttgaggttataaaacccttagtggctgaaacagataccccaaacagagctacatttgtggttggtaactcctccttactcgatacttcatcagtactggtgacacaggaacctgaaattgaacttcccagggaacctcggcctaatgaagaatgtctacagatacttgggaatgcagagaaaggtgcaaaattccttagtgatgctgagatcatccagttagtcaatgctaagcatatcccagcctacaagttggaaactctgatggaaactcatgagcgtggtgtatctattcgccgacagttactttccaagaagctttcagaaccttcttctctccagtacctaccttacagggattataattactccttggtgatgggagcttgttgtgagaatgttattggatatatgcccatccctgttggagtggcaggacccctttgcttagatgaaaaagaatttcaggttccaatggcaacaacagaaggttgtcttgtggccagcaccaatagaggctgcagagcaataggtcttggtggaggtgccagcagccgagtccttgcagatgggatgactcgtggcccagttgtgcgtcttccacgtgcttgtgactctgcagaagtgaaagcctggctcgaaacatctgaagggttcgcagtgataaaggaggcatttgacagcactagcagatttgcacgtctacagaaacttcatacaagtatagctggacgcaacctttatatccgtttccagtccaggtcaggggatgccatggggatgaacatgatttcaaagggtacagagaaagcactttcaaaacttcacgagtatttccctgaaatgcagattctagccgttagtggtaactattgtactgacaagaaacctgctgctataaattggatagagggaagaggaaaatctgttgtttgtgaagctgtcattccagccaaggttgtcagagaagtattaaagactaccacagaggctatgattgaggtcaacattaacaagaatttagtgggctctgccatggctgggagcataggaggctacaacgcccatgcagcaaacattgtcaccgccatctacattgcctgtggacaggatgcagcacagaatgttggtagttcaaactgtattactttaatggaagcaagtggtcccacaaatgaagatttatatatcagctgcaccatgccatctatagagataggaacggtgggtggtgggaccaacctactacctcagcaagcctgtttgcagatgctaggtgttcaaggagcatgcaaagataatcctggggaaaatgcccggcagcttgcccgaattgtgtgtgggaccgtaatggctggggaattgtcacttatggcagcattggcagcaggacatcttgtcaaaagtcacatgattcacaacaggtcgaagatcaatttacaagacctccaaggagcttgcaccaagaagacagcctgaatagcccgacagttctgaactggaacatgggcattgggttctaaaggactaacataaaatctgtgaattaaaaaagctcaatgcattgtcttgtggaggatgaatagatgtgatcactgagacagccacttggtttttggctctttcagagaggtctcaggttctttccatgcagactcctcagatctgaacacagtttagtgctttacatgctgtgctctttgaagagatttcaacaagaatattgtatgttaaagcatcagagatggtaatctacagctcacctctgaaggcaaatataagctgggaaaaaagttttgatgaaattcttgaagttcatggtgatcagtgcaattgaccttctccctcactcctgccagttgaaaatggatttttaaattatactgtagctgatg

SEQ ID NO: 16569 - DNA, 2667 bp, Artificial Sequence
  derived and/or modified sequence
atgctgagccgcctcttcaggatgcacggcctgtttgtggccagccacccctgggaggtgattgtgggcaccgtgaccctgaccatctgcatgatgtccatgaacatgttcaccggcaacaacaagatctgtggctggaactatgaatgtcccaagtttgaagaagatgtgctgagcagtgacatcatcatcctgaccatcacccgctgcatcgccatcctgtacatctacttccagttccagaacctgcggcagctgggcagcaagtacatcctgggcattgctggcctcttcaccatcttcagcagctttgtgttcagcacagtggtgatccacttcctggacaaggagctgaccggcctgaatgaggccctgcccttcttcctgctgctgattgacctgagccgggccagcaccctggccaagtttgccctgagcagcaacagccaggatgaggtgagagaaaatattgcccggggcatggccatcctgggccccaccttcaccctggatgccctggtggagtgcctggtgattggagtgggcaccatgtctggagtgcggcagctggagatcatgtgctgcttcggctgcatgtctgtgctggccaactactttgtgttcatgaccttcttccctgcctgtgtgtccctggtgctggagctgagccgggagagccgggagggccggcccatctggcagctgagccactttgcccgggtgctggaggaggaggagaacaagcccaaccctgtgacccagagggtgaagatgatcatgagcctgggcctggtgctggtgcacgcccacagccgctggattgctgaccccagcccccagaacagcacagctgacaccagcaaggtgtccctgggcctggatgaaaatgtgtccaagagaattgagcccagcgtgtccctgtggcagttctacctgagcaagatgatctccatggacatcgagcaggtgatcaccctgagcctggccctgctgctggccgtgaagtacatcttctttgagcagacagaaacagagagcaccctgagcctgaagaaccccatcaccagccctgtggtgacccagaagaaggtgcctgacaactgctgccggcgggagcccatgctggtgaggaacaaccagaagtgtgacagcgtggaggaggagaccggcatcaaccgggagaggaaggtggaggtgatcaagcccctggtggccgagacagacacccccaacagagccacctttgtggtgggcaacagcagcctgctggacaccagctctgtgctggtgacccaggagcctgagattgagctgccccgggagccccggcccaatgaagaatgtctgcagatcctgggcaatgctgagaagggggccaagttcctgagtgatgctgagatcatccagctggtgaatgccaagcacatcccagcctacaagctggagaccctgatggagacccatgagcggggcgtgtccatccggcggcagctgctgagcaagaagctgtctgagcccagcagcctgcagtacctgccctacagagactacaactacagcctggtgatgggcgcctgctgtgaaaatgtgattggctacatgcccatccctgtgggcgtggccggccccctgtgcctggatgagaaggagttccaggtgcccatggccaccacagagggctgcctggtggccagcaccaacagaggctgccgggccatcggcctgggcggcggggccagcagccgggtgctggctgatggcatgacccggggccctgtggtgcggctgccccgggcctgtgacagcgctgaggtgaaggcctggctggagaccagcgagggctttgctgtgatcaaggaggcctttgacagcaccagcagatttgcccggctgcagaagctgcacaccagcattgctggaagaaacctgtacatccgcttccagagccgctctggagatgccatgggcatgaacatgatcagcaagggcacagagaaggccctgagcaagctgcacgagtacttccctgagatgcagatcctggccgtgtctggcaactactgcacagacaagaagccagctgccatcaactggattgagggccggggcaagtctgtggtgtgtgaggccgtcatcccagccaaggtggtgcgggaggtgctgaagaccaccacagaggccatgattgaggtgaacatcaacaagaacctggtgggcagcgccatggccggcagcatcggcggctacaatgcccatgctgccaacatcgtgacagccatctacatcgcctgtggccaggatgctgcccagaatgtgggcagcagcaactgcatcaccctgatggaggccagcggccccaccaatgaagatctctacatcagctgcaccatgcccagcattgagatcggcaccgtgggcggcggcaccaacctgctgccccagcaggcctgcctgcagatgctgggcgtgcagggcgcctgcaaggacaaccctggagaaaatgcccggcagctggccagaattgtgtgtggcaccgtgatggccggggagctgagcctgatggccgccctggccgccggccacctggtgaagagccacatgatccacaacagaagcaagatcaacctgcaggacctgcagggcgcctgcaccaagaagacagcctag

SEQ ID NO: 16570 - DNA, 2460 bp, Artificial Sequence
  derived and/or modified sequence
atgcacagccaccctgtgtacctgctgcctgtgcctgagttcaccagcacctggatcaagatctacttcggctactgctggcccttccacaacttcctgaagttctgcatccagtacagctgccacagcctgctgcggcagagaattgaccggctggaggaggccctgcccttcttcctgctgctgattgacctgagccgggccagcaccctggccaagtttgccctgagcagcaacagccaggatgaggtgcgggagaacatcgcccggggcatggccatcctgggccccaccttcaccctggatgccctggtggagtgcctggtgattggagtgggcaccatgtctggagtgcggcagctggagatcatgtgctgcttcggctgcatgtctgtgctggccaactactttgtgttcatgaccttcttccctgcctgtgtgtccctggtgctggagctgagccgggagagccgggagggccggcccatctggcagctgagccactttgcccgggtgctggaggaggaggagaacaagcccaaccctgtgacccagagggtgaagatgatcatgagcctgggcctggtgctggtgcacgcccacagccgctggattgctgaccccagcccccagaacagcacagctgacaccagcaaggtgtccctgggcctggatgaaaatgtgtccaagagaattgagcccagcgtgtccctgtggcagttctacctgagcaagatgatctccatggacatcgagcaggtgatcaccctgagcctggccctgctgctggccgtgaagtacatcttctttgagcagacagaaacagagagcaccctgagcctgaagaaccccatcaccagccctgtggtgacccagaagaaggtgcctgacaactgctgcagaagagagcccatgctggtgaggaacaaccagaagtgtgacagcgtggaggaggagaccggcatcaaccgggagaggaaggtggaggtgatcaagcccctggtggccgagacagacacccccaacagagccacctttgtggtgggcaacagcagcctgctggacaccagctctgtgctggtgacccaggagcctgagattgagctgccccgggagccccggcccaatgaggagtgcctgcagatcctgggcaatgctgagaagggggccaagttcctgagtgatgctgagatcatccagctggtgaatgccaagcacatcccagcctacaagctggagaccctgatggagacccatgagcggggcgtgtccatccggcggcagctgctgagcaagaagctgtctgagcccagcagcctgcagtacctgccctacagagactacaactacagcctggtgatgggcgcctgctgtgaaaatgtcatcggctacatgcccatccctgtgggcgtggccggccccctgtgcctggatgagaaggagttccaggtgcccatggccaccacagagggctgcctggtggccagcaccaacagaggctgccgggccatcggcctgggcggcggggccagcagccgggtgctggctgatggcatgacccggggccctgtggtgcggctgccccgggcctgtgacagcgctgaggtgaaggcctggctggagaccagcgagggctttgctgtgatcaaggaggcctttgacagcaccagcagatttgcccggctgcagaagctgcacaccagcattgctggcaggaacctgtacatccgcttccagagccgctctggagatgccatgggcatgaacatgatcagcaaaggaacagagaaggccctgagcaagctgcacgagtacttccctgagatgcagatcctggccgtgtctggcaactactgcacagacaagaagccagctgccatcaactggattgagggccggggcaagtctgtggtgtgtgaggccgtcatcccagccaaggtggtgcgggaggtgctgaagaccaccacagaggccatgattgaggtgaacatcaacaagaacctggtgggcagcgccatggccggcagcattggaggctacaatgcccacgccgccaacatcgtgacagccatctacatcgcctgtggccaggatgctgcccagaatgtgggcagcagcaactgcatcaccctgatggaggccagcggccccaccaatgaagacctgtacatcagctgcaccatgcccagcattgaaattggaacagtgggcggcggcaccaacctgctgccccagcaggcctgcctgcagatgctgggcgtgcagggcgcctgcaaggacaaccctggagaaaatgcccggcagctggcccgcatcgtgtgtggcaccgtgatggccggggagctgagcctgatggccgccctggccgccggccacctggtgaagagccacatgatccacaacagaagcaagatcaacctgcaggacctgcagggcgcctgcaccaagaagacagcctag

SEQ ID NO: 16571 - DNA, 2667 bp, Artificial Sequence
  derived and/or modified sequence
atgctgagccggctgttccggatgcacggcctgttcgtggccagccacccgtgggaagttattgtgggaacagtcacgcttacaatctgtatgatgagcatgaacatgtttaccggcaataataagatctgcgggtggaattacgagtgccccaaatttgaagaggacgtgctgtccagtgatatcattatcctgacgattacaaggtgtatcgctattctatatatttatttccaattccagaacctcagacagcttggcagcaaatatatcctgggaatcgccggcttattcaccatattttcatcattcgtgttttcaactgtagtaatccacttcctagacaaagaactcaccggacttaatgaggccctgcccttcttcctgctgctgatcgacctgtcccgagcaagcactcttgctaaattcgcactttcatccaactcacaggacgaagtacgggaaaacatcgcgagaggcatggccatcctggggcctacatttactctggatgccctggtggagtgcctggtaattggcgtggggacgatgtcgggggttaggcagctggagatcatgtgttgttttgggtgtatgtcagtgctggccaactactttgtgttcatgaccttctttcccgcctgtgtttcattagtcctcgagttatccagagagtcacgcgaaggaaggcccatctggcagctgagtcacttcgctcgggttttggaagaggaagagaacaaacctaaccctgtcacacagcgtgtgaagatgatcatgagccttggcttggtactggtccacgcccactctcgatggatcgccgacccaagtccacagaacagcacagccgacacttccaaggtgtcattgggactagacgaaaatgtcagtaaacgtatagaaccatctgtctctctctggcagttttacctcagtaagatgatttcaatggatattgagcaagtgattacccttagcctcgcgttgctgctcgcggtgaagtacatcttttttgagcagacagagactgagtccacccttagcctgaaaaaccctattactagtcctgtggtgacccagaaaaaggtgccagacaattgctgtcgcagagaacccatgctcgtgcgaaacaaccagaagtgcgacagtgtggaagaagagaccgggatcaaccgtgagagaaaggttgaggtgattaaaccacttgtggccgaaaccgacactccgaatcgagctactttcgtggtgggcaactcctcattactggatacctcttccgtcctagtgacacaggaacccgagatcgagctccccagggaacctcgcccaaatgaagaatgccttcagatccttgggaatgcggagaaaggtgctaagtttctgtcagacgctgaaataatccagcttgtgaatgccaagcacatccccgcatacaagctagaaacgctgatggagacccatgaaagaggagtgtccatccgcagacaactgctcagtaaaaagctctctgaaccctcatccctgcaatatcttccctacagggactataattactccttggtcatgggcgcttgctgtgagaatgtgattggctacatgcctatccccgtgggagttgccggtccattgtgccttgacgagaaggaattccaagtgcccatggccaccactgaagggtgccttgttgcttccactaatcgcgggtgtcgcgcaattggtcttgggggcggtgcttcttctcgggtcctcgccgatggtatgacccgcggtccagtcgttcggcttccaagggcttgtgacagcgcggaggtgaaggcatggctggaaacgagtgaagggttcgccgtcataaaagaggccttcgactccaccagccggttcgctagactacagaaactgcacacaagcatcgccggacggaacctttacattaggttccagtcccggtcaggggacgcgatggggatgaacatgatttcaaaaggaacagagaaagctctgtctaagctccacgaatactttccagaaatgcagattctggcagtgagtggcaattactgcaccgataaaaaacccgctgccattaattggattgagggtcgcggaaagtccgtggtgtgcgaggctgtgatccctgccaaggttgtcagagaggtccttaaaaccaccactgaggcaatgatcgaagtgaatatcaacaagaacttggttggaagcgcaatggccggatccatcggtggctacaacgcccacgccgccaacattgtgacggccatctatatcgcctgcggtcaggacgcagcccagaacgtcgggtccagcaattgcattacactgatggaggcaagtgggcccactaatgaagatctctatattagctgtaccatgccatctattgagatcgggaccgttggtggggggacaaacctgcttcctcagcaagcctgcctccagatgctgggggtgcaaggggcctgcaaggacaatccaggggagaacgctaggcagctggcacgtattgtgtgcgggaccgttatggccggagaactgagcctgatggcagcgctagccgcgggccacctagtgaaaagccacatgattcataacagaagcaaaatcaacctgcaagaccttcaaggggcttgtaccaagaaaacggcctag

SEQ ID NO: 16572 - DNA, 2667 bp, Artificial Sequence
  derived and/or modified sequence
atgctgagccggctgttccggatgcacggcctgttcgtggccagccatccgtgggaggtgattgtcggtacagtcactctcacaatatgcatgatgtctatgaatatgttcaccggaaataacaaaatctgcggctggaattacgagtgtccaaagttcgaggaggatgtattgagcagcgatattattatcctcacaatcactcgatgcatcgcaattttatacatttattttcagttccagaatttgcggcagttgggatccaagtacattctgggtatcgcgggcctgtttacgattttttcctctttcgtgttctcaactgtggtgattcatttcctggataaggaactgactggcctgaacgaggccttaccattttttttgctactcatcgacctgtctagggcgagcaccttggcaaaatttgccctctcaagtaatagccaggacgaagttagagagaatatcgcaaggggtatggccattctgggtcccacattcacactggatgcactcgttgagtgtctggtcataggagttggtaccatgagcggagtccggcagcttgagataatgtgttgttttggatgtatgtcggttctagcaaactacttcgtgtttatgacttttttcccagcctgcgtcagcttggttctggagttgtctcgggagtccagggaaggccgtccaatttggcagctgtcacattttgctagggttctcgaagaagaagagaacaaacccaaccctgttacacagcgggttaaaatgattatgtccctgggccttgtgcttgtccatgcacatagccgctggatcgctgacccttccccccagaacagtactgctgacaccagtaaggtttcgctggggctggacgaaaacgtgtcaaagcgaatcgagccatctgtcagcctttggcaattttatcttagtaagatgatctcaatggatatcgaacaagtgattactctgtcattggccctcctcttagccgttaaatacattttctttgaacaaacagaaacagagtcaaccctctcactgaagaaccctattaccagtccagtggtcactcaaaagaaagtccctgacaactgctgcaggcgcgagcctatgcttgttcgcaataatcagaaatgcgacagtgtagaagaagagacaggtattaaccgagagcggaaagtcgaggtgatcaaacccctcgtcgctgagactgatacccctaacagagctaccttcgtggtgggaaactcttcgctcctcgacacctcctccgtgctagtcacacaggagcctgagatcgaactcccccgtgagccaaggccgaatgaagaatgcttgcagattctaggcaacgccgaaaaaggcgccaagtttctcagtgacgctgagatcatccagctggtaaatgccaagcacatcccggcctacaaactggaaacactaatggaaacccacgagcggggagtatccatacgtcggcagctcctaagtaaaaaattatcagagcctagtagcctgcaatacctcccttacagagactataactactctttggtgatgggtgcatgctgtgaaaatgttattggctacatgccaatccccgtgggtgtcgcgggacctctgtgtttggatgagaaggagttccaggttccgatggcgacgacagagggttgcttggtagctagtaccaataggggctgtcgtgctattggtttggggggcggtgcctcttctcgcgtgctggcagatggcatgactagaggcccagtggtccggctccctcgggcctgtgacagtgccgaagttaaagcctggctggaaacctccgagggcttcgcagtaatcaaggaggccttcgactcaactagcaggtttgcacgccttcaaaagttgcacacaagcatcgctggtcggaacctctatatcaggtttcagtccagaagtggtgacgcaatggggatgaatatgataagcaaaggcacagagaaggccctgtctaaactgcacgagtacttcccagagatgcagatcctcgcggtgtctggcaactactgcactgacaaaaagccagcggcaatcaattggatcgaaggccgcggaaaatcagtggtctgcgaggctgtgattccagctaaggtcgtgagggaggtgctgaagactacaacagaggctatgatcgaagtaaatattaataaaaacctagttggcagtgcaatggccggaagtatcgggggttacaacgcgcacgctgcaaacattgttacggcgatttatattgcatgcgggcaggacgctgcacaaaacgtaggtagttcgaactgcatcactcttatggaggccagtggacccacaaacgaggacctgtacatcagttgtaccatgccttccatagagataggcacagtgggcggaggcacaaacttgcttccgcagcaggcctgtttacaaatgcttggggtacaaggggcctgtaaagataacccaggagaaaacgcgcgacagttggctcggattgtgtgcggcactgtcatggccggggaattatctctaatggctgcgctggcagccggccacttggttaagtcccatatgatccacaataggagcaagattaacctgcaagacctgcaaggagcctgcactaagaagactgcatag

SEQ ID NO: 16573 - DNA, 2460 bp, Artificial Sequence
  derived and/or modified sequence
atgcacagccaccccgtgtacctgctgcccgtgcccgagttcaccagcacttggattaaaatctatttcggttactgttggccattccataacttcttaaagttttgtatccagtactcctgtcactctttgctgagacagagaatcgacagacttgaggaagccttaccttttttcctccttctgattgatttgtcacgcgcttccaccctggccaagttcgctttgagctcaaactcccaggatgaggtgcgagaaaatatagctagaggtatggcaatcctggggcccaccttcaccctggatgcactggtagagtgcctggtaatcggcgttggaacaatgtcgggcgtgcggcagctcgaaattatgtgttgtttcggttgcatgtctgtcctggcaaattactttgtgttcatgactttttttccagcatgcgttagtctcgtgctcgaactgtctcgagaatccagggagggtcgccccatctggcagctcagccatttcgctcgggtgttagaggaagaggaaaacaagcctaacccggtcacacaacgggtgaagatgataatgagcctcggtctggtgctagtgcatgcccactctagatggattgccgacccctctccacagaactccactgcagacacatctaaagtgtctcttgggcttgatgaaaacgttagcaagcgaattgagccatctgtaagcttatggcaattctacctgagcaagatgattagcatggacatcgaacaggttattacgctcagcctggccctcttactcgcagtgaagtacattttcttcgagcagaccgagaccgagtccactctttccctcaagaatccgattacatctcccgtggttacacaaaagaaggtgccagataactgctgcaggagagagccaatgctagttcgtaacaaccagaagtgcgacagtgtggaagaagaaactggaatcaatcgagagcgaaaggtggaggtcataaagcccctggtggctgagactgacactccaaatagggctaccttcgtggtcggtaactcgagccttctcgacacgtcctctgtgctggtgacgcaggagcccgaaatcgagctccctagagagcccaggcccaacgaggagtgtctacagatcctgggcaacgccgaaaagggagcgaaatttttgtctgacgccgaaatcatccagttggtgaatgccaaacacatccctgcctataaactggaaaccctgatggagacacacgagagaggagtgtcgattcggcggcagctgctatccaaaaaactctcggagccatcctccctgcagtatcttccataccgcgattacaactattcattggtcatgggggcatgttgtgagaacgtcattgggtacatgcctatccctgttggcgtggcggggcctctgtgccttgatgaaaaagagttccaggttcccatggccacaaccgagggctgcctggtagctagcaccaatagggggtgtcgggcaattggtctgggaggcggcgcttccagccgagttcttgctgacggaatgacacgaggccctgtcgtccgtcttcccagggcttgtgactctgcggaagtgaaagcttggctcgaaacttcggagggattcgctgttatcaaggaggctttcgactccacaagtcgcttcgcaaggctgcaaaagcttcatacatctatagctggcagaaacctgtacatcagatttcaaagccggagtggggatgccatgggaatgaatatgatatctaagggaacagaaaaggctctgagcaaacttcacgagtactttccagagatgcaaatcctggccgtttctggcaactactgtaccgataaaaagccagcagcaataaactggattgagggccggggaaaatctgtagtttgtgaggccgtaatccctgcaaaagtggttcgggaggtactgaagactacaactgaagctatgatcgaagtcaatatcaataaaaacctggtggggagcgcgatggcaggaagtatcggcgggtataacgcgcacgcagctaatattgtcactgctatttatatcgcttgtgggcaagacgctgcccagaacgttggttccagcaactgtataactcttatggaagcatctggtccgactaacgaagacctctacatatcgtgcacaatgccatccattgaaattggcactgtagggggtggaactaatcttctcccgcagcaggcctgtctgcagatgctgggggttcaaggcgcgtgcaaagacaatcccggcgaaaacgctagacagctcgccagaatcgtctgtggcactgtgatggcgggagagctgagcctaatggccgctctggctgctggccatttggtgaaatcccacatgatacataataggtctaaaatcaatctccaagatttacagggagcctgtaccaaaaagaccgcttag

SEQ ID NO: 16574 - DNA, 2667 bp, Artificial Sequence
  derived and/or modified sequence
atgctgagtcggctgtttcggatgcatggactttttgtagccagtcatccttgggaagtcatcgtgggaaccgttacattgaccatttgtatgatgagcatgaacatgttcaccggaaacaacaaaatctgtggatggaactacgagtgcccaaaatttgaagaggatgttcttagctccgacatcattatcctgactatcacacgctgtatagccattctctacatctattttcaatttcagaacttaagacagcttggcagcaagtatattctggggattgctggcttgttcaccattttttcctcctttgtgtttagtaccgtcgtaatccatttcctggataaggagttaaccggtctaaacgaagccctgccattcttcctcctgctcattgatctcagtcgggcttccacactggctaagtttgccctgagctccaattcacaggatgaggttcgggaaaacattgccagggggatggccatcctgggcccaacttttactctggatgccctagtggagtgcctggttataggggtcgggactatgtcaggagtccgccagttggaaatcatgtgctgtttcggctgcatgtccgtgttggctaattacttcgtgttcatgacttttttccctgcctgcgtctccctggtgctggaattgtcaagagagtctagggagggaaggcccatatggcagttgtcacactttgcacgcgtcctggaggaagaggaaaacaagcccaatccagtgacccagcgagtgaagatgattatgagtttgggactcgtattagtgcacgcgcatagcagatggatcgccgacccaagcccacaaaactcgacagctgatacgtcaaaagtctctctgggtctcgacgaaaatgtgtctaagagaatcgagccctccgttagtctttggcagttctacctctccaagatgatatcaatggacattgagcaggtgatcacactctcactagccctactcctggcagtgaaatacattttttttgagcagaccgaaaccgaatcaacgttgtcacttaaaaacccaatcacctcccctgttgtcacccagaagaaggtgccagacaactgctgccgccgagagcccatgctggtgagaaacaaccagaaatgtgattcagtagaggaggagacggggatcaatagggagaggaaagtagaggtaataaagcccctagtcgcagagactgatactccaaatcgggcaacattcgtggtcggaaactcatccctccttgatacatcttctgtgcttgtcacgcaggagcccgaaatcgagctgccgcgagagcctagacctaatgaggaatgcctgcagattctgggtaatgctgagaaaggagctaaatttctaagtgatgccgaaattattcaactcgtcaatgccaaacacattccagcgtacaaactggagacactgatggaaacacatgagaggggcgtgagcattcgacgccaattgctctcaaaaaagctttctgagcctagctctctgcagtatttaccttatagggactacaattattcactcgtgatgggtgcttgttgtgaaaacgtgatagggtacatgcccatccccgtaggcgtcgctggaccactgtgcctggatgagaaggagttccaggtaccaatggccacaacggaggggtgccttgtagcatcaaccaatagaggttgtagagcaatcgggcttgggggtggggctagcagccgcgtattggcagatggtatgacaagggggccagtggtgagactcccacgggcttgtgactccgccgaggtgaaagcctggctggaaacctctgagggattcgctgtgatcaaggaagcctttgattccacgtctagatttgctaggctgcagaagctgcatacatccatcgcagggcgaaatctgtatattcggttccagtcacggagcggcgacgccatggggatgaacatgatttcaaagggaacggagaaggccctatcaaaattgcatgagtactttcctgaaatgcagattcttgccgtgagcggaaactactgtacggacaagaagcccgctgcaatcaactggatcgagggcaggggcaagagcgtcgtgtgcgaagctgtgattcccgctaaagtagtccgcgaggttctgaaaactaccaccgaggctatgattgaagtgaatatcaacaagaatctggtgggctctgccatggctggaagcatcggaggctacaatgcacatgcagcaaatatagtaactgccatatatattgcatgcggtcaagacgccgcacagaatgtgggtagctctaactgtatcacactaatggaggcgtcaggtcctacaaatgaggatctctacatttcatgcaccatgccatctattgagatcgggactgttgggggtggtacgaacctgcttccacagcaggcctgtctgcaaatgctgggggttcagggagcctgtaaagataaccccggtgagaacgcgagacagctcgcacgcatcgtttgtggcacagtaatggcaggagagctgagtctcatggcagcgttagctgcaggtcatctggtgaaaagtcacatgattcataatagatcaaagatcaacttgcaagatctacagggtgcctgcacgaagaaaacggcctag

SEQ ID NO: 16575 - DNA, 2667 bp, Artificial Sequence
  derived and/or modified sequence
atgctgagcagactcttccgtatgcacggcctattcgtagcgtcgcatccgtgggaggtgatcgtggggaccgttacgctgacaatctgcatgatgtctatgaacatgttcactgggaataacaagatctgcggatggaactatgaatgtccgaagttcgaagaagatgtgcttagttcagatataattatcctcactataacgagatgcatcgcgattctgtatatttattttcagttccagaatcttagacaactaggcagtaagtatatccttggaatcgcaggattatttactatcttttcctctttcgttttctctacagtggttattcacttcttggacaaggaattaacggggttgaatgaggccctcccattcttcctcttgctgattgacctaagtagagctagcaccctcgcgaagtttgccctcagttctaactcccaggacgaggtgagggaaaacatagcccgaggtatggctatcctgggacctacatttaccctggatgctctggtcgaatgtttggtgatcggagtcgggacgatgtccggagtcagacagttggaaatcatgtgctgtttcggctgcatgtctgtgcttgctaattactttgtgtttatgacattttttccagcctgcgtgtcgctagtgctggaactgtctagggagagcagggagggaagacccatttggcagctgtcccactttgcccgtgtgttggaagaggaggagaacaagcccaatcccgtaacgcagcgagttaagatgatcatgtcattagggctagtgctggtccacgcccatagcaggtggatcgcagatccctcaccccagaacagtactgctgacactagcaaggtcagtcttggactggacgagaacgtttctaagaggatcgagcccagcgtttcattgtggcaattttatctgagtaagatgatcagcatggatattgagcaagtcattaccctgagcctggctctactattggctgtcaagtacattttctttgaacaaaccgaaactgagagcacgttaagcctcaagaatccaattacaagtccggtagtgactcagaaaaaagtgcccgataactgttgccgcagagaaccaatgttagtacgtaataatcagaaatgcgacagcgttgaggaagaaacgggaatcaacagggaacgaaaagtggaagtcatcaaacccctggtagcagagacagacacacctaacagagcgacgttcgtcgtggggaacagttccctcttggacacctcatcggtactggttacccaagaacccgagatagaactaccaagagagcccaggccgaatgaagaatgcttgcagatcctggggaatgccgagaagggcgcaaaattcttgtccgacgccgaaatcatccagctcgtgaatgccaaacatattccggcatataagcttgagacccttatggaaacgcacgagagaggcgtaagcataagaaggcagctactgagcaagaagctgtccgaaccaagttccctacagtacctgccttatcgggattataattattcactggtaatgggcgcatgctgtgaaaacgtgatcggatatatgccaatcccggtgggggtggcgggtcctctgtgcttggacgagaaggaatttcaggtgccgatggccactactgagggatgcctggttgccagtaccaataggggatgtcgtgcaattggtctgggaggtggggcttcaagtagggtactggcggatgggatgacacgcggtcctgtggtgagactacccagagcatgtgattccgcggaagtgaaggcctggttggagacctctgagggctttgctgtgatcaaggaggctttcgatagtacctcccgcttcgccaggctccaaaaactgcacaccagtatagccggtcgcaatctgtacatcagattccaatccaggagcggcgacgccatggggatgaacatgattagcaagggtactgagaaggccctcagtaagctgcatgaatattttcccgagatgcagattctagcggttagcgggaattattgtaccgataagaaacccgctgctattaattggattgagggccgaggaaagagcgtggtatgtgaagccgtgataccagcaaaggtggtgcgggaggtcctgaaaacgactaccgaggccatgatcgaggttaacattaacaaaaatctggtgggctcggccatggcaggcagcatcggcggatacaacgctcatgccgcaaacatcgtgacagctatttatattgcctgtggccaagacgccgctcagaatgtggggagctccaattgcattacactgatggaggcctccggccctaccaatgaggacctgtatatctcttgtactatgcctagcatcgagatcggcacagtcggaggcggaacaaacctcctgccgcagcaggcgtgcttacagatgttgggcgttcaaggagcatgcaaggacaatcctggagagaacgccaggcaactggccaggatagtttgcggaactgtcatggccggagaattgtcactcatggccgcactggccgcaggtcacttggtaaagtcacacatgattcataacaggtcaaaaattaacctccaggacctacagggcgcatgcacaaagaaaacagcctag

SEQ ID NO: 16576 - DNA, 2460 bp, Artificial Sequence
  derived and/or modified sequence
atgcattcccaccctgtgtatttgcttcccgtgccagagtttaccagcacgtggattaaaatttacttcggctactgctggccatttcacaatttcctgaagttctgtatccagtattcctgtcattccctgctcaggcagcgcatagataggctggaagaggcactcccctttttcttacttctcatagaccttagtagggcatccactctcgctaaatttgcattgagttctaattcgcaggatgaggtccgagagaacattgcgaggggaatggcgattctgggaccaacttttactctcgacgccctcgtagaatgcctggtgatcggcgtaggcaccatgagcggtgttcgccagttggagataatgtgttgctttggatgcatgtccgtcctcgctaattattttgtgttcatgacattttttccggcttgcgtttcactggtgttagagctcagcagggagagcagagaggggcgacctatatggcaactctcccacttcgccagggtgctcgaggaagaagagaataaacccaatcctgtcacccaacgcgtcaagatgatcatgtctcttggcctggtcctcgtgcacgcccactcaaggtggatagccgacccatcgccacaaaattcaacagccgataccagtaaggtatctttgggacttgatgagaatgtgagcaagcgcatcgaaccctctgtgtctctttggcagttctacttaagcaagatgatctccatggatatcgagcaggttattacactctcactcgcattgctgttagcagtgaagtacattttctttgagcagactgaaactgagtctactttgagcctgaagaaccccattactagcccagtggtcacccaaaaaaaggtgcccgataactgttgccgtcgggagccaatgttagtccgtaataaccagaagtgcgacagtgtggaagaagagactggcattaacagagagcgaaaagtggaagttatcaaacctctcgttgccgagaccgatacacccaatagagctacatttgttgtgggaaacagctcccttttagatactagctcagtgttagtgacacaggagccagagatcgagctccctagagagcctaggccaaacgaagagtgcctccaaatactgggtaacgcggagaaaggcgctaagtttttatcagatgcagaaataatccagctcgtgaatgccaagcatatcccagcttataagctggagacacttatggagacccacgaacgaggcgtgtccatcagacgtcaacttctgagcaagaagttgagcgagccttcctccctccagtatctgccctaccgagactataattatagccttgtgatgggcgcttgttgcgagaacgtgatcgggtacatgcctattcctgttggtgttgccggaccgctttgcctggacgagaaggagtttcaggtaccaatggcaacaaccgaagggtgcctggtggcttcaacaaatagaggttgcagagccatcggactcggtggaggtgcctcctcaagggtgctggcagatgggatgactaggggtccagtggtcagactccctcgagcatgcgatagcgccgaggtgaaagcatggttggagacatctgaaggcttcgcagtcatcaaagaagccttcgattctacttccaggtttgcaagactgcaaaagctccacacgtccatcgcagggaggaatttgtacattcgctttcagtcccgaagtggcgacgccatgggaatgaacatgatttctaaaggtacagaaaaagctttgagcaaactgcacgagtatttcccggagatgcaaatactagccgtcagtggcaactactgcacagataagaagcctgcggctattaactggatcgaagggagggggaaatctgtcgtctgtgaggctgtgatccccgcaaaggtggtgagagaagtgctgaaaacaactaccgaggctatgatcgaggtgaatattaataaaaacttagtgggctcagcaatggccggtagcatagggggttacaatgcacatgctgcaaatatcgtcactgcaatttatatcgcctgtggccaagatgcagcccaaaatgtgggtagctctaactgtatcacactgatggaggcatcaggcccaacaaacgaggacctatatatttcctgcactatgccctctatcgaaatcggcacagttggtggtggcacgaatctactaccacagcaggcttgtttgcaaatgttaggtgtgcagggcgcatgcaaagacaacccgggagagaacgcccgacagctggccaggattgtatgcggcaccgtgatggccggtgaactgtccctgatggccgcactggctgccggacacctagttaagtctcacatgattcacaacaggtcaaaaattaatcttcaggatctgcagggagcctgcaccaagaaaacagcttag

SEQ ID NO: 16577 - DNA, 2667 bp, Artificial Sequence
  derived and/or modified sequence
atgctgagcagactgttcagaatgcacggcctgttcgtggccagccacccctgggaggtgatcgtgggcaccgtgaccctgaccatctgcatgatgagcatgaacatgttcaccggcaacaacaagatctgcggctggaactacgagtgccccaagttcgaggaggacgtgctgagcagcgacatcatcatcctgaccatcaccagatgcatcgccatcctgtacatctacttccagttccagaacctgagacagctgggcagcaagtacatcctgggcatcgccggcctgttcaccatcttcagcagcttcgtgttcagcaccgtggtgatccacttcctggacaaggagctgaccggcctgaacgaggccctgcccttcttcctgctgctgatcgacctgagcagagccagcaccctggccaagttcgccctgagcagcaacagccaggacgaggtgagagagaacatcgccagaggcatggccatcctgggccccaccttcaccctggacgccctggtggagtgcctggtgatcggcgtgggcaccatgagcggcgtgagacagctggagatcatgtgctgcttcggctgcatgagcgtgctggccaactacttcgtgttcatgaccttcttccccgcctgcgtgagcctggtgctggagctgagcagagagagcagagagggcagacccatctggcagctgagccacttcgccagagtgctggaggaggaggagaacaagcccaaccccgtgacccagagagtgaagatgatcatgagcctgggcctggtgctggtgcacgcccacagcagatggatcgccgaccccagcccccagaacagcaccgccgacaccagcaaggtgagcctgggcctggacgagaacgtgagcaagagaatcgagcccagcgtgagcctgtggcagttctacctgagcaagatgatcagcatggacatcgagcaggtgatcaccctgagcctggccctgctgctggccgtgaagtacatcttcttcgagcagaccgagaccgagagcaccctgagcctgaagaaccccatcaccagccccgtggtgacccagaagaaggtgcccgacaactgctgcagaagagagcccatgctggtgagaaacaaccagaagtgcgacagcgtggaggaggagaccggcatcaacagagagagaaaggtggaggtgatcaagcccctggtggccgagaccgacacccccaacagagccaccttcgtggtgggcaacagcagcctgctggacaccagcagcgtgctggtgacccaggagcccgagatcgagctgcccagagagcccagacccaacgaggagtgcctgcagatcctgggcaacgccgagaagggcgccaagttcctgagcgacgccgagatcatccagctggtgaacgccaagcacatccccgcctacaagctggagaccctgatggagacccacgagagaggcgtgagcatcagaagacagctgctgagcaagaagctgagcgagcccagcagcctgcagtacctgccctacagagactacaactacagcctggtgatgggcgcctgctgcgagaacgtgatcggctacatgcccatccccgtgggcgtggccggccccctgtgcctggacgagaaggagttccaggtgcccatggccaccaccgagggctgcctggtggccagcaccaacagaggctgcagagccatcggcctgggcggcggcgccagcagcagagtgctggccgacggcatgaccagaggccccgtggtgagactgcccagagcctgcgacagcgccgaggtgaaggcctggctggagaccagcgagggcttcgccgtgatcaaggaggccttcgacagcaccagcagattcgccagactgcagaagctgcacaccagcatcgccggcagaaacctgtacatcagattccagagcagaagcggcgacgccatgggcatgaacatgatcagcaagggcaccgagaaggccctgagcaagctgcacgagtacttccccgagatgcagatcctggccgtgagcggcaactactgcaccgacaagaagcccgccgccatcaactggatcgagggcagaggcaagagcgtggtgtgcgaggccgtgatccccgccaaggtggtgagagaggtgctgaagaccaccaccgaggccatgatcgaggtgaacatcaacaagaacctggtgggcagcgccatggccggcagcatcggcggctacaacgcccacgccgccaacatcgtgaccgccatctacatcgcctgcggccaggacgccgcccagaacgtgggcagcagcaactgcatcaccctgatggaggccagcggccccaccaacgaggacctgtacatcagctgcaccatgcccagcatcgagatcggcaccgtgggcggcggcaccaacctgctgccccagcaggcctgcctgcagatgctgggcgtgcagggcgcctgcaaggacaaccccggcgagaacgccagacagctggccagaatcgtgtgcggcaccgtgatggccggcgagctgagcctgatggccgccctggccgccggccacctggtgaagagccacatgatccacaacagaagcaagatcaacctgcaggacctgcagggcgcctgcaccaagaagaccgcctag

SEQ ID NO: 16578 - DNA, 2460 bp, Artificial Sequence
  derived and/or modified sequence
atgcacagccaccccgtgtacctgctgcccgtgcccgagttcaccagcacctggatcaagatctacttcggctactgctggcccttccacaacttcctgaagttctgcatccagtacagctgccacagcctgctgagacagagaatcgacagactggaggaggccctgcccttcttcctgctgctgatcgacctgagcagagccagcaccctggccaagttcgccctgagcagcaacagccaggacgaggtgagagagaacatcgccagaggcatggccatcctgggccccaccttcaccctggacgccctggtggagtgcctggtgatcggcgtgggcaccatgagcggcgtgagacagctggagatcatgtgctgcttcggctgcatgagcgtgctggccaactacttcgtgttcatgaccttcttccccgcctgcgtgagcctggtgctggagctgagcagagagagcagagagggcagacccatctggcagctgagccacttcgccagagtgctggaggaggaggagaacaagcccaaccccgtgacccagagagtgaagatgatcatgagcctgggcctggtgctggtgcacgcccacagcagatggatcgccgaccccagcccccagaacagcaccgccgacaccagcaaggtgagcctgggcctggacgagaacgtgagcaagagaatcgagcccagcgtgagcctgtggcagttctacctgagcaagatgatcagcatggacatcgagcaggtgatcaccctgagcctggccctgctgctggccgtgaagtacatcttcttcgagcagaccgagaccgagagcaccctgagcctgaagaaccccatcaccagccccgtggtgacccagaagaaggtgcccgacaactgctgcagaagagagcccatgctggtgagaaacaaccagaagtgcgacagcgtggaggaggagaccggcatcaacagagagagaaaggtggaggtgatcaagcccctggtggccgagaccgacacccccaacagagccaccttcgtggtgggcaacagcagcctgctggacaccagcagcgtgctggtgacccaggagcccgagatcgagctgcccagagagcccagacccaacgaggagtgcctgcagatcctgggcaacgccgagaagggcgccaagttcctgagcgacgccgagatcatccagctggtgaacgccaagcacatccccgcctacaagctggagaccctgatggagacccacgagagaggcgtgagcatcagaagacagctgctgagcaagaagctgagcgagcccagcagcctgcagtacctgccctacagagactacaactacagcctggtgatgggcgcctgctgcgagaacgtgatcggctacatgcccatccccgtgggcgtggccggccccctgtgcctggacgagaaggagttccaggtgcccatggccaccaccgagggctgcctggtggccagcaccaacagaggctgcagagccatcggcctgggcggcggcgccagcagcagagtgctggccgacggcatgaccagaggccccgtggtgagactgcccagagcctgcgacagcgccgaggtgaaggcctggctggagaccagcgagggcttcgccgtgatcaaggaggccttcgacagcaccagcagattcgccagactgcagaagctgcacaccagcatcgccggcagaaacctgtacatcagattccagagcagaagcggcgacgccatgggcatgaacatgatcagcaagggcaccgagaaggccctgagcaagctgcacgagtacttccccgagatgcagatcctggccgtgagcggcaactactgcaccgacaagaagcccgccgccatcaactggatcgagggcagaggcaagagcgtggtgtgcgaggccgtgatccccgccaaggtggtgagagaggtgctgaagaccaccaccgaggccatgatcgaggtgaacatcaacaagaacctggtgggcagcgccatggccggcagcatcggcggctacaacgcccacgccgccaacatcgtgaccgccatctacatcgcctgcggccaggacgccgcccagaacgtgggcagcagcaactgcatcaccctgatggaggccagcggccccaccaacgaggacctgtacatcagctgcaccatgcccagcatcgagatcggcaccgtgggcggcggcaccaacctgctgccccagcaggcctgcctgcagatgctgggcgtgcagggcgcctgcaaggacaaccccggcgagaacgccagacagctggccagaatcgtgtgcggcaccgtgatggccggcgagctgagcctgatggccgccctggccgccggccacctggtgaagagccacatgatccacaacagaagcaagatcaacctgcaggacctgcagggcgcctgcaccaagaagaccgcctag

SEQ ID NO: 16579 - protein, 266 aa, Artificial Sequence [sequence omitted]

SEQ ID NO: 16580 - protein, 145 aa, Artificial Sequence
  derived and/or modified sequence
MSKQNGGEGGIIINMSSLAGLMPVAQQPVYCASKHGIVGFTRSAALAANLMNSGVRLNAICPGFVNTAILESIEKEENMGQYIEYKDHIKDMIKYYGILDPPLIANGLITLIEDDALNGAIMKITTSKGIHFQDYDTTPFQAKTQ

SEQ ID NO: 16581 - DNA, 801 bp, Artificial Sequence
  derived and/or modified sequence
atgcacgtgaacggcaaggtggccctggtgaccggcgccgcccagggcatcggcagagccttcgccgaggccctgctgctgaagggcgccaaggtggccctggtggactggaacctggaggccggcgtgcagtgcaaggccgccctggacgagcagttcgagccccagaagaccctgttcatccagtgcgacgtggccgaccagcagcagctgagagacaccttcagaaaggtggtggaccacttcggcagactggacatcctggtgaacaacgccggcgtgaacaacgagaagaactgggagaagaccctgcagatcaacctggtgagcgtgatcagcggcacctacctgggcctggactacatgagcaagcagaacggcggcgagggcggcatcatcatcaacatgagcagcctggccggcctgatgcccgtggcccagcagcccgtgtactgcgccagcaagcacggcatcgtgggcttcaccagaagcgccgccctggccgccaacctgatgaacagcggcgtgagactgaacgccatctgccccggcttcgtgaacaccgccatcctggagagcatcgagaaggaggagaacatgggccagtacatcgagtacaaggaccacatcaaggacatgatcaagtactacggcatcctggacccccccctgatcgccaacggcctgatcaccctgatcgaggacgacgccctgaacggcgccatcatgaagatcaccaccagcaagggcatccacttccaggactacgacaccacccccttccaggccaagacccagtag

SEQ ID NO: 16582 - DNA, 801 bp, Artificial Sequence
  derived and/or modified sequence
atgcacgtgaacggcaaagtggcccttgtcactggagctgctcaaggcatcgggagggcattcgcagaggctcttcttttaaagggcgctaaggtcgccctggtggattggaatcttgaagcaggcgtccaatgcaaggcagcactggatgagcagtttgagccgcagaagacactgttcatccagtgcgacgttgctgaccaacagcaattgagagatacgttccggaaggtcgttgaccacttcgggcgcctcgatatactagtgaacaatgcgggtgtaaacaacgagaagaactgggaaaagacgttacagatcaacctggtgagtgtcatctcaggcacctacctgggccttgactacatgagcaaacagaacggaggcgagggcggcatcattattaatatgtcatccctcgcaggcctgatgcccgtggcccagcagccagtgtactgtgcaagcaaacacggaatcgtgggctttacccggtccgccgccctggctgcaaacctcatgaattccggcgtccggctcaatgcgatatgtccaggttttgtgaacacggctattctggagtctatagaaaaagaagagaacatgggacagtatatcgagtataaggaccacattaaggacatgataaagtattacgggatcctcgaccctcccctgattgccaatggcctgattacactcattgaggacgacgcactgaacggcgccataatgaagatcacaacctcgaaggggatccattttcaggactatgacaccacccccttccaggctaagacccagtag

SEQ ID NO: 16583 - DNA, 3027 bp, Artificial Sequence
  derived and/or modified sequence
gctttattgtttgcttgttttgttccggagtcggggccgggagggagtgcaggaggagggatccaagcttccaagcctctgctccgctctccttctatccagttggtctttagggcactgaaggaaactcttcttcagaaataaccttttaacttttcttctgtcagctgcctgccaatcacggagccagaggctgaggggaggctttgagccggtctgcgagtccggaaggcaaagatcgcgaagcttggcgctccagaacgctcagggggcaggtgacacagtcgtgggttccccggcgggcgctggcttgacagtttcctccccgcccactggcaggggagcgccccgccgggctgcacgcgcgcgcgcgcaggggggcataaaagccgcggccgcgcggagacgcggagctcgcccaccgcccgccccagcagtggctgcaccatgcacgtgaacggcaaagtggcgctggtgaccggcgcggctcagggcataggcagagcctttgcagaggcgctgctgcttaagggcgccaaggtagcgctggtggattggaatcttgaagcaggtgtacagtgtaaagctgccctggatgagcagtttgaacctcagaagactctgttcatccagtgcgatgtggctgaccagcaacaactgagagacacttttagaaaagttgtagaccactttggaagactggacattttggtcaataatgctggagtgaataatgagaaaaactgggaaaaaactctgcaaattaatttggtttctgttatcagtggaacctatcttggtttggattacatgagtaagcaaaatggaggtgaaggcggcatcattatcaatatgtcatctttagcaggactcatgcccgttgcacagcagccggtttattgtgcttcaaagcatggcatagttggattcacacgctcagcagcgttggctgctaatcttatgaacagtggtgtgagactgaatgccatttgtccaggctttgttaacacagccatccttgaatcaattgaaaaagaagaaaacatgggacaatatatagaatataaggatcatatcaaggatatgattaaatactatggaattttggacccaccattgattgccaatggattgataacactcattgaagatgatgctttaaatggtgctattatgaagatcacaacttctaagggaattcattttcaagactatgatacaactccatttcaagcaaaaacccaatgaacagcttatgtgttagccatagctgaaaataagcacaaatagcttatattcagatcctatcttcatttgaatatagcttttaaatgaaatgttacagtttgaagttttccttcatgcacttggtgataaacgttttctaaatttttagttaagtatatggataaaaagttatgaactattaaaaatgtgatgtggaccaaaggctaggttgtaatcttgatagtctaaaaaatgatcaaaacaaatgattttcaaggaatattcaatattctgcctttcagaaagtgtatttatatctgtgcttcataaatattaatgttcttcagaacatcattttaaaggagatacttgaattgttatttaaatcaaaccagatgtaaaacactcacatacaagttcatactttaaaagaggaaagctacttaacaatgacaaatatttcacaataataatttttacttatataccatctttcaactgaacatttcagttcttccaagagcttcttagagtagtatattttgggggcagtcaaggaataaactacagtgtaaacatatcccagatgaaaactgctgtatggaaaaatgacagaaagtaactgattgacactgttgattcacagttcagcctcctatctgggaaagacatttctttcctctgctcactttaagaacttttaccgactccaaaaatctcaggaattaaacttttaacagttacagcaataaagaatagttagtactccaaaaatattatatttaagatgctcaacaagaaaaaaatgcaaatgtaatatttttttcaaattacttctttattgacttgtccaaatttcaaaagtgcctacccttcaataaaacttttttattctgatctccataaattacttagtcttctatgtatagctatcaaggaaataaaaccaattttgccacagccacaactgtaaatgtttttgtacccatgctgaaactcataacaacacagacataaaaatagctgtgaggttttgctttttttgttgtcagctatcttaagaatcattaaatacacctgctttgggtaaaactctttgcaagcagtaattaacactagtaacagtgaaagcacaagatttccaaatcagtcgttttctcaaaaaaatatcgtataagtgactcatcctgtctgctaactccagacctcccagcttgaagccaaatctttccatgtgagattgatatggatttcctagaagtactggaatgttgtcatatcttgccctattttaattctgctatagaaaacaattgccttcacttttaaggagtaatttgaatattaataactctggtctagattttcatataatgtattaaagacaaagtagtgaacatcaatgaacatctgatagagataaactgtaatcaggcataagcttgtttgtatgttctggcagtgactaatcagtaaatgatgtcggtttgcccagtatcacttatcttctgtatttttcctctgtcgtgtaaatagtataaccttttcatttatggacaattttttggactagtagccttcaatatacattctgctttgaattaattttttcaaatcaataaattatgtagacatttaaaatcaaatatcaagtagaattgaaaaatgtgagttacataagttaaaaacttactttaaatcttaccttctataggtagctctaaataaattcatatggttatatggcatctctggtgtatactgattgagaaaataattaaactgaagttaggggagggg

SEQ ID NO: 16584 - DNA, 1535 bp, Artificial Sequence
  derived and/or modified sequence
gacagagcagagtccacttctcatctccagtatccgtaaaaatttgtccaaaatgtaactaagaaaacacaatgatattagttacttctgctccccgtcaccctcaaccccactgattacgagatgggaactcacacaaaactttgagacaaaagagcaacaagtttgctttattgtttgcttgttttgttccggagtcggggccgggagggagtgcaggaggagggatccaagcttccaagcctctgctccgctctccttctatccagttggtctttagggcactgaaggaaactcttcttcagaaataaccttttaacttttcttctgtcagctgcctgccaatcacggagccagaggctgaggggaggctttgagccggtctgcgagtccggaaggcaaagatcgcgaagcttggcgctccagaacgctcagggggcaggtagcgctggtggattggaatcttgaagcaggtgtacagtgtaaagctgccctggatgagcagtttgaacctcagaagactctgttcatccagtgcgatgtggctgaccagcaacaactgagagacacttttagaaaagttgtagaccactttggaagactggacattttggtcaataatgctggagtgaataatgagaaaaactgggaaaaaactctgcaaattaatttggtttctgttatcagtggaacctatcttggtttggattacatgagtaagcaaaatggaggtgaaggcggcatcattatcaatatgtcatctttagcaggactcatgcccgttgcacagcagccggtttattgtgcttcaaagcatggcatagttggattcacacgctcagcagcgttggctgctaatcttatgaacagtggtgtgagactgaatgccatttgtccaggctttgttaacacagccatccttgaatcaattgaaaaagaagaaaacatgggacaatatatagaatataaggatcatatcaaggatatgattaaatactatggaattttggacccaccattgattgccaatggattgataacactcattgaagatgatgctttaaatggtgctattatgaagatcacaacttctaagggaattcattttcaagactatgatacaactccatttcaagcaaaaacccaatgaacagcttatgtgttagccatagctgaaaataagcacaaatagcttatattcagatcctatcttcatttgaatatagcttttaaatgaaatgttacagtttgaagttttccttcatgcacttggtgataaacgttttctaaatttttagttaagtatatggataaaaagttatgaactattaaaaatgtgatgtggaccaaaggctaggttgtaatcttgatagtctaaaaaatgatcaaaacaaatgattttcaaggaatattcaatattctgcctttcagaaagtgtatttatatctgtgcttcataaatattaatgttcttcagaacatcattttaaaggagatacttgaattgttatttaaatcaaaccagatgtaaaacac

SEQ ID NO: 16585 - DNA, 1046 bp, Artificial Sequence
  derived and/or modified sequence
agaacgctcagggggcaggtgacacagtcgtgggttccccggcgggcgctggcttgacagtttcctccccgcccactggcaggggagcgccccgccgggctgcacgcgcgcgcgcgcaggggggcataaaagccgcggccgcgcggagacgcggagctcgcccaccgcccgccccagcagtggctgcaccatgcacgtgaacggcaaagtggcgctggtgaccggcgcggctcagggcataggcagagcctttgcagaggcgctgctgcttaagggcgccaaggtagcgctggtggattggaatcttgaagcaggtgtacagtgtaaagctgccctggatgagcagtttgaacctcagaagactctgttcatccagtgcgatgtggctgaccagcaacaactgagaggtttctgttatcagtggaacctatcttggtttggattacatgagtaagcaaaatggaggtgaaggcggcatcattatcaatatgtcatctttagcaggactcatgcccgttgcacagcagccggtttattgtgcttcaaagcatggcatagttggattcacacgctcagcagcgttggctgctaatcttatgaacagtggtgtgagactgaatgccatttgtccaggctttgttaacacagccatccttgaatcaattgaaaaagaagaaaacatgggacaatatatagaatataaggatcatatcaaggatatgattaaatactatggaattttggacccaccattgattgccaatggattgataacactcattgaagatgatgctttaaatggtgctattatgaagatcacaacttctaagggaattcattttcaagactatgatacaactccatttcaagcaaaaacccaatgaacagcttatgtgttagccatagctgaaaataagcacaaatagcttatattcagatcctatcttcatttgaatatagcttttaaatgaaatgttacagtttgaagttttccttcatgcacttggtgataaacgttttctaaatttttagttaagtatatggat

SEQ ID NO: 16586 - DNA, 801 bp, Artificial Sequence
  derived and/or modified sequence
atgcacgtgaatggcaaggtggccctggtgactggagctgcccagggcatcggccgggcctttgctgaggccctgctgctgaagggggccaaggtggccctggtggactggaacctggaggccggcgtgcagtgcaaggccgccctggatgagcagtttgagccccagaagaccctcttcatccagtgtgatgtggccgaccagcagcagctgcgggacaccttcaggaaggtggtggaccacttcggccgcctggacatcctggtgaacaatgctggggtgaacaatgagaagaactgggagaagaccctgcagatcaacctggtgtctgtcatcagcggcacctacctgggcctggactacatgagcaagcagaatggaggagagggcggcatcatcatcaacatgagcagcctggccggcctgatgcctgtggcccagcagcctgtgtactgtgccagcaagcacggcatcgtgggcttcaccaggtctgctgccctggccgccaacctgatgaacagcggcgtgcggctgaatgccatctgccccggctttgtgaacacagccatcctggagagcattgagaaggaggagaacatgggccagtacatcgagtacaaggaccacatcaaggacatgatcaagtactacggcatcctggacccccccctgattgccaacggcctcatcaccctgattgaagatgatgccctgaatggagccatcatgaagatcaccaccagcaagggcatccacttccaggactatgacaccacccccttccaggccaagacccagtag

SEQ ID NO: 16587 - DNA, 801 bp, Artificial Sequence
  derived and/or modified sequence
atgcacgtgaacggcaaggtggccctggtgaccggcgccgcccagggaattggtcgggcgtttgcagaggcactgttgctgaaaggtgccaaggtggctcttgtggactggaacctggaggccggcgttcagtgcaaggcagccctagatgagcagtttgaaccccagaagacattatttattcagtgcgacgtcgccgaccagcagcagctgcgggatactttccgcaaggtggtagaccactttggcagactggacattttagtcaataacgccggagtaaataacgaaaagaactgggaaaagaccctccagataaacctcgtaagcgttatttccggcacatacttgggcctcgattatatgagtaagcagaacggcggtgaggggggcatcatcataaatatgtcatctttagctggacttatgcctgtggcacagcagccagtgtactgcgcctctaagcacggcatcgtaggtttcaccaggagcgctgcactggctgcaaatctgatgaacagcggggttcgcctgaatgctatctgtcctggctttgtaaatacagctattttagagagtatagagaaggaagagaatatgggccaatacatcgaatataaagatcatatcaaagacatgataaaatactacgggatcctggatccacccctgatcgcgaacggcctaatcactctcatcgaagatgacgctctgaacggggccattatgaagataactacctcaaaagggattcactttcaggactatgatactacaccttttcaggctaaaacccaatag

SEQ ID NO: 16588 - DNA, 801 bp, Artificial Sequence
  derived and/or modified sequence
atgcacgtgaacggaaaagtcgccctcgtgacgggggctgcgcagggcattggtagggcctttgcggaggccctcctcctcaagggtgccaaagtagccttagtcgattggaacttggaggctggggttcaatgcaaggccgctctcgatgaacagtttgagccccagaagaccctcttcattcagtgcgacgtcgctgatcaacagcagctgcgcgacacctttagaaaagtcgtggaccacttcggcagacttgatatactggtaaataacgccggagtcaataacgaaaaaaattgggagaaaaccctgcagatcaacctcgtgtctgtgattagtgggacctatttgggactggattatatgtcaaaacagaacggcggagaaggtggtatcattattaacatgagtagcctggctggtcttatgccagtcgctcagcagcccgtttattgtgcctcaaaacatggaattgtgggctttactcgttctgccgcattggctgcaaacttgatgaactctggtgtacgtcttaatgccatatgtcctggctttgtaaacaccgctattttagagagcattgaaaaggaggaaaacatggggcagtatatcgaatataaggaccatattaaggacatgataaaatactatggaatcctggaccctccgttgattgcaaatgggctgataaccctgatcgaggatgacgctctgaacggagctatcatgaaaatcactacaagcaaaggaatccactttcaggactacgatactacgcctttccaggctaagacccagtag

SEQ ID NO: 16589 - protein, 390 aa, Artificial Sequence
  derived and/or modified sequence
MEEPGAQCAPPPPAGSETWVPQANLSSAPSQNCSAKDYIYQDSISLPWKVLLVMLLALITLATTLSNAFVIATVYRTRKLHTPANYLIASLAVTDLLVSILVMPISTMYTVTGRWTLGQVVCDFWLSSDITCCTASILHLCVIALDRYWAITDAVEYSAKRTPKRAAVMIALVWVFSISISLPPFFWRQAKAEEEVSECVVNTDHILYTVYSTVGAFYFPTLLLIALYGRIYVEARSRILKQTPNRTGKRLTRAQLITDSPGSTSSVTSINSRVPDVPSESGSPVYVNQVKVRVSDALLEKKKLMAARERKATKTLGIILGAFIVCWLPFFIISLVMPICKDACWFHLAIFDFFTWLGYLNSLINPIIYTMSNEDFKQAFHKLIRFKCTS

SEQ ID NO: 16590 - DNA, 1173 bp, Artificial Sequence
  derived and/or modified sequence
atggaggagcccggggcacagtgtgcaccccccccccccgcggggagcgagacctgggtaccacaggccaaccttagtagcgccccatcacagaattgctcagcgaaagattacatctaccaagactccatcagcctcccatggaaagtgctactggtaatgctattagccctgatcacgctggcaactacgctgtcaaatgcatttgtgattgccacagtgtatcgcacccgtaaactccacaccccagcaaattatctcatcgcctcccttgccgtcactgacctcctggtctcgatcctagttatgccaataagcaccatgtatacagtgacaggcaggtggacactgggacaggtggtgtgtgacttctggttgagcagcgacatcacatgctgcacggccagcatacttcacctctgtgtaatcgctctggaccggtattgggctataacagacgccgtggaatatagtgccaagagaacccctaagagagctgcagtgatgatcgctctggtttgggtattctccatttccatttctctgcctccatttttctggcgccaggctaaagcggaggaggaagtgagcgagtgtgtggtgaataccgaccatatactctacaccgtgtattctaccgttggagcattttattttcctactctactccttatcgcactctatggccgaatatatgtggaggccaggagcaggatacttaaacagacgcccaataggacaggtaagcgcctgacccgggcccagcttatcaccgactcgcctggatccacaagctcagtgacttcaattaactctagggtgcctgatgtgcccagcgagtccgggtcacccgtgtatgtcaatcaggtgaaggtccgggtctccgacgccctcctggaaaaaaaaaaactgatggctgctagagaaagaaaagctactaagactctgggaatcattctgggtgcttttattgtgtgttggctgccttttttcatcatcagtttggtgatgccaatctgcaaggatgcctgctggtttcaccttgctatcttcgatttctttacatggctcgggtacctcaactctctgattaaccctatcatctacacgatgtccaacgaagatttcaaacaagccttccacaaattgatccgtttcaaatgcaccagttag

SEQ ID NO: 16591 - DNA, 1173 bp, Artificial Sequence
  derived and/or modified sequence
atggaggagcccggggcccagtgtgcccctcctcctcctgctggcagcgagacctgggtgccccaggccaacctgagcagcgcccccagccagaactgcagcgccaaggactacatctaccaggacagcatcagcctgccctggaaggtgctgctggtgatgctgctggccctgatcaccctggccaccaccctgagcaatgcctttgtgattgccaccgtgtaccgcaccaggaagctgcacaccccagccaactacctgattgccagcctggccgtgacagacctgctggtgtccatcctggtgatgcccatcagcaccatgtacacagtgacaggccgctggaccctgggccaggtggtgtgtgacttctggctgagcagtgacatcacctgctgcacagccagcatcctgcacctgtgtgtgattgccctggaccgctactgggccatcacagatgctgtggagtacagcgccaagaggacccccaagagagctgctgtgatgattgccctggtgtgggtgttcagcatcagcatcagcctgccccccttcttctggaggcaggccaaggccgaggaggaggtgtctgaatgtgtggtgaacacagaccacatcctgtacacagtgtacagcacagtgggcgccttctacttccccaccctgctgctgattgccctgtatggccgcatctacgtggaggcccggagccgcatcctgaagcagacccccaacagaacaggcaagaggctgacccgggcccagctgatcacagacagccctggcagcaccagctctgtgaccagcatcaacagccgggtgcctgatgtgcccagcgagagcggcagccctgtgtatgtgaaccaggtgaaggtgcgggtgtctgatgccctgctggagaagaagaagctgatggccgcccgggagaggaaggccaccaagaccctgggcatcatcctgggcgccttcatcgtgtgctggctgcccttcttcatcatcagcctggtgatgcccatctgcaaggatgcctgctggttccacctggccatctttgacttcttcacctggctgggctacctgaacagcctcatcaaccccatcatctacaccatgagcaatgaagacttcaagcaggccttccacaagctgatccgcttcaagtgcaccagctag

SEQ ID NO: 16592 - DNA, 1173 bp, Artificial Sequence
  derived and/or modified sequence
atggaggagcccggcgcccagtgcgccccccccccccccgccggcagtgagacctgggtgccacaggcaaatctgtccagtgcaccaagccagaattgctccgccaaggactacatctatcaggactctatctccctgccatggaaagtgttgcttgtgatgctgctcgctctgattacgcttgcaactactctgtcgaacgcgttcgtgatcgccacagtgtatcggaccaggaagctccatactcccgccaattacctgattgcctcacttgccgtgaccgatctgctagtttctattttggtgatgccaattagcacgatgtacacagttaccggcaggtggacccttggtcaggtcgtgtgcgatttttggctgagctccgatattacctgctgtacagcctccattctgcacctgtgcgtcatagccctcgatcggtactgggctatcaccgatgctgtcgaatacagcgcaaaacggaccccgaagagggcagcagtgatgatagcacttgtgtgggttttttctataagcatttcactgcccccatttttttggagacaagccaaggctgaagaagaggttagtgagtgtgtcgtcaacactgatcatatactgtacactgtctattcaaccgttggtgctttttacttcccaaccctgttattgatagctctctatggccgaatctacgttgaggctaggtctagaatactgaaacaaacacctaacaggacgggcaaaagactgactcgagcccagttaataaccgatagcccagggagcacctcatccgtgacctctataaatagtcgggtgcctgacgtgcctagcgaaagtgggtcccccgtctatgtgaaccaggtgaaggttcgggttagtgacgccctgctcgagaagaaaaagcttatggctgctcgggaaagaaaggccacaaagaccctgggcattatattaggcgcctttattgtttgttggttacccttttttataatctctctggtgatgcctatctgcaaggacgcatgctggttccatctcgccatcttcgacttcttcacctggcttggatatctgaactcccttatcaatcctataatttataccatgagcaatgaggatttcaagcaggcgtttcacaagttgattcggttcaaatgtacatcctag

SEQ ID NO: 16593 - DNA, 1173 bp, Artificial Sequence
  derived and/or modified sequence
atggaggagcctggagcccaatgcgcgcctccacctcctgcaggctcagagacctgggtgcctcaggctaatttgtcatccgcacctagtcagaattgcagtgctaaagattacatttaccaggattctatctcactgccatggaaagtccttctggttatgctgctagcactcatcaccttggccacaactctcagtaacgcgttcgttatcgcgacagtgtatagaactcggaaactacacacccccgcaaattatctgatagcctccctggcagtgacagacctcctcgttagcatcctggtgatgccaatcagtaccatgtacactgtgactgggagatggacacttgggcaggtcgtgtgcgatttttggttgtcaagcgatataacctgttgtaccgcaagcattcttcacttgtgcgtaatcgccctcgaccgatactgggctatcactgacgccgtcgaatattcagccaagcgtacacctaagcgcgctgccgtgatgatagccttggtgtgggtgttcagtatttctatatcacttcccccattcttctggagacaagccaaggcagaagaggaagtgtctgagtgtgtggtgaatacagaccatatcctatataccgtttatagcaccgttggtgccttttacttcccaaccttgctgctgatcgccctctacggcagaatttacgtcgaagctcgaagccgtattctgaaacagacgcctaaccggacaggcaagagattaacccgggctcagttgattacggattctccgggttcaacctcaagcgtgacatcaattaactccagggtgcccgacgtaccctctgagtctggctctccggtctacgtcaatcaggtgaaagtgagggtgtcagatgccctgttagagaaaaaaaaattaatggcagcgagggagagaaaggccaccaagactttggggataatcctgggcgcatttattgtttgctggttacccttcttcataatttcactggttatgccgatctgcaaggatgcctgctggttccatctggccattttcgatttctttacttggctcggataccttaacagtcttatcaaccccattatttacacgatgtccaatgaagacttcaagcaggcctttcacaaattgatccggtttaaatgcacctcctag

SEQ ID NO: 16594 - DNA, 1543 bp, Artificial Sequence
  derived and/or modified sequence
atttggtcaaagccttctcctcaagcagtacttcaccctcctgcactagacgcctccagggagctggagcggagcagggctcggtgggccagctcttagcaacccaggtctaagacccggtgtggagaggaacaaccacagacgcggcggcttagctaggcgctctggaagtgcaggggaggcgcccgcctgccttggctgccgcacccatgacctctagtttcagctgtgaacctgggcggaggaataattgaggaactcacggaactatcaactggggacaaacctgcgatcgccacggtccttccgccctctccttcgtccgctccatgcccaagagctgcgctccggagctggggcgaggagagccatggaggaaccgggtgctcagtgcgctccaccgccgcccgcgggctccgagacctgggttcctcaagccaacttatcctctgctccctcccaaaactgcagcgccaaggactacatttaccaggactccatctccctaccctggaaagtactgctggttatgctattggcgctcatcaccttggccaccacgctctccaatgcctttgtgattgccacagtgtaccggacccggaaactgcacaccccggctaactacctgatcgcctctctggcggtcaccgacctgcttgtgtccatcctggtgatgcccatcagcaccatgtacactgtcaccggccgctggacactgggccaggtggtctgtgacttctggctgtcgtcggacatcacttgttgcactgcctccatcctgcacctctgtgtcatcgccctggaccgctactgggccatcacggacgccgtggagtactcagctaaaaggactcccaagagggcggcggtcatgatcgcgctggtgtgggtcttctccatctctatctcgctgccgcccttcttctggcgtcaggctaaggccgaagaggaggtgtcggaatgcgtggtgaacaccgaccacatcctctacacggtctactccacggtgggtgctttctacttccccaccctgctcctcatcgccctctatggccgcatctacgtagaagcccgctcccggattttgaaacagacgcccaacaggaccggcaagcgcttgacccgagcccagctgataaccgactcccccgggtccacgtcctcggtcacctctattaactcgcgggttcccgacgtgcccagcgaatccggatctcctgtgtatgtgaaccaagtcaaagtgcgagtctccgacgccctgctggaaaagaagaaactcatggccgctagggagcgcaaagccaccaagaccctagggatcattttgggagcctttattgtgtgttggctacccttcttcatcatctccctagtgatgcctatctgcaaagatgcctgctggttccacctagccatctttgacttcttcacatggctgggctatctcaactccctcatcaaccccataatctataccatgtccaatgaggactttaaacaagcattccataaactgatacgttttaagtgcacaagttga

SEQ ID NO: 16595 - DNA, 1173 bp, Artificial Sequence
  derived and/or modified sequence
atggaggagcccggcgcccagtgcgccccccccccccccgccggcagcgagacctgggtgccccaggccaacctgagcagcgcccccagccagaactgcagcgccaaggactacatctaccaggacagcatcagcctgccctggaaggtgctgctggtgatgctgctggccctgatcaccctggccaccaccctgagcaacgccttcgtgatcgccaccgtgtacagaaccagaaagctgcacacccccgccaactacctgatcgccagcctggccgtgaccgacctgctggtgagcatcctggtgatgcccatcagcaccatgtacaccgtgaccggcagatggaccctgggccaggtggtgtgcgacttctggctgagcagcgacatcacctgctgcaccgccagcatcctgcacctgtgcgtgatcgccctggacagatactgggccatcaccgacgccgtggagtacagcgccaagagaacccccaagagagccgccgtgatgatcgccctggtgtgggtgttcagcatcagcatcagcctgccccccttcttctggagacaggccaaggccgaggaggaggtgagcgagtgcgtggtgaacaccgaccacatcctgtacaccgtgtacagcaccgtgggcgccttctacttccccaccctgctgctgatcgccctgtacggcagaatctacgtggaggccagaagcagaatcctgaagcagacccccaacagaaccggcaagagactgaccagagcccagctgatcaccgacagccccggcagcaccagcagcgtgaccagcatcaacagcagagtgcccgacgtgcccagcgagagcggcagccccgtgtacgtgaaccaggtgaaggtgagagtgagcgacgccctgctggagaagaagaagctgatggccgccagagagagaaaggccaccaagaccctgggcatcatcctgggcgccttcatcgtgtgctggctgcccttcttcatcatcagcctggtgatgcccatctgcaaggacgcctgctggttccacctggccatcttcgacttcttcacctggctgggctacctgaacagcctgatcaaccccatcatctacaccatgagcaacgaggacttcaagcaggccttccacaagctgatcagattcaagtgcaccagctag

SEQ ID NO: 16596 - protein, 366 aa, Artificial Sequence
  derived and/or modified sequence
MDFLNSSDQNLTSEELLNRMPSKILVSLTLSGLALMTTTINSLVIAAIIVTRKLHHPANYLICSLAVTDFLVAVLVMPFSIVYIVRESWIMGQVVCDIWLSVDITCCTCSILHLSAIALDRYRAITDAVEYARKRTPKHAGIMITIVWIISVFISMPPLFWRHQGTSRDDECIIKHDHIVSTIYSTFGAFYIPLALILILYYKIYRAAKTLYHKRQASRIAKEEVNGQVLLESGEKSTKSVSTSYVLEKSLSDPSTDFDKIHSTVRSLRSEFKHEKSWRRQKISGTRERKAATTLGLILGAFVICWLPFFVKELVVNVCDKCKISEEMSNFLAWLGYLNSLINPLIYTIFNEDFKKAFQKLVRCRC

SEQ ID NO: 16597 - DNA, 1101 bp, Artificial Sequence
  derived and/or modified sequence
atggatttccttaacagcagtgatcagaacctgactagcgaggagttactgaataggatgccctctaaaattcttgtctccctaacactgtctgggctggccctgatgacaaccacaatcaacagtctggtcattgcggccattatcgtgaccagaaagttgcaccacccggccaactacctaatctgctctctggcggtgaccgactttctagtcgctgtgcttgtgatgccgttcagcatagtgtatatcgtacgcgaatcctggatcatggggcaggtagtttgcgacatttggctcagcgtcgacatcacatgctgcacttgcagcattctgcatctatccgccattgccttagacagataccgcgctatcacggatgccgtggagtatgcacggaaaagaacccccaaacatgccggtatcatgatcactattgtttggatcatctccgtgtttatatctatgcctccgctgttttggcggcatcagggaactagcagggacgatgaatgcattattaagcacgaccatatcgtatctaccatatactctacttttggagccttctatatccccctggccttgattctcattctgtactataagatctatagggcagcgaagactctgtatcataagcggcaggcatctcgaattgccaaggaggaagtcaatgggcaggtgctgctcgagtccggcgaaaaatccacaaagtctgtctccacttcttacgttctggagaagagcctgtctgatccctccactgatttcgacaaaatccacagcacagttcgatcactgaggtcggagtttaaacatgagaagagctggagaaggcagaaaatctcgggcactagggaacgaaaagcagcaaccacccttggcctcatcctgggagcctttgtgatttgctggcttccatttttcgtaaaggagctcgtagtcaacgtttgtgacaagtgcaagatcagcgaagaaatgagtaacttcctggcttggttggggtacttgaactcactgatcaatccactgatttacactattttcaacgaggatttcaagaaggcatttcagaaattagtgcggtgtcgctgctag

SEQ ID NO: 16598 - DNA, 1101 bp, Artificial Sequence
  derived and/or modified sequence
atggacttcctgaacagcagtgaccagaacctgaccagcgaggagctgctgaacaggatgcccagcaagatcctggtgtccctgaccctgagcggcctggccctgatgaccaccaccatcaacagcctggtgattgctgccatcatcgtgaccaggaagctgcaccacccagccaactacctgatctgcagcctggccgtgacagacttcctggtggccgtgctggtgatgcccttcagcatcgtgtacatcgtgcgggagagctggatcatgggccaggtggtgtgtgacatctggctgtctgtggacatcacctgctgcacctgcagcatcctgcacctgagcgccatcgccctggaccgctaccgggccatcacagatgctgtggagtatgccaggaagaggacccccaagcacgccggcatcatgatcaccatcgtgtggatcatctctgtgttcatctccatgcctcctctcttctggaggcaccagggcaccagcagagatgatgagtgcatcatcaagcatgaccacatcgtgtccaccatctacagcacctttggagccttctacatccccctggccctgatcctgatcctgtactacaagatctacagagctgccaagaccctgtaccacaagaggcaggccagccgcatcgccaaggaggaggtgaatggccaggtgctgctggagagcggggagaagagcaccaagtctgtgtccaccagctatgtgctggagaagagcctgagtgaccccagcacagactttgacaagatccacagcacagtgcgcagcctgcggtctgagttcaagcatgagaagtcctggaggcggcagaagatcagcggcacccgggagaggaaggccgccaccaccctgggcctcatcctgggcgccttcgtcatctgctggctgcccttctttgtgaaggagctggtggtgaatgtgtgtgacaagtgcaagatcagcgaggagatgagcaacttcctggcctggctgggctacctgaacagcctcatcaaccccctcatctacaccatcttcaatgaagacttcaagaaggccttccagaagctggtgcgctgccgctgctag

SEQ ID NO: 16599 - DNA, 1101 bp, Artificial Sequence
  derived and/or modified sequence
atggacttcctgaacagcagcgaccagaacctgaccagcgaggagctcctcaatcggatgccatccaaaattctagtgagccttactctgtccggcctggctctgatgacaacaacgattaacagcctggtgattgcggccatcatcgtcacacggaagctgcaccaccctgccaattacctgatctgttctctggccgtaacagattttctggtggcagtcctggtgatgccgttcagcatcgtctatattgtacgcgaatcatggattatgggacaggtagtgtgcgatatctggctatcagtcgatatcacctgctgtacctgttccattttacacttatctgccatcgcactggatagatatagggccatcaccgacgccgtcgagtatgcccgcaagcgtacaccaaaacacgcaggaattatgatcactattgtgtggataatcagcgtattcatttctatgccgccccttttttggcggcatcaggggacaagccgtgacgatgagtgtattatcaaacacgaccacattgtgagcacaatctatagcacatttggcgccttctacattcccctggccctgatcctgatcctctattataagatctacagggctgcgaaaacattgtaccacaaacgccaggcaagcagaattgccaaggaggaggtaaatgggcaggttctgctggagtccggagagaaatccactaagtctgtgtccacaagctacgtgctcgaaaagagtttgagcgatccatccaccgattttgataaaatccactcaacagtgaggtctctgcgctctgagtttaaacacgagaaatcttggcgacggcagaagatcagcggcacccgcgagcggaaagctgccacaacactcggtctcattcttggggcctttgtcatctgctggctgccgtttttcgtgaaggagcttgttgttaatgtttgtgacaaatgcaaaataagcgaggagatgagcaattttctcgcgtggttgggttatttgaactccttaattaatcctctgatctataccatcttcaacgaggacttcaagaaggccttccaaaagctggtcagatgccggtgttag

SEQ ID NO: 16600 - DNA, 1101 bp, Artificial Sequence
  derived and/or modified sequence
atggattttctgaacagcagcgatcaaaacctcacctccgaggagctgctcaatcgcatgccatccaagatccttgtctccttgactctctccggcctcgcccttatgactacgacaatcaactcactggtgatcgcagcgatcatagtgacccgtaaattgcatcaccctgccaactatctgatttgctctctcgccgtgaccgatttcctcgtggccgtccttgtgatgccgttttccatcgtttatattgtgcgggagtcctggataatggggcaggtagtatgtgatatttggctgagtgtcgacattacatgctgtacgtgctccattctgcatctgagcgctattgctctggaccgataccgtgcaattacagacgcagttgaatatgcccgaaaaaggacacccaagcatgctggcatcatgattaccatcgtatggataattagcgtgttcatcagcatgcccccactcttttggagacaccagggcacctcacgagatgacgagtgcatcatcaagcatgaccacattgtttctactatctacagcacctttggcgctttctatatccctttggccctcatcctgatcctttattataagatctatagggccgctaagacactttaccataagaggcaagccagccggatcgccaaggaggaagtgaacggccaggtgcttttagagtctggtgaaaagtccacaaagagcgtgagcacgtcctatgtgctggaaaaaagtctctcagacccttctactgacttcgacaagatccactctactgtgagatcacttcgatcagaattcaagcacgagaagtcatggaggcggcagaagatctccgggactcgtgagcggaaggcggctaccaccctaggccttattctgggggcttttgtcatttgttggcttcccttcttcgtgaaggagctggtcgttaacgtatgcgacaagtgcaagatttctgaagagatgtctaactttctggcatggttggggtaccttaatagcctgattaaccccctgatctacacaatcttcaacgaagacttcaagaaggcatttcaaaagcttgtgcgctgcagatgttag

SEQ ID NO: 16601 - DNA, 3074 bp, Artificial Sequence
  derived and/or modified sequence
cccttgttacaggtatccatttttcagctatattaatcttttaaaacaaagaaaatggatttcttaaattcatctgatcaaaacttgacctcagaggaactgttaaacagaatgccatccaaaattctggtgtccctcactctgtctgggctggcactgatgacaacaactatcaactcccttgtgatcgctgcaattattgtgacccggaagctgcaccatccagccaattatttaatttgttcccttgcagtcacagattttcttgtggctgtcctggtgatgcccttcagcattgtgtatattgtgagagagagctggattatggggcaagtggtctgtgacatttggctgagtgttgacattacctgctgcacgtgctccatcttgcatctctcagctatagctttggatcggtatcgagcaatcacagatgctgttgagtatgccaggaaaaggactccaaagcatgctggcattatgattacaatagtttggattatatctgtttttatctctatgcctcctctattctggaggcaccaaggaactagcagagatgatgaatgcatcatcaagcacgaccacattgtttccaccatttactcaacatttggagctttctacatcccactggcattgattttgatcctttactacaaaatatatagagcagcaaagacattataccacaagagacaagcaagtaggattgcaaaggaggaggtgaatggccaagtccttttggagagtggtgagaaaagcactaaatcagtttccacatcctatgtactagaaaagtctttatctgacccatcaacagactttgataaaattcatagcacagtgagaagtctcaggtctgaattcaagcatgagaaatcttggagaaggcaaaagatctcaggtacaagagaacggaaagcagccactaccctgggattaatcttgggtgcatttgtaatatgttggcttcctttttttgtaaaagaattagttgttaatgtctgtgacaaatgtaaaatttctgaagaaatgtccaattttttggcatggcttgggtatctcaattcccttataaatccactgatttacacaatctttaatgaagacttcaagaaagcattccaaaagcttgtgcgatgtcgatgttagttttaaaaatgtttattattgaaggatgggggtttttgaggggaggaataactagatgaatgccaaataataaaacacttaagcttttagagggaaatacatgaaaactgctaaattgataaggctataatttatattttaatagcaatgtgaatataaaagttattgatcaccactattctagggtattcaaaattagaaaataatttatgtaggttataaacaatattttgcctatgcaatgttcctaaaaagctaactggaaaaaatatatatatatacaatagtaatgacagtgattttccatgtttacatcttacaataattatagaggagttttcaattaacaacatacctccctccataatttctatctagtcctactgttttataatataattctattattttgtataagaaaatataattcaccacaaagtacacatttctcctgtctccattcttgtcccttctccatcttaccctgagcaaaagggagggggaaggagcaactcttacttagtgtgactgcagaaaatgtaaaaaagtcagagcttgaaattgtccttgtgtttaggtagcaaagagtaatcataaagtgggttaggtacagcaaaataattcaatactgaacttgtgcatatttaatgtattatgtttgatataaacttctagaataatattatcttatccttatattatcagcatttgaaatcaaagccttaccttagtaacaataactcaacaaaggggcatgggtgacgttgttataattgctctctgtttacttaggaatcaaatttaaagcactaaatatcatagattactcaccacagttatactcttaacatctttttaaaagtataaaatgtatttcatttctgttaataagctcagttattaactaaattgtctgtggtattttgcacttcagtattttccatacctttgatttcaacattatttcccgtttactagacagaatataatggaaatttttagaactttccctttactttaaaatatttctacttttccaattggtagaaatgaacaggaaaaaagactcatattacactaattaataaatgtacacacatatatatttttgtaattagtcactctactagttcagtgagccaaagcaattccataagtttttcttccatatttataaaaggatttgaaaacaatagaaccatgagtttgagaggattttattttatttgaaccagcaaggtcatagactacctttgggaagacctatcatcaaccaagatcgtttgaaaaacaatatatacctttttttaagttgtacatttatgtgcattgtaaatattccttcctgatggtgtggttaagagtacattacatcaattttatgtatatatagatctgtgacaaattactctcaatctaacaaacatttacagagttcccattttatacaaggcattgagacatatactagatagaagatatacgaaataataaaatacagttttttttcctgaatatgtttacagtctaaaaggagaaacaagaaaaaataaaactataatagaaaagagcaaactaaaatctggcatggaagttgtttacacagttatgatggtgcagaggaaaaactgatcgcatcttgtttagaaaaatcagaaatatttcacaaagaatgtatctagaacacatgtcaaatacacagcactggggcaagaaaaatggaagagcacactccaggttgtgacaacatcaggatacaaactgcaccatgcaagtatttggtggggcatgttcataaatagcaatgagtttggcaactatttagagcaatagaggaaaaggatattaaaagaaaaattgggcatttttgtggctgactttgaacgtcagaaaaaagtctacagtcaattttattgctg

SEQ ID NO: 16602 - DNA, 1101 bp, Artificial Sequence
  derived and/or modified sequence
atggacttcctgaacagcagcgaccagaacctgaccagcgaggagctgctgaacagaatgcccagcaagatcctggtgagcctgaccctgagcggcctggccctgatgaccaccaccatcaacagcctggtgatcgccgccatcatcgtgaccagaaagctgcaccaccccgccaactacctgatctgcagcctggccgtgaccgacttcctggtggccgtgctggtgatgcccttcagcatcgtgtacatcgtgagagagagctggatcatgggccaggtggtgtgcgacatctggctgagcgtggacatcacctgctgcacctgcagcatcctgcacctgagcgccatcgccctggacagatacagagccatcaccgacgccgtggagtacgccagaaagagaacccccaagcacgccggcatcatgatcaccatcgtgtggatcatcagcgtgttcatcagcatgccccccctgttctggagacaccagggcaccagcagagacgacgagtgcatcatcaagcacgaccacatcgtgagcaccatctacagcaccttcggcgccttctacatccccctggccctgatcctgatcctgtactacaagatctacagagccgccaagaccctgtaccacaagagacaggccagcagaatcgccaaggaggaggtgaacggccaggtgctgctggagagcggcgagaagagcaccaagagcgtgagcaccagctacgtgctggagaagagcctgagcgaccccagcaccgacttcgacaagatccacagcaccgtgagaagcctgagaagcgagttcaagcacgagaagagctggagaagacagaagatcagcggcaccagagagagaaaggccgccaccaccctgggcctgatcctgggcgccttcgtgatctgctggctgcccttcttcgtgaaggagctggtggtgaacgtgtgcgacaagtgcaagatcagcgaggagatgagcaacttcctggcctggctgggctacctgaacagcctgatcaaccccctgatctacaccatcttcaacgaggacttcaagaaggccttccagaagctggtgagatgcagatgctag

SEQ ID NO: 16603 - protein, 481 aa, Artificial Sequence
  derived and/or modified sequence
MALSYRVSELQSTIPEHILQSTFVHVISSNWSGLQTESIPEEMKQIVEEQGNKLHWAALLILMVIIPTIGGNTLVILAVSLEKKLQYATNYFLMSLAVADLLVGLFVMPIALLTIMFEAMWPLPLVLCPAWLFLDVLFSTASIMHLCAISVDRYIAIKKPIQANQYNSRATAFIKITVVWLISIGIAIPVPIKGIETDVDNPNNITCVLTKERFGDFMLFGSLAAFFTPLAIMIVTYFLTIHALQKKAYLVKNKPPQRLTWLTVSTVFQRDETPCSSPEKVAMLDGSRKDKALPNSGDETLMRRTSTIGKKSVQTISNEQRASKVLGIVFFLFLLMWCPFFITNITLVLCDSCNQTTLQMLLEIFVWIGYVSSGVNPLVYTLFNKTFRDAFGRYITCNYRATKSVKTLRKRSSKIYFRNPMAENSKFFKKHGIRNGINPAMYQSPMRLRSSTIQSSSIILLDTLLLTENEGDKTEEQVSYV

SEQ ID NO: 16604 - protein, 64 aa, Artificial Sequence
  derived and/or modified sequence
MVIIPTIGGNTLVILAVSLEKKLQYATNYFLMSLAVADLLVGLFVMPIALLTIMFGIAIPVPIK

SEQ ID NO: 16605 - DNA, 1446 bp, Artificial Sequence
  derived and/or modified sequence
atggccctgagctaccgcgtttccgagctgcagagtacgattcctgagcatattctacagtctacctttgtgcatgtaattagtagtaactggtctgggctgcagacggagagcatccccgaggaaatgaagcaaatcgtggaggaacagggcaataaactgcattgggcagcacttctgattttgatggttatcatccctaccatcggcgggaacaccctggtgatactggcagtatctctcgaaaaaaagctgcagtatgctacgaattacttccttatgtcgctcgccgttgctgacctccttgttggactgttcgttatgcccattgcattattgaccattatgtttgaagccatgtggcccctgccactggtattgtgccctgcatggctgttcctcgatgtgctgttttctactgcctctattatgcatctctgcgcaatttcagtggatagatacattgcaatcaaaaagcctattcaggcgaaccagtacaattcccgcgccacagcatttatcaaaataactgtcgtatggttaatcagcatcgggatcgcaatccctgtgcctatcaaaggcatcgaaacagatgttgataatcctaataacatcacctgtgttcttaccaaggaacgattcggggacttcatgctgttcgggagtctggctgccttttttacaccactagccataatgatagtgacctatttcctgaccattcacgcgctgcagaaaaaggcctacctggtgaagaataaaccgccacagcggctcacgtggctgaccgtgtctacagtttttcagagggacgaaactccctgtagctcccctgaaaaagtggcgatgttggacggcagcagaaaggacaaggctctgcccaacagcggcgacgaaaccctcatgcggaggacaagcacgattgggaagaaatctgtgcaaaccattagcaatgagcaaagagcgtcaaaagtcttaggcatagtcttctttctgtttttgctgatgtggtgcccgtttttcatcactaacattactctcgtcctgtgcgatagttgcaaccagacgacgctgcagatgctcttggaaatttttgtgtggataggctatgtttcatcaggagtgaatccactcgtgtatacactgtttaacaagaccttccgcgacgcttttgggcgctacattacctgcaattaccgcgcaaccaaaagcgtgaagaccttgcgcaaaaggtcctctaaaatctacttccggaaccccatggcggagaactccaaattttttaagaagcacggcatccggaatggcataaatcccgcaatgtaccagtcacctatgagactccggtctagcacaattcagtcctcctcaatcattttactagacacccttttgctgaccgagaatgagggtgataaaacagaggagcaggtgtcctatgtgtag

SEQ ID NO: 16606 - DNA, 1446 bp, Artificial Sequence
  derived and/or modified sequence
atggccctgagctacagagtgtctgagctgcagagcaccatccctgagcacatcctgcagagcacctttgtgcacgtgatcagcagcaactggagcggcctgcagacagagagcatccctgaggagatgaagcagatcgtggaggagcagggcaacaagctgcactgggccgccctgctgatcctgatggtgatcatccccaccatcggcggcaacaccctggtgatcctggccgtgtccctggagaagaagctgcagtatgccaccaactacttcctgatgagcctggccgtggccgacctgctggtgggcctgtttgtgatgcccatcgccctgctgaccatcatgtttgaggccatgtggcccctgcccctggtgctgtgcccagcctggctgttcctggatgtgctcttcagcacagccagcatcatgcacctgtgtgccatctctgtggaccgctacatcgccatcaagaagcccatccaggccaaccagtacaacagccgggccacagccttcatcaagatcaccgtggtgtggctgatcagcatcggcatcgccatccctgtgcccatcaagggcattgaaacagatgtggacaaccccaacaacatcacctgtgtgctgaccaaggagagatttggagacttcatgctgtttggcagcctggccgccttcttcacccccctggccatcatgattgtgacctacttcctgaccatccacgccctgcagaagaaggcctacctggtgaagaacaagccaccccagaggctgacctggctgactgtgtccaccgtcttccagagagatgagaccccctgcagcagccctgagaaggtggccatgctggatggcagcaggaaggacaaggccctgcccaacagcggagatgagaccctgatgaggaggaccagcaccatcggcaagaagtctgtgcagaccatcagcaatgagcagagggccagcaaggtgctgggcatcgtgttcttcctgttcctgctgatgtggtgccccttcttcatcaccaacatcaccctggtgctgtgtgacagctgcaaccagaccaccctgcagatgctgctggagatctttgtgtggattggctacgtgtcctctggagtgaaccccctggtgtacaccctcttcaacaagaccttcagagatgccttcggccgctacatcacctgcaactaccgggccaccaagtctgtgaagaccctgaggaagaggagcagcaagatctacttcaggaaccccatggccgagaacagcaagttcttcaagaagcacggcatcagaaatggcatcaacccagccatgtaccagagccccatgaggctgcggagcagcaccatccagagcagcagcatcatcctgctggacaccctgctgctgacagaaaatgaaggagacaagacagaggagcaggtgtcctatgtgtag

SEQ ID NO: 16607 - DNA, 1446 bp, Artificial Sequence
  derived and/or modified sequence
atggccctgagctaccgggtgagcgagctgcagagcaccatccccgagcacatcctgcagtctacattcgtccacgtaatttcctccaactggagcgggctgcagaccgagagtattcccgaggagatgaaacagatcgttgaggagcaggggaataagcttcattgggcagccctattgattctaatggttatcattccaaccatcgggggtaacacactcgtcatcttggccgtcagtttagagaaaaaattgcagtatgccacgaactatttcttgatgtctttggccgttgccgatctcctcgtgggcctgttcgttatgccaatcgcacttcttaccattatgtttgaagccatgtggccattgcccctggtcctctgcccggcctggctgttcctggatgtgctcttctcaactgcttccatcatgcacctgtgcgcaataagcgtggatcggtatattgccatcaagaagcccattcaggccaatcagtataatagccgggctaccgcattcattaagattacagttgtttggttaatctccattggaattgctattcccgtgcccattaaggggattgaaaccgacgtcgacaacccaaacaatatcacgtgcgtgttgaccaaagagcgatttggggacttcatgttgtttgggagcctggccgccttcttcacaccacttgctataatgatagtcacttatttcctcaccatacacgctcttcagaagaaggcatacctggtgaagaacaaaccaccacagagattgacctggcttaccgtgtcaactgtttttcagagagacgagacaccatgcagttcccctgagaaggtcgctatgttggatggatcacggaaagataaggccctgcctaatagcggcgacgaaaccctgatgaggcggaccagcacaattgggaagaagtccgtccagacaattagtaacgaacaacgggcctctaaggtgctggggatcgtcttcttcttatttctattgatgtggtgcccattctttatcactaacattactctggtgctctgtgactcctgcaaccagactacgcttcagatgctgctggaaatttttgtgtggataggttatgtctcctccggtgtcaatccgctggtctataccctgttcaataagacattcagggacgccttcgggcggtatattacctgtaactatagggcaacaaaatcggtaaagaccctgcgaaagcgatccagtaagatatatttcaggaatccaatggcggagaattccaagttttttaagaaacacgggattagaaatggcataaatccagccatgtatcagagccccatgcggctgcgcagcagcaccatacaatctagctccatcattttgctggacacactgctacttaccgaaaatgagggcgataaaactgaggaacaagtcagctacgtatag

SEQ ID NO: 16608 - DNA, 1446 bp, Artificial Sequence
  derived and/or modified sequence
atggccctcagttatagagtgtcggaattacagagcacaattcccgaacatattctgcaatccactttcgtccacgtaatcagcagtaattggagcggactacaaacagaaagcatcccagaggagatgaaacagattgtcgaggagcaaggaaacaaactgcactgggccgcactgctgattctgatggtaatcatccccacaatcggcggtaacacattagtgattctagctgtgtccttagagaagaaactccaatacgcaaccaattatttcctaatgtccctcgccgttgcggatttgctggttggactattcgtaatgccaattgctctgctgacaatcatgttcgaggccatgtggcccctgccgctggtgttgtgcccagcatggttgttcttagatgttttattcagcactgccagcataatgcacctttgtgccatcagcgtggaccgctacatcgcgattaagaagccaatccaggccaatcaatataacagccgggctacagcgtttattaagattaccgtggtgtggctcatatctattggaatcgccatccccgtgccaatcaagggcatagagacagatgtcgataatcccaataatatcacctgtgttttgacgaaggaaagattcggcgacttcatgctgttcggatctctggcggctttttttacccctctggcgatcatgatcgtgacctattttctcacaatccacgccctgcagaagaaggcctatcttgtgaagaataagccccctcaacgtcttacatggctgaccgtttccacggtgttccagagggatgagactccatgcagcagcccggaaaaggtggccatgctggacggctccagaaaggacaaagcgctgcccaattctggggacgaaactcttatgagaagaacttctacgataggcaagaaatccgttcagacaatctccaatgagcagcgggcttccaaagttttggggatcgtgttcttcctctttctgctgatgtggtgccctttctttatcaccaacatcacactggtactctgcgattcatgtaaccaaaccacattacagatgctgctggagattttcgtttggattggatacgtgagctcaggcgttaacccgctggtctatactcttttcaataaaacctttcgggacgcatttggcaggtacataacttgcaactatcgggcaactaagagcgttaaaactctcagaaagcgttcttctaaaatctactttcgcaatcccatggcagagaacagcaaattcttcaagaaacatgggatccgcaatggcatcaatccggcaatgtaccagagtcccatgaggctgcgctctagtacgattcagtccagtagcataatcctgctcgatacactgttgctcacggagaacgagggtgataagactgaagaacaagtgtcctatgtgtag

SEQ ID NO: 16609 - DNA, 2246 bp, Artificial Sequence
  derived and/or modified sequence
tatacaacgtatttgtttcactgctttcaaccgcctgtgctggaggctcagaataagtcaatgggaggaggatttcagtcacagcagcaagcaagtctagtgaacagataagatgacatgctcagcaaaataacaacgaaaccagagggggaactctctggcatgcaagttcaaacacgactctacaactacggcagaaaaagagagagagagaaactaaaaatatatatatatcctatttttttcacagctatcagtttctttcactgagctttcctaaatttaagcctctagaaaataataaatacttggatatcttacctacaaacatggacagatgtgtgtatgcgctcattttagagaacttgaatttttttttttaaaggaaggtgtcaactttggcttttgagtgtttggcatggttacaatgccttaaaaaaacagatgagcagcttagctactaaccatgctgaccactgttcggaacgggattgaatcacagaaaaacagcaaatggctctctcttacagagtgtctgaacttcaaagcacaattcctgagcacattttgcagagcacctttgttcacgttatctcttctaactggtctggattacagacagaatcaataccagaggaaatgaaacagattgttgaggaacagggaaataaactgcactgggcagctcttctgatactcatggtgataatacccacaattggtggaaatacccttgttattctggctgtttcactggagaagaagctgcagtatgctactaattactttctaatgtccttggcggtggctgatttgctggttggattgtttgtgatgccaattgccctcttgacaataatgtttgaggctatgtggcccctcccacttgttctatgtcctgcctggttatttcttgacgttctcttttcaaccgcatccatcatgcatctctgtgccatttcagtggatcgttacatagccatcaaaaagccaatccaggccaatcaatataactcacgggctacagcattcatcaagattacagtggtgtggttaatttcaataggcattgccattccagtccctattaaagggatagagactgatgtggacaacccaaacaatatcacttgtgtgctgacaaaggaacgttttggcgatttcatgctctttggctcactggctgccttcttcacacctcttgcaattatgattgtcacctactttctcactatccatgctttacagaagaaggcttacttagtcaaaaacaagccacctcaacgcctaacatggttgactgtgtctacagttttccaaagggatgaaacaccttgctcgtcaccggaaaaggtggcaatgctggatggttctcgaaaggacaaggctctgcccaactcaggtgatgaaacacttatgcgaagaacatccacaattgggaaaaagtcagtgcagaccatttccaacgaacagagagcctcaaaggtcctagggattgtgtttttcctctttttgcttatgtggtgtcccttctttattacaaatataactttagttttatgtgattcctgtaaccaaactactctccaaatgctcctggagatatttgtgtggataggctatgtttcctcaggagtgaatcctttggtctacaccctcttcaataagacatttcgggatgcatttggccgatatatcacctgcaattaccgggccacaaagtcagtaaaaactctcagaaaacgctccagtaagatctacttccggaatccaatggcagagaactctaagtttttcaagaaacatggaattcgaaatgggattaaccctgccatgtaccagagtccaatgaggctccgaagttcaaccattcagtcttcatcaatcattctactagatacgcttctcctcactgaaaatgaaggtgacaaaactgaagagcaagttagttatgtatagcagaactggcagttgtcatcaaacataatgatgagtaagatgatgaatgagatgtaaatgtgccaagaatatattatataaagaattttatgtcatatatcaaatcatctctttaacctaagatgtaagtattaagaatatctaattttcctaatttggacaagattattccatgaggaaaataattttatatagctacaaatgaaaacaatccagcactctggttaaattttaaggtattcgaatgaaataaagtcaaatcaataaatttcaggctttaaaaagaa

SEQ ID NO: 16610 - DNA, 1446 bp, Artificial Sequence
  derived and/or modified sequence
atggccctgagctacagagtgagcgagctgcagagcaccatccccgagcacatcctgcagagcaccttcgtgcacgtgatcagcagcaactggagcggcctgcagaccgagagcatccccgaggagatgaagcagatcgtggaggagcagggcaacaagctgcactgggccgccctgctgatcctgatggtgatcatccccaccatcggcggcaacaccctggtgatcctggccgtgagcctggagaagaagctgcagtacgccaccaactacttcctgatgagcctggccgtggccgacctgctggtgggcctgttcgtgatgcccatcgccctgctgaccatcatgttcgaggccatgtggcccctgcccctggtgctgtgccccgcctggctgttcctggacgtgctgttcagcaccgccagcatcatgcacctgtgcgccatcagcgtggacagatacatcgccatcaagaagcccatccaggccaaccagtacaacagcagagccaccgccttcatcaagatcaccgtggtgtggctgatcagcatcggcatcgccatccccgtgcccatcaagggcatcgagaccgacgtggacaaccccaacaacatcacctgcgtgctgaccaaggagagattcggcgacttcatgctgttcggcagcctggccgccttcttcacccccctggccatcatgatcgtgacctacttcctgaccatccacgccctgcagaagaaggcctacctggtgaagaacaagcccccccagagactgacctggctgaccgtgagcaccgtgttccagagagacgagaccccctgcagcagccccgagaaggtggccatgctggacggcagcagaaaggacaaggccctgcccaacagcggcgacgagaccctgatgagaagaaccagcaccatcggcaagaagagcgtgcagaccatcagcaacgagcagagagccagcaaggtgctgggcatcgtgttcttcctgttcctgctgatgtggtgccccttcttcatcaccaacatcaccctggtgctgtgcgacagctgcaaccagaccaccctgcagatgctgctggagatcttcgtgtggatcggctacgtgagcagcggcgtgaaccccctggtgtacaccctgttcaacaagaccttcagagacgccttcggcagatacatcacctgcaactacagagccaccaagagcgtgaagaccctgagaaagagaagcagcaagatctacttcagaaaccccatggccgagaacagcaagttcttcaagaagcacggcatcagaaacggcatcaaccccgccatgtaccagagccccatgagactgagaagcagcaccatccagagcagcagcatcatcctgctggacaccctgctgctgaccgagaacgagggcgacaagaccgaggagcaggtgagctacgtgtag

SEQ ID NO: 16611 - protein, 484 aa, Artificial Sequence
  derived and/or modified sequence
MLGKLAMLLWVQQALLALLLPTLLAQGEARRSRNTTRPALLRLSDYLLTNYRKGVRPVRDWRKPTTVSIDVIVYAILNVDEKNQVLTTYIWYRQYWTDEFLQWNPEDFDNITKLSIPTDSIWVPDILINEFVDVGKSPNIPYVYIRHQGEVQNYKPLQVVTACSLDIYNFPFDVQNCSLTFTSWLHTIQDINISLWRLPEKVKSDRSVFMNQGEWELLGVLPYFREFSMESSNYYAEMKFYVVIRRRPLFYVVSLLLPSIFLMVMDIVGFYLPPNSGERVSFKITLLLGYSVFLIIVSDTLPATAIGTPLIGVYFVVCMALLVISLAETIFIVRLVHKQDLQQPVPAWLRHLVLERIAWLLCLREQSTSQRPPATSQATKTDDCSAMGNHCSHMGGPQDFEKSPRDRCSPPPPPREASLAVCGLLQELSSIRQFLEKRDEIREVARDWLRVGSVLDKLLFHIYLLAVLAYSITLVMLWSIWQYA

SEQ ID NO: 16612 - protein, 478 aa, Artificial Sequence
  derived and/or modified sequence
MLLWVQQALLALLLPTLLAQGEARRSRNTTRPALLRLSDYLLTNYRKGVRPVRDWRKPTTVSIDVIVYAILNVDEKNQVLTTYIWYRQYWTDEFLQWNPEDFDNITKLSIPTDSIWVPDILINEFVDVGKSPNIPYVYIRHQGEVQNYKPLQVVTACSLDIYNFPFDVQNCSLTFTSWLHTIQDINISLWRLPEKVKSDRSVFMNQGEWELLGVLPYFREFSMESSNYYAEMKFYVVIRRRPLFYVVSLLLPSIFLMVMDIVGFYLPPNSGERVSFKITLLLGYSVFLIIVSDTLPATAIGTPLIGVYFVVCMALLVISLAETIFIVRLVHKQDLQQPVPAWLRHLVLERIAWLLCLREQSTSQRPPATSQATKTDDCSAMGNHCSHMGGPQDFEKSPRDRCSPPPPPREASLAVCGLLQELSSIRQFLEKRDEIREVARDWLRVGSVLDKLLFHIYLLAVLAYSITLVMLWSIWQYA

SEQ ID NO: 16613 - protein, 222 aa, Artificial Sequence
  derived and/or modified sequence
MVMDIVGFYLPPNSGERVSFKITLLLGYSVFLIIVSDTLPATAIGTPLIGVYFVVCMALLVISLAETIFIVRLVHKQDLQQPVPAWLRHLVLERIAWLLCLREQSTSQRPPATSQATKTDDCSAMGNHCSHMGGPQDFEKSPRDRCSPPPPPREASLAVCGLLQELSSIRQFLEKRDEIREVARDWLRVGSVLDKLLFHIYLLAVLAYSITLVMLWSIWQYA

SEQ ID NO: 16614 - DNA, 1455 bp, Artificial Sequence
  derived and/or modified sequence
atgctgggcaagctggccatgctgctgtgggtgcagcaggccctgctggccctgctgctgcccaccctgctggcccagggcgaggccagaagaagcagaaacaccaccagacccgccctgctgagactgagcgactacctgctgaccaactacagaaagggcgtgagacccgtgagagactggagaaagcccaccaccgtgagcatcgacgtgatcgtgtacgccatcctgaacgtggacgagaagaaccaggtgctgaccacctacatctggtacagacagtactggaccgacgagttcctgcagtggaaccccgaggacttcgacaacatcaccaagctgagcatccccaccgacagcatctgggtgcccgacatcctgatcaacgagttcgtggacgtgggcaagagccccaacatcccctacgtgtacatcagacaccagggcgaggtgcagaactacaagcccctgcaggtggtgaccgcctgcagcctggacatctacaacttccccttcgacgtgcagaactgcagcctgaccttcaccagctggctgcacaccatccaggacatcaacatcagcctgtggagactgcccgagaaggtgaagagcgacagaagcgtgttcatgaaccagggcgagtgggagctgctgggcgtgctgccctacttcagagagttcagcatggagagcagcaactactacgccgagatgaagttctacgtggtgatcagaagaagacccctgttctacgtggtgagcctgctgctgcccagcatcttcctgatggtgatggacatcgtgggcttctacctgccccccaacagcggcgagagagtgagcttcaagatcaccctgctgctgggctacagcgtgttcctgatcatcgtgagcgacaccctgcccgccaccgccatcggcacccccctgatcggcgtgtacttcgtggtgtgcatggccctgctggtgatcagcctggccgagaccatcttcatcgtgagactggtgcacaagcaggacctgcagcagcccgtgcccgcctggctgagacacctggtgctggagagaatcgcctggctgctgtgcctgagagagcagagcaccagccagagaccccccgccaccagccaggccaccaagaccgacgactgcagcgccatgggcaaccactgcagccacatgggcggcccccaggacttcgagaagagccccagagacagatgcagccccccccccccccccagagaggccagcctggccgtgtgcggcctgctgcaggagctgagcagcatcagacagttcctggagaagagagacgagatcagagaggtggccagagactggctgagagtgggcagcgtgctggacaagctgctgttccacatctacctgctggccgtgctggcctacagcatcaccctggtgatgctgtggagcatctggcagtacgcctag

SEQ ID NO: 16615 - DNA, 1437 bp, Artificial Sequence
  derived and/or modified sequence
atgctgctgtgggtgcagcaggccctgctggccctgctgctgcccaccctgctggcccagggcgaggccagaagaagcagaaacaccaccagacccgccctgctgagactgagcgactacctgctgaccaactacagaaagggcgtgagacccgtgagagactggagaaagcccaccaccgtgagcatcgacgtgatcgtgtacgccatcctgaacgtggacgagaagaaccaggtgctgaccacctacatctggtacagacagtactggaccgacgagttcctgcagtggaaccccgaggacttcgacaacatcaccaagctgagcatccccaccgacagcatctgggtgcccgacatcctgatcaacgagttcgtggacgtgggcaagagccccaacatcccctacgtgtacatcagacaccagggcgaggtgcagaactacaagcccctgcaggtggtgaccgcctgcagcctggacatctacaacttccccttcgacgtgcagaactgcagcctgaccttcaccagctggctgcacaccatccaggacatcaacatcagcctgtggagactgcccgagaaggtgaagagcgacagaagcgtgttcatgaaccagggcgagtgggagctgctgggcgtgctgccctacttcagagagttcagcatggagagcagcaactactacgccgagatgaagttctacgtggtgatcagaagaagacccctgttctacgtggtgagcctgctgctgcccagcatcttcctgatggtgatggacatcgtgggcttctacctgccccccaacagcggcgagagagtgagcttcaagatcaccctgctgctgggctacagcgtgttcctgatcatcgtgagcgacaccctgcccgccaccgccatcggcacccccctgatcggcgtgtacttcgtggtgtgcatggccctgctggtgatcagcctggccgagaccatcttcatcgtgagactggtgcacaagcaggacctgcagcagcccgtgcccgcctggctgagacacctggtgctggagagaatcgcctggctgctgtgcctgagagagcagagcaccagccagagaccccccgccaccagccaggccaccaagaccgacgactgcagcgccatgggcaaccactgcagccacatgggcggcccccaggacttcgagaagagccccagagacagatgcagccccccccccccccccagagaggccagcctggccgtgtgcggcctgctgcaggagctgagcagcatcagacagttcctggagaagagagacgagatcagagaggtggccagagactggctgagagtgggcagcgtgctggacaagctgctgttccacatctacctgctggccgtgctggcctacagcatcaccctggtgatgctgtggagcatctggcagtacgcctag

SEQ ID NO: 16616 - DNA, 717 bp, Artificial Sequence
  derived and/or modified sequence
atgctgctgtgggtgcagcaggccctgctggccctgctgctgcccaccctgctggcccagggcgaggccagaagaagcagaaacaccaccagacccgccctgctgagactgagcgactacctgctgaccaactacagaaagggcgtgagacccgtgagagactggagaaagcccaccaccgtgagcatcgacgtgatcgtgtacgccatcctgaacgtggacgagaagaaccaggtgctgaccacctacatctggtacagacagtactggaccgacgagttcctgcagtggaaccccgaggacttcgacaacatcaccaagctgagcatccccaccgacagcatctgggtgcccgacatcctgatcaacgagttcgtggacgtgggcaagagccccaacatcccctacgtgtacatcagacaccagggcgaggtgcagaactacaagcccctgcaggtggtgaccgcctgcagcctggacatctacaacttccccttcgacgtgcagaactgcagcctgaccttcaccagctggctgcacaccagcggccacccccccgccgcccccctgctgtgcggccagcccgccaccgcccagcacctgccccacggccacggccacagaggcctgctgcccgccccccagcagtggagagagggcctgttccaggactacaccccccccggcctgctgggcctgcccgaccacagattctag

SEQ ID NO: 16617 - DNA, 2235 bp, Artificial Sequence
  derived and/or modified sequence
ctctcagctgtcccctcccctttcctcccgcctgaaacatgatccagctgaaggactgattgcaggaaaacttggcagctccccaaccttggtggcccagggagtgtgaggctgcagcctcagaaggtgtgagcagtggccacgagaggcaggctggctgggacatgaggttggcagagggcaggcaagctggcccttggtgggcctcgtcctgagcactcggaggcactcctatgcttggaaagctcgctatgctgctgtgggtccagcaggcgctgctcgccttgctcctccccacactcctggcacagggagaagccaggaggagccgaaacaccaccaggcccgctctgctgaggctgtcggattaccttttgaccaactacaggaagggtgtgcgccccgtgagggactggaggaagccaaccaccgtatccattgacgtcattgtctatgccatcctcaacgtggatgagaagaatcaggtgctgaccacctacatctggtaccggcagtactggactgatgagtttctccagtggaaccctgaggactttgacaacatcaccaagttgtccatccccacggacagcatctgggtcccggacattctcatcaatgagttcgtggatgtggggaagtctccaaatatcccgtacgtgtatattcggcatcaaggcgaagttcagaactacaagccccttcaggtggtgactgcctgtagcctcgacatctacaacttccccttcgatgtccagaactgctcgctgaccttcaccagttggctgcacaccatccaggacatcaacatctctttgtggcgcttgccagaaaaggtgaaatccgacaggagtgtcttcatgaaccagggagagtgggagttgctgggggtgctgccctactttcgggagttcagcatggaaagcagtaactactatgcagaaatgaagttctatgtggtcatccgccggcggcccctcttctatgtggtcagcctgctactgcccagcatcttcctcatggtcatggacatcgtgggcttctacctgccccccaacagtggcgagagggtctctttcaagattacactcctcctgggctactcggtcttcctgatcatcgtttctgacacgctgccggccactgccatcggcactcctctcattggtgtctactttgtggtgtgcatggctctgctggtgataagtttggccgagaccatcttcattgtgcggctggtgcacaagcaagacctgcagcagcccgtgcctgcttggctgcgtcacctggttctggagagaatcgcctggctactttgcctgagggagcagtcaacttcccagaggcccccagccacctcccaagccaccaagactgatgactgctcagccatgggaaaccactgcagccacatgggaggaccccaggacttcgagaagagcccgagggacagatgtagccctcccccaccacctcgggaggcctcgctggcggtgtgtgggctgctgcaggagctgtcctccatccggcaattcctggaaaagcgggatgagatccgagaggtggcccgagactggctgcgcgtgggctccgtgctggacaagctgctattccacatttacctgctagcggtgctggcctacagcatcaccctggttatgctctggtccatctggcagtacgcttgagtgggtacagcccagtggaggagggggtacagtcctggttaggtggggacagaggatttctgcttaggcccctcaggacccagggaatgccagggacattttcaagacacagacaaagtcccgtgccctgtttccaatgccaattcatctcagcaatcacaagccaaggtctgaacccttccaccaaaaactgggtgttcaaggcccttacacccttgtcccacccccagcagctcaccatggctttaaaacatgctgtcttagatcaggagaaactcgggcactccctaagtccactctagttgtggacttttccccattgaccctcacctgaataagggactttggaattctgcttctctttcacaactttgcttttaggttgaaggcaaaaccaactctctactacacaggcctgataactctgtacgaggcttctctaacccctagtgtcttttttttcttcacctcacttgtggcagcttccctgaacactcatcccccatcagatgatgggagtgggaagaataaaatgcagtgaaaccct

SEQ ID NO: 16618 - DNA, 2432 bp, Artificial Sequence
  derived and/or modified sequence
acatacttgccaagggacatcaatgaaagcagcagcgtggtgcacctcccaggggtcaggctgcacccttgtctcatgggcttctgcagcccctgtccccacctaagttactccttggggaaacatggccaagccccctggctgaatgggtggactgagctcccacagcatgacatcagctagggcgggctcccctctcagctgtcccctcccctttcctcccgcctgaaacatgatccagctgaaggactgattgcaggaaaacttggcagctccccaaccttggtggcccagggagtgtgaggctgcagcctcagaaggtgtgagcagtggccacgagaggcaggctggctgggacatgaggttggcagagggcaggcaagctggcccttggtgggcctcgtcctgagcactcggaggcactcctatgcttggaaagctcgctatgctgctgtgggtccagcaggcgctgctcgccttgctcctccccacactcctggcacagggagaagccaggaggagccgaaacaccaccaggcccgctctgctgaggctgtcggattaccttttgaccaactacaggaagggtgtgcgccccgtgagggactggaggaagccaaccaccgtatccattgacgtcattgtctatgccatcctcaacgtggatgagaagaatcaggtgctgaccacctacatctggtaccggcagtactggactgatgagtttctccagtggaaccctgaggactttgacaacatcaccaagttgtccatccccacggacagcatctgggtcccggacattctcatcaatgagttcgtggatgtggggaagtctccaaatatcccgtacgtgtatattcggcatcaaggcgaagttcagaactacaagccccttcaggtggtgactgcctgtagcctcgacatctacaacttccccttcgatgtccagaactgctcgctgaccttcaccagttggctgcacaccatccaggacatcaacatctctttgtggcgcttgccagaaaaggtgaaatccgacaggagtgtcttcatgaaccagggagagtgggagttgctgggggtgctgccctactttcgggagttcagcatggaaagcagtaactactatgcagaaatgaagttctatgtggtcatccgccggcggcccctcttctatgtggtcagcctgctactgcccagcatcttcctcatggtcatggacatcgtgggcttctacctgccccccaacagtggcgagagggtctctttcaagattacactcctcctgggctactcggtcttcctgatcatcgtttctgacacgctgccggccactgccatcggcactcctctcattggtgtctactttgtggtgtgcatggctctgctggtgataagtttggccgagaccatcttcattgtgcggctggtgcacaagcaagacctgcagcagcccgtgcctgcttggctgcgtcacctggttctggagagaatcgcctggctactttgcctgagggagcagtcaacttcccagaggcccccagccacctcccaagccaccaagactgatgactgctcagccatgggaaaccactgcagccacatgggaggaccccaggacttcgagaagagcccgagggacagatgtagccctcccccaccacctcgggaggcctcgctggcggtgtgtgggctgctgcaggagctgtcctccatccggcaattcctggaaaagcgggatgagatccgagaggtggcccgagactggctgcgcgtgggctccgtgctggacaagctgctattccacatttacctgctagcggtgctggcctacagcatcaccctggttatgctctggtccatctggcagtacgcttgagtgggtacagcccagtggaggagggggtacagtcctggttaggtggggacagaggatttctgcttaggcccctcaggacccagggaatgccagggacattttcaagacacagacaaagtcccgtgccctgtttccaatgccaattcatctcagcaatcacaagccaaggtctgaacccttccaccaaaaactgggtgttcaaggcccttacacccttgtcccacccccagcagctcaccatggctttaaaacatgctgtcttagatcaggagaaactcgggcactccctaagtccactctagttgtggacttttccccattgaccctcacctgaataagggactttggaattctgcttctctttcacaactttgcttttaggttgaaggcaaaaccaactctctactacacaggcctgataactctgtacgaggcttctctaacccctagtgtcttttttttcttcacctcacttgtggcagcttccctgaacactcatcccccatcagatgatgggagtgggaagaataaaatgcagtgaaaccctaaa

SEQ ID NO: 16619 - DNA, 1455 bp, Artificial Sequence
  derived and/or modified sequence
atgctgggcaagctggcaatgctcctctgggttcagcaggccctgctggccctgcttctccctacactactggcgcagggagaggccagacgttcacggaatacaacgcgacccgcactgttaaggctgtctgactacctgctgacaaattacagaaaaggggtccgcccggttagagattggcgaaagcccaccaccgtaagcatagatgtgatcgtgtatgccatcctgaacgtggacgaaaagaaccaggtgcttaccacctatatctggtacaggcagtactggacagatgagttcctgcagtggaatcctgaagattttgacaacattactaagctctcaatccctacagactccatctgggtcccggacatacttatcaacgagtttgtggacgttggtaagagccctaacatcccatatgtgtacatcagacatcagggggaggtgcagaattacaagcccttacaggttgttaccgcgtgcagtctcgatatttataatttcccctttgacgtccagaattgctctttgacctttaccagttggctgcacaccatacaggacataaacattagtttatggcgcctcccggaaaaggtcaagagcgacaggtccgtattcatgaaccagggcgaatgggagctactgggagtgctgccttactttcgggagttctctatggaatcctctaactactacgcagagatgaaattttacgtggtaattcgccggcgcccccttttttatgtcgtgtctttgcttttgccttccatattccttatggtaatggacattgtggggttttacctgcctccgaactctggggagcgcgtaagctttaagatcaccctgctgcttggctacagtgtgttcctcattatcgtatctgacacactgcccgccactgcaatagggactcctctcataggcgtgtactttgttgtttgtatggcattgctggtgatcagtcttgcggaaacaatcttcattgttaggcttgtacacaagcaggacctgcaacagcctgtcccagcctggctgcggcacctggtgctggagcggatagcttggctgctatgcctccgcgagcaaagcacctctcaaaggccacctgcgactagccaggcgaccaaaactgatgactgtagcgcaatgggaaatcactgttcccacatgggcggaccccaggactttgagaaatctccccgcgacaggtgctcccctcctccaccacccagagaagcaagccttgctgtttgcggactattacaggaactgagctccatccgtcagttcttagaaaagagggacgagattagggaagtggcacgagactggttacgtgtggggtctgtcctggacaagttattgttccacatctatctgctggcagtgttggcttactcaataacgctggtgatgctctggagtatctggcagtatgcctag

SEQ ID NO: 16620 - DNA, 1437 bp, Artificial Sequence
  derived and/or modified sequence
atgcttctgtgggtgcagcaggctctgcttgccctacttttgcccacactcttggcccagggagaagcccgacgctccaggaacactactaggcctgccttactgcgcctgtccgattacttgttgaccaactataggaagggagtgcgaccagtcagggactggcgcaaaccaaccaccgtcagcatcgacgttattgtgtacgcgatactgaatgtggacgaaaaaaaccaagttctcactacatatatttggtacagacagtactggacagatgagtttctgcagtggaaccctgaggattttgacaacatcacaaaactctcaatcccaaccgattcaatttgggtgccggatatcctgataaatgagttcgtggatgtcgggaaatcgccaaatatcccgtatgtgtacattcgacatcagggcgaagtgcagaattacaaacccttgcaggtggtcacagcttgcagcctggatatatacaacttcccctttgacgtgcagaattgctccctgaccttcacctcatggctgcacacgatccaggacataaatatctccctgtggaggcttcctgagaaggtgaagtctgacaggtctgtgtttatgaaccagggggaatgggagttactcggggtactgccttacttcagggagttcagtatggaatcatctaactactacgccgagatgaagttttacgtggtcatccgtagacgacccctgttctacgttgtttccctgctgttgccctctatattcttgatggtgatggatattgttgggttctacctcccccctaattcgggtgaaagagtctccttcaagatcacattgttgctgggatatagcgtctttttaatcattgtctccgatacactgcccgctactgctatcggtaccccactcatcggcgtctatttcgtcgtgtgtatggctttgctcgtaatctcactggccgagacgatattcatcgtgcgacttgtgcacaagcaggatttacagcagcccgttcctgcctggcttcgccatctcgtgttggaacgaattgcgtggttgctgtgtcttcgggaacagagtacttcgcaacgacccccagctactagccaggccacgaaaaccgacgactgcagtgccatgggaaatcactgctcccacatgggagggcctcaggatttcgagaagagcccccgagaccgctgcagcccaccaccccccccaagggaggcttcactggcagtgtgcggcctgttacaggagctcagtagtatccgccaattcctggagaagcgggatgagatccgcgaagtagcacgcgattggctgcgcgtaggctctgtcttggacaagctcctgtttcacatctacctgctggcagtgctcgcctattctatcaccttggtaatgctttggtcaatctggcagtacgcttag

SEQ ID NO: 16621 - DNA, 717 bp, Artificial Sequence
  derived and/or modified sequence
atgctactgtgggtgcagcaggctttgcttgcactgctgcttcctacccttcttgcccaaggtgaggccaggcgcagccggaacaccacgcgcccagcactgctacgtctgtctgactatttgctcactaattatcggaagggcgtcaggcctgtccgggactggcgcaagcccacaaccgtgagtattgatgtcatagtttatgcaattttgaatgtggacgaaaagaaccaggtgctgacgacatacatctggtaccggcaatattggacagacgagttcctgcagtggaacccagaggactttgacaacatcacaaaactctctatccccaccgactcaatttgggttccagatattctgattaacgagtttgttgacgtcggcaaatcgccaaatatcccctatgtatatataagacatcagggggaggtccagaactacaagccactgcaggtggtgacagcctgctctctggacatttataatttcccattcgacgttcaaaactgttccctgacattcacctcatggctgcacacatccggacatccccccgccgctccacttctttgcggccagcctgcaacggcccagcacctcccccacggccatggtcacagaggactgctaccagcgccacagcaatggcgtgaggggttgttccaggactataccccccctggacttttgggcctgccagatcataggttctag

SEQ ID NO: 16622 - DNA, 1455 bp, Artificial Sequence
  derived and/or modified sequence
atgctgggcaagctggccatgctgctgtgggtgcagcaggccctgctggccctgctgctgcccaccctgctggcccagggcgaggcccggcgcagcaggaacaccaccaggcctgccctgctgcggctgagtgactacctgctgaccaactacagaaaaggagtgcggcctgtgcgggactggaggaagcccaccaccgtgtccattgatgtgattgtgtatgccatcctgaatgtggatgagaagaaccaggtgctgaccacctacatctggtaccggcagtactggacagatgagttcctgcagtggaaccctgaggactttgacaacatcaccaagctgagcatccccacagacagcatctgggtgcctgacatcctgatcaatgaatttgtggatgtgggcaagagccccaacatcccctacgtgtacatccgccaccagggcgaggtgcagaactacaagcccctgcaggtggtgacagcctgcagcctggacatctacaacttcccctttgatgtgcagaactgcagcctgaccttcacctcctggctgcacaccatccaggacatcaacatcagcctgtggaggctgcctgagaaggtgaagagtgacagatctgtgttcatgaaccagggcgagtgggagctgctgggcgtgctgccctacttccgggagttctccatggagagcagcaactactatgcagagatgaagttctacgtggtgatcagaagaagacccctcttctacgtggtgtccctgctgctgcccagcatcttcctgatggtgatggacatcgtgggcttctacctgccccccaacagcggggagcgggtgtccttcaagatcaccctgctgctgggctacagcgtcttcctgatcatcgtgtctgacaccctgcctgccacagccatcggcacccccctgattggagtgtactttgtggtgtgcatggccctgctggtgatcagcctggccgagaccatcttcatcgtgcggctggtgcacaagcaggacctgcagcagcctgtgcctgcctggctgcggcacctggtgctggagagaattgcctggctgctgtgcctgcgggagcagagcaccagccagaggcccccagccaccagccaggccaccaagacagatgactgcagcgccatgggcaaccactgcagccacatgggcggcccccaggactttgagaagagcccccgggaccgctgcagccccccacctccaccccgggaggccagcctggccgtgtgtggcctgctgcaggagctgagcagcatccggcagttcctggagaagagagatgagatccgggaggtggcccgggactggctgcgggtgggctctgtgctggacaagctgctcttccacatctacctgctggccgtgctggcctacagcatcaccctggtgatgctgtggagcatctggcagtatgcctag

SEQ ID NO: 16623 - DNA, 1437 bp, Artificial Sequence
  derived and/or modified sequence
atgctgctgtgggtgcagcaggccctgctggccctgctgctgcccaccctgctggcccagggcgaggcccggcgcagcaggaacaccaccaggcctgccctgctgcggctgagtgactacctgctgaccaactacagaaaaggagtgcggcctgtgcgggactggaggaagcccaccaccgtgtccattgatgtgattgtgtatgccatcctgaatgtggatgagaagaaccaggtgctgaccacctacatctggtaccggcagtactggacagatgagttcctgcagtggaaccctgaggactttgacaacatcaccaagctgagcatccccacagacagcatctgggtgcctgacatcctgatcaatgaatttgtggatgtgggcaagagccccaacatcccctacgtgtacatccgccaccagggcgaggtgcagaactacaagcccctgcaggtggtgacagcctgcagcctggacatctacaacttcccctttgatgtgcagaactgcagcctgaccttcacctcctggctgcacaccatccaggacatcaacatcagcctgtggaggctgcctgagaaggtgaagagtgacagatctgtgttcatgaaccagggcgagtgggagctgctgggcgtgctgccctacttccgggagttctccatggagagcagcaactactatgcagagatgaagttctacgtggtgatcagaagaagacccctcttctacgtggtgtccctgctgctgcccagcatcttcctgatggtgatggacatcgtgggcttctacctgccccccaacagcggggagcgggtgtccttcaagatcaccctgctgctgggctacagcgtcttcctgatcatcgtgtctgacaccctgcctgccacagccatcggcacccccctgattggagtgtactttgtggtgtgcatggccctgctggtgatcagcctggccgagaccatcttcatcgtgcggctggtgcacaagcaggacctgcagcagcctgtgcctgcctggctgcggcacctggtgctggagagaattgcctggctgctgtgcctgcgggagcagagcaccagccagaggcccccagccaccagccaggccaccaagacagatgactgcagcgccatgggcaaccactgcagccacatgggcggcccccaggactttgagaagagcccccgggaccgctgcagccccccacctccaccccgggaggccagcctggccgtgtgtggcctgctgcaggagctgagcagcatccggcagttcctggagaagagagatgagatccgggaggtggcccgggactggctgcgggtgggctctgtgctggacaagctgctcttccacatctacctgctggccgtgctggcctacagcatcaccctggtgatgctgtggagcatctggcagtatgcctag

SEQ ID NO: 16624 - DNA, 717 bp, Artificial Sequence
  derived and/or modified sequence
atgctgctgtgggtgcagcaggccctgctggccctgctgctgcccaccctgctggcccagggcgaggcccggcgcagcaggaacaccaccaggcctgccctgctgcggctgagtgactacctgctgaccaactacagaaaaggagtgcggcctgtgcgggactggaggaagcccaccaccgtgtccattgatgtgattgtgtatgccatcctgaatgtggatgagaagaaccaggtgctgaccacctacatctggtaccggcagtactggacagatgagttcctgcagtggaaccctgaggactttgacaacatcaccaagctgagcatccccacagacagcatctgggtgcctgacatcctgatcaatgaatttgtggatgtgggcaagagccccaacatcccctacgtgtacatccgccaccagggcgaggtgcagaactacaagcccctgcaggtggtgacagcctgcagcctggacatctacaacttcccctttgatgtgcagaactgcagcctgaccttcacctcctggctgcacaccagcggccaccccccagctgcccccctgctgtgtggccagcctgccacagcccagcacctgccccacggccacggccaccggggcctgctgcctgccccccagcagtggagggagggcctcttccaggactacaccccacctggcctgctgggcctgcctgaccaccgcttctag

SEQ ID NO: 16625 - DNA, 1455 bp, Artificial Sequence
  derived and/or modified sequence
atgctgggcaagctggccatgctgctgtgggtgcagcaggccctgttggccctgctacttccaacactattagcccagggggaagcccgccgctccaggaatacgaccagacccgcccttctgagattgtctgattacttgcttactaactaccggaaaggagttcgtcccgtgcgagattggcgtaagccaaccacagtctctatcgacgtgatcgtgtatgccattctcaatgttgacgaaaagaaccaagtgctgacgacctacatctggtaccgccagtattggaccgacgaatttctgcagtggaaccccgaggatttcgacaatatcaccaaactgtccattcccacagacagcatctgggtgccagatatcctcattaacgagttcgtcgacgtggggaagtctcctaacatcccctacgtatacattcggcaccaaggtgaagtgcagaactataaacccctgcaggtcgtaacggcgtgttccctggacatttacaatttccccttcgatgtccagaactgcagcttaacctttacatcctggttacatacgatccaggacattaacatctccctctggaggctccccgaaaaggtgaagagtgacagatccgtgttcatgaatcagggagaatgggaactattaggcgtccttccctacttcagagagttttctatggagtcctcaaactactacgcagaaatgaaattttatgtggtaattcgacggaggcccctgttttatgttgtgtcactgctgctccctagtatatttctgatggtgatggacatcgtggggttttatctccccccaaattctggtgagagggtttcctttaagatcactctcctcttggggtactccgtgttcttaattatcgttagcgatactcttccagctacagctatcggcacgcccctgataggggtatattttgtggtgtgtatggctctccttgtgatatcccttgcagaaacgatctttatcgtgcgcctggttcacaagcaagacttacagcaacccgttcccgcctggctcagacacctcgtgcttgagagaatagcctggcttctttgtctcagggaacagagcacgtcacagcgaccacccgcaacctctcaggcgactaagacggacgattgcagcgccatgggaaaccactgttcgcatatgggcgggcctcaagactttgagaagagcccacgagatcggtgttcacccccaccacccccgcgtgaggctagtctcgctgtttgtggcctcctgcaggaattaagttctatcagacagttcctggaaaagcgagatgagattagggaggtagccagagactggttgagagtcggaagcgtattggacaagctcctattccatatatatctgttggcagtgctggcttacagtattacgcttgtgatgctttggagcatctggcagtatgcatag

SEQ ID NO: 16626 - DNA, 1437 bp, Artificial Sequence
  derived and/or modified sequence
atgctgctgtgggtgcagcaggccctgctggccctgctgctgcccactctgctggcccagggagaagcacgccggagtaggaataccacccgccctgctttgctacgtctgtccgactatctgttgaccaactataggaagggcgtgagaccggtgagagactggcggaagccgactactgtcagtatcgatgttatcgtatacgcaattctgaatgttgatgaaaaaaatcaagttctcaccacctatatctggtatcgccagtactggactgatgaattcctgcagtggaaccccgaggatttcgataacataaccaaactgtccatcccgaccgattcaatatgggtcccagacattttgataaatgagttcgtcgacgtcggcaaaagtccaaatattccctatgtgtacataagacaccagggagaagttcagaattataaaccattgcaggtagtgacagcttgttcccttgatatttataacttcccatttgacgttcagaattgttcactcactttcaccagctggctgcacacgatacaagacatcaacatctcattgtggagactgcctgaaaaggtcaaatcagatcgaagcgttttcatgaaccagggcgaatgggagctgctgggagtactgccctatttccgcgagtttagcatggaatcctctaactattacgcagaaatgaagttttatgtcgtgattaggcgccgcccattattttatgtggtgtccctgttgctgccatccatcttcctcatggtgatggatattgttggcttctatctaccaccgaactcaggagaaagagttagctttaaaattaccttgctcctcggctacagcgtgttcctgatcattgtcagtgatacacttcccgcgacggcaattgggaccccccttatcggagtgtatttcgttgtgtgcatggcgctgctcgtaatttcactggccgaaaccattttcatcgtgagactggttcataaacaggaccttcaacagccggtgcctgcatggttacgccacctagtactcgaaaggatcgcttggctgctctgtcttagggagcagtccacaagtcagcgcccaccagccaccagccaggccacaaaaaccgatgattgtagcgctatggggaatcactgtagccacatgggggggcctcaggacttcgagaaatctcccagagacaggtgttcaccacccccaccacctcgagaggctagccttgccgtatgcggcctactccaggagctctcctccatccggcagtttttagaaaagagggacgagataagagaagtggccagggattggctgagggtgggctcagttctggataaactgttgttccacatctacctactcgccgttctggcatacagcattactctcgtcatgctgtggtccatatggcagtatgcctag

SEQ ID NO: 16627 - DNA, 717 bp, Artificial Sequence
  derived and/or modified sequence
atgctgctgtgggtgcagcaggccctgctggccctgctgctgcccacactactagcccagggagaagcaagacgctcaagaaacacgacacgacccgcattgctgaggctaagcgactacctgctcactaactataggaaaggcgtgcgccctgtgagagattggcgtaaacctacgacagtgtctatagacgtaatagtgtacgctattctcaacgttgatgaaaagaaccaggtgctgacaacttatatatggtacaggcagtactggacagacgagttcctgcaatggaatcctgaggactttgataacattacaaaattatctatccctacagactcgatctgggtgcccgacattctcattaacgagtttgtcgacgtggggaaatctcctaatatcccttacgtgtatattcggcaccagggggaggtgcagaactataagcctctgcaggtggttaccgcttgttccttggacatctataacttccctttcgacgtgcagaattgttcactgacttttaccagctggcttcacaccagtggacacccacccgctgctccacttctgtgtgggcagccagcaaccgcgcagcacctgcctcacggccatggacatcgcggcctgttgccagcaccccagcagtggagggagggcctctttcaggactataccccgcccgggctgcttggcttaccagaccaccggttctag

SEQ ID NO: 16628 - DNA, 1455 bp, Artificial Sequence
  derived and/or modified sequence
atgctggggaagctggctatgctgctctgggtccaacaggccttattggcactgcttctgccgacactcctggctcagggagaagcacgacggagtcgaaatactacgagaccagccctccttcgattgagtgactatctactcactaattaccggaagggggtgagaccagtgagagactggagaaagcccactacagtgtctattgatgtaatcgtttatgctattctgaatgtggacgagaaaaatcaagtgctaacaacatatatttggtaccggcagtattggaccgatgaatttttgcagtggaatcccgaagattttgacaatatcaccaagttatccattcccacggacagcatctgggttcccgatatcctgatcaacgagttcgtggacgtgggcaaaagcccaaatatcccgtacgtgtatatccgacatcagggagaggtgcagaactataaacccctgcaggtagttaccgcgtgcagcttagatatatataactttccttttgacgttcaaaactgttccctgacgttcacaagttggctccacaccatacaggatatcaatatttccctgtggagattacctgagaaggtcaaaagcgatcggtcagtgtttatgaaccaaggggagtgggaactgcttggggtgcttccctactttagggagttcagcatggaaagttctaattactacgcagaaatgaagttctacgtagtgattcggcgtcgcccactgttttacgtcgtttctctcctactcccctccatcttcctgatggttatggacatcgtgggtttttacctcccccctaattccggtgaacgcgtgagtttcaaaattacactcctcctcggatactctgtctttttaatcattgtgagtgatacactgccagccaccgccattgggactccactgattggagtgtatttcgtcgtctgtatggctctgctggtgatcagcctagccgagacaattttcatcgtccggctggtgcacaaacaggacctccagcagcctgtccctgcttggttgaggcatcttgtgttggagagaatcgcatggctgttatgcctgagagaacagtctaccagccagaggcctcccgctacttctcaggcgactaagactgatgactgttctgccatgggtaatcactgcagtcatatgggaggccctcaggacttcgaaaagtcaccccgagaccgctgctccccgcctccccctccacgggaggcatcattggccgtgtgtggcctgttacaggaactgagctccatacgacagttcctagaaaagagagacgaaatcagggaagtggccagagactggctgagggtgggctctgttctcgacaagcttctgttccacatttacctgctggcagttttggcctactcgattactctggtgatgctttggagcatctggcagtatgcatag

SEQ ID NO: 16629 - DNA, 1437 bp, Artificial Sequence
  derived and/or modified sequence
atgctcctctgggtacagcaggctctgcttgccctgctattacctacgctgctcgctcaaggtgaagccaggaggtcccgaaacaccactcgccctgctctactccgactaagtgattacctcctcaccaactaccggaagggagtaagacccgtgagggactggcggaagcccactacagtatctatagacgtgatcgtctatgccattttaaacgtagatgagaagaatcaggtcctgacgacctatatctggtataggcaatattggacagatgaattcctgcagtggaacccggaggattttgataacatcacaaaactttcaatcccaacagatagcatctgggtgccggatattttaataaatgagttcgtggatgtgggaaaaagccccaacatcccttacgtctatattaggcaccaaggtgaggtccagaattacaagcctctgcaggtcgtgacagcttgctccttggacatctacaactttcctttcgatgtccagaattgttccctgacctttacctcatggctccacactattcaggatatcaacataagtctctggcgattacctgagaaagtgaagtccgatagatccgtgtttatgaatcagggtgaatgggagctgctgggcgtccttccctactttcgcgagttttctatggagagcagcaactattatgctgaaatgaaattctatgtggtgatccggagaagaccgctcttctatgtcgtgagtctgttactcccttccattttcctgatggtgatggatatagtaggattctacttgccaccaaactctggcgaacgggtgtcattcaaaatcaccttacttctgggctatagcgtgttcctgatcatcgtctccgacacccttcctgcaacagctataggcacacctctgatcggtgtgtatttcgtcgtctgcatggcgctgctcgtaatcagtcttgctgaaaccattttcatcgtgcgactggtacacaagcaagacttgcaacaacctgtccccgcttggctcagacacctcgtgcttgaaaggatagcctggctgctttgtttgagggaacagtccacgagccaaagaccccctgctacaagccaagccacaaagactgacgattgtagcgctatgggaaatcattgtagccatatgggcggtccccaggattttgaaaagtctccgagagaccggtgtagtcctcctccaccacccagagaggcgagtcttgcagtgtgtggactattacaagaactgtcttctatccgccagtttttagagaaacgcgacgagatccgagaagtggcacgggattggcttcgagttggcagcgtcctggacaaattgctgttccacatttatttgcttgctgttctggcttactccatcacccttgtaatgctctggtccatatggcagtacgcttag

SEQ ID NO: 16630 - DNA, 717 bp, Artificial Sequence
  derived and/or modified sequence
atgctgctttgggttcaacaggctttattagccctcttattgcccacgctcttggcccagggcgaagcccgtcggagtcggaatacaacccgacccgcactgctgcgcctgagtgactatctgttaaccaactatcgtaaaggcgtgcgcccagtaagagactggcgcaaacctactacagtttctatcgacgtgatcgtgtatgccatcttaaacgtagacgagaaaaatcaggtgctgactacttatatctggtataggcagtactggactgacgagttcctccagtggaaccctgaggacttcgacaatattacgaaattatctattcccacagattcgatctgggtgccggacattctgattaacgaattcgtcgatgtgggcaaatctccaaatattccctatgtgtacattcgccaccagggtgaagtgcagaattataagcccctccaggtggttactgcatgttcactggatatctacaacttcccgttcgatgtgcagaactgctctctcacgttcacaagctggctgcacacgtcagggcatccacctgcggcacccctgctatgtggccagcctgcaactgcgcaacatctgcctcacggtcatgggcaccggggactcctgcccgctccacagcaatggagagagggcctctttcaagattacacaccccctggcctcctggggcttcctgatcataggttctag

SEQ ID NO: 16631 - protein, 402 aa, Artificial Sequence
  derived and/or modified sequence
MDKLDANVSSEEGFGSVEKVVLLTFLSTVILMAILGNLLVMVAVCWDRQLRKIKTNYFIVSLAFADLLVSVLVMPFGAIELVQDIWIYGEVFCLVRTSLDVLLTTASIFHLCCISLDRYYAICCQPLVYRNKMTPLRIALMLGGCWVIPTFISFLPIMQGWNNIGIIDLERSLNQGLGQDFHAIEKRKFNQNSNSTYCVFMVNKPYAITCSVVAFYIPFLLMVLAYYRIYVTAKEHAHQIQMLQRAGASSESRPQSADQHSTHRMRTETKAAKTLCIIMGCFCLCWAPFFVTNIVDPFIDYTVPGQVWTAFLWLGYINSGLNPFLYAFLNKSFRRAFLIILCCDDERYRRPSILGQTVPCSTTTINGSTHVLRDAVECGGQWESQCHPPATSPLVAAQPSDT

SEQ ID NO: 16632 - protein, 388 aa, Artificial Sequence
  derived and/or modified sequence
MDKLDANVSSEEGFGSVEKVVLLTFLSTVILMAILGNLLVMVAVCWDRQLRKIKTNYFIVSLAFADLLVSVLVMPFGAIELVQDIWIYGEVFCLVRTSLDVLLTTASIFHLCCISLDRYYAICCQPLVYRNKMTPLRIALMLGGCWVIPTFISFLPIMQGWNNIGIIDLIEKRKFNQNSNSTYCVFMVNKPYAITCSVVAFYIPFLLMVLAYYRIYVTAKEHAHQIQMLQRAGASSESRPQSADQHSTHRMRTETKAAKTLCIIMGCFCLCWAPFFVTNIVDPFIDYTVPGQVWTAFLWLGYINSGLNPFLYAFLNKSFRRAFLIILCCDDERYRRPSILGQTVPCSTTTINGSTHVLRDAVECGGQWESQCHPPATSPLVAAQPSDT

SEQ ID NO: 16633 - DNA, 1209 bp, Artificial Sequence
  derived and/or modified sequence
atggataaactcgacgccaacgtcagctccgaagaggggttcggttccgtggagaaggtcgtgctgctgacattcctctcaaccgtcatcctgatggctatcctgggtaatctcctcgtgatggtggccgtgtgttgggaccgccaattaagaaaaatcaaaaccaactattttatagtttccctcgcctttgcggatctgctagtttcagttctagtgatgccatttggcgctatcgagctcgtgcaggacatctggatctatggtgaggtgttttgtcttgtgcgaaccagtctagacgttctcttgacgacagcaagcatctttcacctctgctgtatatccctggatcgatactacgcaatctgctgccaaccactggtctaccgaaataagatgactcccctgcggatcgcccttatgctgggggggtgctgggtgattcctacattcatcagcttcttgccaatcatgcagggatggaataatataggtataatcgacctcgagaggagcttgaatcaaggactaggacaggacttccatgcaattgagaagagaaagtttaatcaaaacagcaattctacttactgtgtttttatggtcaacaaaccatatgctatcacatgctccgtagtggccttctatatccctttcctcctgatggttttggcatactaccgcatctacgtaactgcaaaggaacacgctcatcagattcagatgctgcaaagggcaggagcgtccagcgagagtcgaccgcagtcagctgaccagcatagtacccatcgtatgcggacagagactaaggccgccaagaccttgtgcattattatgggatgtttttgtttgtgctgggccccattttttgttaccaacatcgttgatccattcatcgactacaccgtacctggccaggtttggaccgcttttctgtggctggggtacatcaactcgggactgaacccattcctgtatgccttcctcaacaaatccttcaggcgggctttcctcatcatcctgtgctgtgatgacgaacggtataggaggcccagcatactcggtcagacagtcccttgttctacgactacaattaacggatctacccacgtcttgcgggatgcagtagagtgcggcgggcaatgggagtctcagtgtcacccgcctgccacatctcctctcgttgctgctcagccaagcgacacctag

SEQ ID NO: 16634 - DNA, 1167 bp, Artificial Sequence
  derived and/or modified sequence
atggacaaacttgacgctaacgtgtccagcgaagagggcttcgggtcagtggagaaagtggtattgctgacttttcttagtacagtgatcctcatggcgatcctgggcaatctcttggttatggtagctgtgtgttgggaccggcagctgaggaagatcaagacgaactactttatagtgagcttagctttcgcagatctgctcgtgtctgtgctggtaatgccctttggagccattgagctcgtgcaggacatctggatatacggcgaggtattctgcttagtacgcacgtctcttgacgtgctgcttacgaccgcatccatcttccacttgtgttgcatctcactggatcggtactacgccatctgttgtcagccactggtttataggaataagatgacccctctaagaattgctctgatgttgggaggatgctgggtgatccccaccttcatctcctttctaccaataatgcaaggctggaacaatatcgggataatcgacctgatcgaaaagagaaagtttaaccagaactcaaactctacgtactgtgtgttcatggttaataagccatatgccatcacgtgctctgtagtggccttctacatacctttcttattgatggtgttggcctattatcgtatttacgtcactgcaaaggaacatgctcaccagattcagatgttgcaacgagccggtgctagcagcgaatcaaggccccaatccgccgatcagcattcgacacacagaatgcggactgagacaaaagcagccaagacgctctgcatcatcatggggtgcttctgtctttgttgggccccgtttttcgtgacgaatattgttgaccccttcattgactataccgtcccaggtcaggtatggactgcctttttatggctgggatacatcaactctggtcttaacccgttcttatacgcctttctcaataaatcattcagaagagcctttctgatcatcctatgctgcgacgacgagaggtatcgccgcccttccatcttgggacagaccgttccctgttcaaccaccacaatcaatggctctacacacgtgctgcgggacgcggtggagtgcggtgggcaatgggagtcgcagtgtcaccctcccgccacatctcctctcgtggctgcacaaccttcggatacatag

SEQ ID NO: 16635 - DNA, 1209 bp, Artificial Sequence
  derived and/or modified sequence
atggacaagctggatgccaacgtgagcagcgaggagggcttcggctctgtggagaaggtggtgctgctgaccttcctgagcaccgtcatcctgatggccatcctgggcaacctgctggtgatggtggccgtgtgctgggaccggcagctgaggaagatcaagaccaactacttcatcgtgtccctggcctttgctgacctgctggtgtctgtgctggtgatgccctttggagccatcgagctggtgcaggacatctggatctacggggaggtgttctgcctggtgaggaccagcctggatgtgctgctgaccacagccagcatcttccacctgtgctgcatcagcctggaccgctactatgccatctgctgccagcccctggtgtacagaaacaagatgacccccctgcgcatcgccctgatgctgggcggctgctgggtgatccccaccttcatctccttcctgcccatcatgcagggctggaacaacatcggcatcatcgacctggagaggagcctgaaccagggcctgggccaggacttccacgccatcgagaagaggaagttcaaccagaacagcaacagcacctactgtgtgttcatggtgaacaagccctatgccatcacctgcagcgtggtggccttctacatccccttcctgctgatggtgctggcctactaccgcatctacgtgacagccaaggagcacgcccaccagatccagatgctgcagagagctggggccagcagcgagagccggccccagagcgctgaccagcacagcacccacaggatgaggacagagaccaaggccgccaagaccctgtgcatcatcatgggctgcttctgcctgtgctgggcccccttctttgtgaccaacatcgtggaccccttcatcgactacacagtgcccggccaggtgtggacagccttcctgtggctgggctacatcaacagcggcctgaaccccttcctgtatgccttcctgaacaagagcttccggcgggccttcctgatcatcctgtgctgtgatgatgagcgctacagaagacccagcatcctgggccagacagtgccctgcagcaccaccaccatcaatggcagcacccacgtgctgagagatgctgtggagtgtggcggccagtgggagagccagtgccaccccccagccaccagccccctggtggccgcccagcccagcgacacctag

SEQ ID NO: 16636 - DNA, 1167 bp, Artificial Sequence
  derived and/or modified sequence
atggacaagctggatgccaacgtgagcagcgaggagggcttcggctctgtggagaaggtggtgctgctgaccttcctgagcaccgtcatcctgatggccatcctgggcaacctgctggtgatggtggccgtgtgctgggaccggcagctgaggaagatcaagaccaactacttcatcgtgtccctggcctttgctgacctgctggtgtctgtgctggtgatgccctttggagccatcgagctggtgcaggacatctggatctacggggaggtgttctgcctggtgaggaccagcctggatgtgctgctgaccacagccagcatcttccacctgtgctgcatcagcctggaccgctactatgccatctgctgccagcccctggtgtacagaaacaagatgacccccctgcgcatcgccctgatgctgggcggctgctgggtgatccccaccttcatctccttcctgcccatcatgcagggctggaacaacatcggcatcatcgacctgattgagaagaggaagttcaaccagaacagcaacagcacctactgtgtgttcatggtgaacaagccctatgccatcacctgcagcgtggtggccttctacatccccttcctgctgatggtgctggcctactaccgcatctacgtgacagccaaggagcacgcccaccagatccagatgctgcagagagctggggccagcagcgagagccggccccagagcgctgaccagcacagcacccacaggatgaggacagagaccaaggccgccaagaccctgtgcatcatcatgggctgcttctgcctgtgctgggcccccttctttgtgaccaacatcgtggaccccttcatcgactacacagtgcccggccaggtgtggacagccttcctgtggctgggctacatcaacagcggcctgaaccccttcctgtatgccttcctgaacaagagcttccggcgggccttcctgatcatcctgtgctgtgatgatgagcgctacagaagacccagcatcctgggccagacagtgccctgcagcaccaccaccatcaatggcagcacccacgtgctgagagatgctgtggagtgtggcggccagtgggagagccagtgccaccccccagccaccagccccctggtggccgcccagcccagcgacacctag

SEQ ID NO: 16637 - DNA, 1209 bp, Artificial Sequence
  derived and/or modified sequence
atggacaagctggacgccaacgtgagcagcgaggagggcttcggcagcgtggagaaagttgttctgctaacatttctcagcaccgtaatccttatggccattttgggaaacctgctggtgatggtggccgtctgctgggaccgccagttgagaaagatcaaaaccaactattttatcgtcagcttggcattcgctgacctgctggtgtccgtgctggtcatgccgttcggggctatagagctggtccaggacatttggatctatggtgaggtgttctgtcttgttaggaccagtctggatgtgttactcactactgcctctattttccatctttgctgcatctccctagaccgatattatgccatttgctgccagcctcttgtctacagaaataaaatgactcctttaaggattgctctgatgctcggcggttgctgggtaatccctacctttatctcattcctgccaattatgcagggctggaacaacatcggtataatagacttggagcggagcctcaaccaaggcctgggacaggactttcatgctattgagaaaaggaagttcaaccagaacagcaattctacctattgcgtgttcatggtgaacaagccctacgccattacctgtagtgtggttgcattctatatccccttcctgttgatggtgctagcatactaccgcatatatgtgaccgcaaaggaacacgcccaccaaatacagatgttacagagagcaggcgcatcctccgagtcccgaccccagagtgccgaccagcacagcacacaccgcatgagaaccgaaaccaaagcagctaagacactctgcatcatcatgggttgtttctgcctgtgctgggcaccattctttgtaacaaacatcgtggatcccttcatcgattacacagtgcccgggcaggtttggactgcctttttatggttgggttacattaactcagggctaaacccttttctctatgcgttcctgaacaagtctttccgccgagcctttctgattatcctctgttgtgatgacgagaggtatcgacgaccatcaatcctggggcagaccgtgccttgctcaaccaccacgattaacggaagcactcatgtactacgtgatgctgtggagtgtgggggccagtgggagagtcagtgtcatccccccgccacaagtccattggtggccgcccagccatccgatacgtag

SEQ ID NO: 16638 - DNA, 1167 bp, Artificial Sequence
  derived and/or modified sequence
atggacaagctggacgccaacgtgagcagcgaggagggcttcggctctgtggaaaaggtggttctgctgactttcctctccacagttatactgatggctattctgggtaacctgttagtgatggtcgctgtgtgctgggaccggcagctgaggaagattaagaccaactatttcattgtgtccctggctttcgctgacctgctcgtgagcgtcctggtcatgcccttcggcgccattgaattggtgcaggacatttggatttacggggaagtgttctgccttgtccgcactagcctggatgtgctactgacaactgctagtatcttccacctgtgctgcattagcctggacaggtattacgctatttgctgtcaaccccttgtatatcgtaataagatgactccattgagaatcgctctaatgctgggaggttgctgggtcattcctacgttcatttcatttctccctattatgcagggctggaataacatcggcattatcgatttgatcgagaagcgaaagttcaaccagaactcaaacagcacatactgtgtcttcatggttaataaaccatatgctattacttgcagtgtcgtggccttttatatcccatttctcctcatggtgctggcatactacaggatctacgtgacagccaaggagcatgcccatcagatccaaatgctgcagcgcgctggggccagctccgagtctaggccccagtccgcagatcaacacagcacccaccgaatgaggacagaaaccaaagccgccaagaccctgtgcattataatgggctgcttctgcctgtgttgggccccattcttcgtgaccaacatagtcgatccattcattgactatactgtgcctgggcaggtgtggactgctttcctgtggttgggatacatcaatagcgggttaaaccccttcctgtacgcctttttaaataagtcattccgacgagctttcctgatcatcctgtgttgcgacgatgagcgttatagacgtccatctattctggggcaaaccgttccatgcagcaccacgacaattaacggttcaacccatgtgctccgggacgccgtggaatgcgggggtcagtgggagtcccagtgccaccctcccgccacaagcccactggtcgcagcccaaccaagcgacacctag

SEQ ID NO: 16639 - DNA, 1209 bp, Artificial Sequence
  derived and/or modified sequence
atggacaagcttgacgccaacgtgagctcagaggaaggctttggaagtgtagaaaaagtagtgctcctcacgttcctgagtacagtgattctgatggcaatcctaggtaatctgctggtgatggtggccgtatgttgggacaggcagctcagaaaaatcaagacaaactatttcatcgtcagtcttgcctttgcagacctgcttgtgtccgtactggtcatgccctttggagccatcgagctagtacaagatatctggatctacggcgaagtgttctgtctggtgcgaacctcattggacgtcctcttgaccaccgcaagcattttccatctgtgttgtatcagcctcgaccggtactatgctatatgctgccagcctctcgtgtataggaataagatgactccgctgaggattgctctcatgctgggcggatgctgggtcattcccacttttatttcctttctccccattatgcaaggatggaataatattgggataatcgacctagagaggtctcttaaccagggtctggggcaagacttccacgccattgaaaaacgaaagttcaatcagaactccaatagtacctattgtgtgtttatggtaaataaaccctacgcgatcacctgttccgtcgttgctttctacatacccttcctgctgatggtgcttgcctattatcggatttatgtgactgcaaaggaacacgcccaccagatacagatgctgcaacgggctggcgcaagctccgagtctcgtccccagtccgccgaccaacattcaacgcatcggatgcggactgaaactaaagccgcaaagaccctgtgcattattatggggtgtttctgcctatgttgggcgccattcttcgttaccaatattgtggatccctttatcgattacaccgtacccggacaggtctggaccgcatttctctggctcgggtacatcaactcagggctgaatccatttctttacgcatttctgaacaagtcattcagacgagcttttctgataatcctgtgctgcgatgatgaacggtataggaggccttctatcctaggacagacagtaccttgttcaactacgaccatcaatggctcaacccacgtgctgagggacgctgttgaatgtggaggccagtgggaatcgcagtgccacccccctgccacgagccccctggtggctgcccagccttccgacacctag

SEQ ID NO: 16640 - DNA, 1167 bp, Artificial Sequence
  derived and/or modified sequence
atggacaagttggatgccaatgtgagctccgaggagggattcggctccgtggagaaggtggttctgctgactttcctcagtacagtcatcctgatggccatattgggtaatctcctggtgatggtagccgtttgttgggacaggcagctgagaaagatcaaaacgaattacttcattgtgtctctggcgttcgcggacttgctggtcagcgtgctggtgatgccatttggcgctatagagctcgttcaggacatttggatatacggtgaggtcttttgcttggttaggactagtctggatgtgctgttaaccacggcttcaattttccatttgtgctgcatctcactggatagatattacgcaatatgctgtcaacccctggtgtaccgcaacaaaatgacccccttgcggatagcgctgatgctcggaggttgttgggtgattccaacgttcatttcctttctgcctattatgcaaggctggaacaatattggaataatcgatctgatcgagaaaagaaagttcaatcaaaatagcaactcaacttattgtgtgtttatggttaacaaaccctacgccatcacgtgtagcgtcgtcgcattctacatcccctttttgctcatggtgctggcatactaccgaatctacgtaaccgctaaggaacacgcccaccagatccagatgctacaaagggcaggtgcttctagcgaatcacgccctcagagcgccgaccaacactctactcaccggatgcggaccgaaactaaagccgcaaaaacgttgtgtataattatgggttgtttttgtttgtgttgggccccattctttgtaaccaacattgtggatcctttcatagactacaccgtgcccggacaggtatggactgccttcttatggctggggtatatcaactctgggctaaacccctttctgtacgccttcctgaacaagtcctttcgacgagcatttctgatcatactgtgctgtgatgatgaaaggtaccgaaggccctctatccttgggcagaccgttccctgctctactactaccattaatggatccactcacgttctaagagatgctgtggagtgcgggggacagtgggagtcccaatgccatcccccagcgacttcaccactggtggccgcacagccctcagatacatag

SEQ ID NO: 16641 - DNA, 3018 bp, Artificial Sequence
  derived and/or modified sequence
ggcgcaggcagcggctgggagcgcagcggcagcggcggcagcagaagctcggctcagcggctgggggtggccgctcgaatctgccagggcacctcgctccctcgcctctggcagcgggaccctgtgggcattgaaatccaactcactcatgcttatttcctgtaatggacaaacttgatgctaatgtgagttctgaggagggtttcgggtcagtggagaaggtggtgctgctcacgtttctctcgacggttatcctgatggccatcttggggaacctgctggtgatggtggctgtgtgctgggacaggcagctcaggaaaataaaaacaaattatttcattgtatctcttgcttttgcggatctgctggtttcggtgctggtgatgccctttggtgccattgagctggttcaagacatctggatttatggggaggtgttttgtcttgttcggacatctctggacgtcctgctcacaacggcatcgatttttcacctgtgctgcatttctctggataggtattacgccatctgctgccagcctttggtctataggaacaagatgacccctctgcgcatcgcattaatgctgggaggctgctgggtcatccccacgtttatttcttttctccctataatgcaaggctggaataacattggcataattgatttggaaaggagtctaaaccaaggcctgggccaggattttcatgcgatagaaaagaggaagttcaaccagaactctaactctacgtactgtgtcttcatggtcaacaagccctacgccatcacctgctctgtggtggccttctacatcccatttctcctcatggtgctggcctattaccgcatctatgtcacagctaaggagcatgcccatcagatccagatgttacaacgggcaggagcctcctccgagagcaggcctcagtcggcagaccagcatagcactcatcgcatgaggacagagaccaaagcagccaagaccctgtgcatcatcatgggttgcttctgcctctgctgggcaccattctttgtcaccaatattgtggatcctttcatagactacactgtccctgggcaggtgtggactgctttcctctggctcggctatatcaattccgggttgaacccttttctctacgccttcttgaataagtcttttagacgtgccttcctcatcatcctctgctgtgatgatgagcgctaccgaagaccttccattctgggccagactgtcccttgttcaaccacaaccattaatggatccacacatgtactaagggatgcagtggagtgtggtggccagtgggagagtcagtgtcacccgccagcaacttctcctttggtggctgctcagcccagtgacacttaggcccctgggacaatgacccagaagacagccatgcctccgaaagagggccaggtcctaagctgctgcttgtgcgcgactgcacccggtattctcttcacctgaggctttccgtccgccagtgcaggaacccggtgctcgctgggcttttcctctgagattccagcaggtggcgctggagggagtcaggggacataatggcctccttgttcactttttatttcccaacactccctcttcccagattctctgcttttgccgcgtggtctctggtgtctctgacatgttcccgtcactcactgtgtctgatctgtctcactcacgttctaagcacgatagcttgctgcgtcctatctcggtcactgatgtctccaaatacgccttctttgctgtgtgggcttccagatatcaacaaaatactccctctctgttcctgtcttagccagaggcgtcgctcctgtcttgcttacttgcttggtcacgtccgtcacagccatgttcaagctatcccctgcctcttcttcgccctgttctgtgccagacgctaacacacttttctccctgtgtctgggtccaaacgtgcatcctcttggttggcccccttgtcagtcccagacgtccacttgctcttccttatgtccaatgtctgtcctcctcttcaggacatgctccatttattttccatggaagacacagggtcagagatctgtcagaggaaaatggtctccacagcaactctggagggaagctgaagacagatagcttcctcctggtgtcctggccgctggcgtgtctgccctgagatgctcgctctcctgctgggctagaacgggacgtcttctaaaaagccttgggcagggctagcaacatcgtaggtgtttattaggcttcaggatctttcccatgaacttgtgatatcattttgaaacccttcaatctggctttgttgctgccaaaggagataactgttggaagttcacactggggaaactcattttcccctgcagctcccccaaggtgcaggagggcaggatccagcagcactggggatgccgaggcaatgctgtacttgaagccagaggacccaaattgccgccctggctgtgctgcaaacaagctgtgagatcttgaatagtgttctttcatctctggaccccactttccacatctgtgcactcaagcttggactagaggacctttaagttttctttctgtttctaagacaacagtatgctgctatagccgtctgctacctcgagaagccatggcctgcctgccttttggctttgtttcaaaggaacgaccctcctcatttgggccttttagacccctgacctttccagctttgtccttcagattaatctggatgtcttttattcaaagctgagtcagtggctcttgcgaatgccccatagcagaagtcccgggaaggtaaatgccaaacccagagccatgtgagattctgactttgatcttggctgtggtttaatagcatctcaggattatttatcatattctctttttttcttattgcttataaggtgtcagttattgtttccattgttgtttactttagttctggaactgaaaccgacaggaagaaactttggaataaggaagagaagattgaccaaaccatccaaatgcc

SEQ ID NO: 16642 - DNA, 2962 bp, Artificial Sequence
  derived and/or modified sequence
gcggcagcggcggcagcagaagctcggctcagcggctgggggtggccgctcgaatctgccagggcacctcgctccctcgcctctggcagcgggaccctgtgggcattgaaatccaactcactcatgcttatttcctgtaatggacaaacttgatgctaatgtgagttctgaggagggtttcgggtcagtggagaaggtggtgctgctcacgtttctctcgacggttatcctgatggccatcttggggaacctgctggtgatggtggctgtgtgctgggacaggcagctcaggaaaataaaaacaaattatttcattgtatctcttgcttttgcggatctgctggtttcggtgctggtgatgccctttggtgccattgagctggttcaagacatctggatttatggggaggtgttttgtcttgttcggacatctctggacgtcctgctcacaacggcatcgatttttcacctgtgctgcatttctctggataggtattacgccatctgctgccagcctttggtctataggaacaagatgacccctctgcgcatcgcattaatgctgggaggctgctgggtcatccccacgtttatttcttttctccctataatgcaaggctggaataacattggcataattgatttgatagaaaagaggaagttcaaccagaactctaactctacgtactgtgtcttcatggtcaacaagccctacgccatcacctgctctgtggtggccttctacatcccatttctcctcatggtgctggcctattaccgcatctatgtcacagctaaggagcatgcccatcagatccagatgttacaacgggcaggagcctcctccgagagcaggcctcagtcggcagaccagcatagcactcatcgcatgaggacagagaccaaagcagccaagaccctgtgcatcatcatgggttgcttctgcctctgctgggcaccattctttgtcaccaatattgtggatcctttcatagactacactgtccctgggcaggtgtggactgctttcctctggctcggctatatcaattccgggttgaacccttttctctacgccttcttgaataagtcttttagacgtgccttcctcatcatcctctgctgtgatgatgagcgctaccgaagaccttccattctgggccagactgtcccttgttcaaccacaaccattaatggatccacacatgtactaagggatgcagtggagtgtggtggccagtgggagagtcagtgtcacccgccagcaacttctcctttggtggctgctcagcccagtgacacttaggcccctgggacaatgacccagaagacagccatgcctccgaaagagggccaggtcctaagctgctgcttgtgcgcgactgcacccggtattctcttcacctgaggctttccgtccgccagtgcaggaacccggtgctcgctgggcttttcctctgagattccagcaggtggcgctggagggagtcaggggacataatggcctccttgttcactttttatttcccaacactccctcttcccagattctctgcttttgccgcgtggtctctggtgtctctgacatgttcccgtcactcactgtgtctgatctgtctcactcacgttctaagcacgatagcttgctgcgtcctatctcggtcactgatgtctccaaatacgccttctttgctgtgtgggcttccagatatcaacaaaatactccctctctgttcctgtcttagccagaggcgtcgctcctgtcttgcttacttgcttggtcacgtccgtcacagccatgttcaagctatcccctgcctcttcttcgccctgttctgtgccagacgctaacacacttttctccctgtgtctgggtccaaacgtgcatcctcttggttggcccccttgtcagtcccagacgtccacttgctcttccttatgtccaatgtctgtcctcctcttcaggacatgctccatttattttccatggaagacacagggtcagagatctgtcagaggaaaatggtctccacagcaactctggagggaagctgaagacagatagcttcctcctggtgtcctggccgctggcgtgtctgccctgagatgctcgctctcctgctgggctagaacgggacgtcttctaaaaagccttgggcagggctagcaacatcgtaggtgtttattaggcttcaggatctttcccatgaacttgtgatatcattttgaaacccttcaatctggctttgttgctgccaaaggagataactgttggaagttcacactggggaaactcattttcccctgcagctcccccaaggtgcaggagggcaggatccagcagcactggggatgccgaggcaatgctgtacttgaagccagaggacccaaattgccgccctggctgtgctgcaaacaagctgtgagatcttgaatagtgttctttcatctctggaccccactttccacatctgtgcactcaagcttggactagaggacctttaagttttctttctgtttctaagacaacagtatgctgctatagccgtctgctacctcgagaagccatggcctgcctgccttttggctttgtttcaaaggaacgaccctcctcatttgggccttttagacccctgacctttccagctttgtccttcagattaatctggatgtcttttattcaaagctgagtcagtggctcttgcgaatgccccatagcagaagtcccgggaaggtaaatgccaaacccagagccatgtgagattctgactttgatcttggctgtggtttaatagcatctcaggattatttatcatattctctttttttcttattgcttataaggtgtcagttattgtttccattgttgtttactttagttctggaactgaaaccgacaggaagaaactttggaataaggaagagaagattgaccaaaccatccaaatgccaaaaagaaaaa

SEQ ID NO: 16643 - DNA, 1209 bp, Artificial Sequence
  derived and/or modified sequence
atggacaagctggacgccaacgtgagcagcgaggagggcttcggcagcgtggagaaggtggtgctgctgaccttcctgagcaccgtgatcctgatggccatcctgggcaacctgctggtgatggtggccgtgtgctgggacagacagctgagaaagatcaagaccaactacttcatcgtgagcctggccttcgccgacctgctggtgagcgtgctggtgatgcccttcggcgccatcgagctggtgcaggacatctggatctacggcgaggtgttctgcctggtgagaaccagcctggacgtgctgctgaccaccgccagcatcttccacctgtgctgcatcagcctggacagatactacgccatctgctgccagcccctggtgtacagaaacaagatgacccccctgagaatcgccctgatgctgggcggctgctgggtgatccccaccttcatcagcttcctgcccatcatgcagggctggaacaacatcggcatcatcgacctggagagaagcctgaaccagggcctgggccaggacttccacgccatcgagaagagaaagttcaaccagaacagcaacagcacctactgcgtgttcatggtgaacaagccctacgccatcacctgcagcgtggtggccttctacatccccttcctgctgatggtgctggcctactacagaatctacgtgaccgccaaggagcacgcccaccagatccagatgctgcagagagccggcgccagcagcgagagcagaccccagagcgccgaccagcacagcacccacagaatgagaaccgagaccaaggccgccaagaccctgtgcatcatcatgggctgcttctgcctgtgctgggcccccttcttcgtgaccaacatcgtggaccccttcatcgactacaccgtgcccggccaggtgtggaccgccttcctgtggctgggctacatcaacagcggcctgaaccccttcctgtacgccttcctgaacaagagcttcagaagagccttcctgatcatcctgtgctgcgacgacgagagatacagaagacccagcatcctgggccagaccgtgccctgcagcaccaccaccatcaacggcagcacccacgtgctgagagacgccgtggagtgcggcggccagtgggagagccagtgccacccccccgccaccagccccctggtggccgcccagcccagcgacacctag

SEQ ID NO: 16644 - DNA, 1167 bp, Artificial Sequence
  derived and/or modified sequence
atggacaagctggacgccaacgtgagcagcgaggagggcttcggcagcgtggagaaggtggtgctgctgaccttcctgagcaccgtgatcctgatggccatcctgggcaacctgctggtgatggtggccgtgtgctgggacagacagctgagaaagatcaagaccaactacttcatcgtgagcctggccttcgccgacctgctggtgagcgtgctggtgatgcccttcggcgccatcgagctggtgcaggacatctggatctacggcgaggtgttctgcctggtgagaaccagcctggacgtgctgctgaccaccgccagcatcttccacctgtgctgcatcagcctggacagatactacgccatctgctgccagcccctggtgtacagaaacaagatgacccccctgagaatcgccctgatgctgggcggctgctgggtgatccccaccttcatcagcttcctgcccatcatgcagggctggaacaacatcggcatcatcgacctgatcgagaagagaaagttcaaccagaacagcaacagcacctactgcgtgttcatggtgaacaagccctacgccatcacctgcagcgtggtggccttctacatccccttcctgctgatggtgctggcctactacagaatctacgtgaccgccaaggagcacgcccaccagatccagatgctgcagagagccggcgccagcagcgagagcagaccccagagcgccgaccagcacagcacccacagaatgagaaccgagaccaaggccgccaagaccctgtgcatcatcatgggctgcttctgcctgtgctgggcccccttcttcgtgaccaacatcgtggaccccttcatcgactacaccgtgcccggccaggtgtggaccgccttcctgtggctgggctacatcaacagcggcctgaaccccttcctgtacgccttcctgaacaagagcttcagaagagccttcctgatcatcctgtgctgcgacgacgagagatacagaagacccagcatcctgggccagaccgtgccctgcagcaccaccaccatcaacggcagcacccacgtgctgagagacgccgtggagtgcggcggccagtgggagagccagtgccacccccccgccaccagccccctggtggccgcccagcccagcgacacctag

SEQ ID NO: 16645 - protein, 445 aa, Artificial Sequence
  derived and/or modified sequence
MMDVNSSGRPDLYGHLRSFLLPEVGRGLPDLSPDGGADPVAGSWAPHLLSEVTASPAPTWDAPPDNASGCGEQINYGRVEKVVIGSILTLITLLTIAGNCLVVISVCFVKKLRQPSNYLIVSLALADLSVAVAVMPFVSVTDLIGGKWIFGHFFCNVFIAMDVMCCTASIMTLCVISIDRYLGITRPLTYPVRQNGKCMAKMILSVWLLSASITLPPLFGWAQNVNDDKVCLISQDFGYTIYSTAVAFYIPMSVMLFMYYQIYKAARKSAAKHKFPGFPRVEPDSVIALNGIVKLQKEVEECANLSRLLKHERKNISIFKREQKAATTLGIIVGAFTVCWLPFFLLSTARPFICGTSCSCIPLWVERTFLWLGYANSLINPFIYAFFNRDLRTTYRSLLQCQYRNINRKLSAAGMHEALKLAERPERPEFVLQNADYCRKKGHDS

SEQ ID NO: 16646 - DNA, 1338 bp, Artificial Sequence
  derived and/or modified sequence
atgatggacgtgaattcctcagggcgacccgacctctacggccacctcagaagtttcctgcttccagaagtgggccggggattgccagatctcagccccgatggcggcgccgatcctgttgccggcagctgggccccccatctcctctcagaagtgactgcgagcccagctcccacctgggacgctccccctgataacgccagcggatgtggtgaacagattaactacggccgagttgagaaagtggttataggttcgatactgaccctgattaccctgctcactatcgccggcaactgcctggttgttatttcggtgtgttttgtgaaaaagttaagacagccgtcaaactacctaattgtcagtctagccctggctgatctcagtgtggccgtggccgtgatgccatttgtctcggtgacagatctcataggaggcaaatggatcttcggccatttcttctgcaatgtcttcatagcaatggacgttatgtgttgcacagcctccattatgacactgtgcgtgatcagcatcgacagatatctcggcatcactcgcccactcacctatcctgttagacagaacggaaagtgcatggcaaagatgatcctgtcagtgtggctactgagcgccagcatcactttgccccccctgttcggctgggcccaaaacgtgaatgacgacaaggtgtgccttatcagccaggactttgggtataccatatatagcaccgctgtcgcattctatattccaatgtctgtcatgctgttcatgtattaccagatctacaaggccgcccggaagtctgctgcgaagcacaaattcccaggcttcccgcgagtagagcccgattcagtgattgccctaaatgggatagtgaaactgcaaaaggaggtcgaggagtgtgccaacctgagtcggcttctgaagcatgagagaaaaaacatctcaatcttcaaacgggaacagaaagcagccacgactttgggaatcattgtaggagcattcaccgtgtgttggctgcctttttttctcctgtcgactgcccggccattcatctgcggtacaagctgctcctgcatcccactatgggtagaacgcactttcctgtggttaggatatgccaacagccttatcaatccttttatctatgcattctttaaccgcgacctcagaaccacatataggtcattgctgcaatgccaatacaggaatatcaatcgaaaactcagcgccgcgggcatgcatgaggctttaaaactggccgagaggcccgaaagacccgaatttgtactacaaaatgctgattattgccggaaaaaaggccacgactcatag

SEQ ID NO: 16647 - DNA, 1338 bp, Artificial Sequence
  derived and/or modified sequence
atgatggatgtgaacagcagcggccgcccagacctgtatggccacctgcggagcttcctgctgcctgaggtgggccggggcctgcctgacctgagcccagatggcggcgctgaccctgtggccggctcctgggccccccacctgctgtctgaggtgacagccagccctgcccccacctgggatgcccccccagacaatgccagcggctgtggggagcagatcaactacggccgggtggagaaggtggtgattggcagcatcctgaccctcatcaccctgctgaccatcgccggcaactgcctggtggtgatctctgtgtgctttgtgaagaagctgcggcagcccagcaactacctgattgtgtccctggccctggccgacctgtctgtggccgtggccgtgatgccctttgtgtctgtgacagacctgattggaggcaagtggatcttcggccacttcttctgcaatgtgttcatcgccatggatgtgatgtgctgcacagccagcatcatgaccctgtgtgtgatcagcattgaccgctacctgggcatcacccggcccctgacctaccctgtgcggcagaatggcaagtgcatggccaagatgatcctgtctgtgtggctgctgagcgccagcatcaccctgccccccctgtttggctgggcccagaatgtgaatgatgacaaggtgtgcctgatcagccaggactttggctacaccatctacagcacagctgtggccttctacatccccatgtctgtgatgctgttcatgtactaccagatctacaaggccgccaggaagtctgctgccaagcacaagtttcctggcttcccccgggtggagccagattctgtgattgccctgaatggcatcgtgaagctgcagaaggaggtggaggagtgtgccaacctgagccggctgctgaagcatgagaggaagaacatcagcatcttcaagcgggagcagaaggccgccaccaccctgggcatcatcgtgggcgccttcaccgtgtgctggctgcccttcttcctgctgagcacagcccggcccttcatctgtggcaccagctgcagctgcatccccctgtgggtggagaggaccttcctgtggctgggctacgccaacagcctcatcaaccccttcatctatgccttcttcaacagagacctgcggaccacctaccgcagcctgctgcagtgccagtacagaaacatcaacaggaagctgtctgctgctggcatgcatgaggccctgaagctggccgagaggcctgagaggcctgagtttgtgctgcagaatgctgactactgcaggaagaagggccatgacagctag

SEQ ID NO: 16648 - DNA, 1338 bp, Artificial Sequence
  derived and/or modified sequence
atgatggacgtgaacagcagcggccggcccgacctgtacggccacctgaggtctttcctgctgcccgaagttggtcgcggtcttccagatctgtctccagacggtggggctgaccctgttgctggaagctgggcacctcacctcctgagcgaagtgactgcatcgcccgccccaacgtgggatgcgccgcctgacaacgcctccggctgcggcgagcagataaactacggtcgcgtggagaaggttgtgatcggttctatcttgacactgatcaccctcctcacaattgccggcaattgcttagtcgttataagcgtgtgcttcgtgaaaaaacttagacaacctagtaactatctgatcgtgagcctggcgctggccgatctttccgttgctgtggccgtgatgccttttgtgtccgtcaccgatttgataggggggaagtggatatttggacactttttttgtaacgtttttattgctatggatgtgatgtgctgtaccgcatccattatgacgctgtgcgttatttcaattgaccgttacctcgggatcacccgcccgctcacctatccagtccgtcagaacgggaagtgtatggccaagatgatcctctccgtgtggctcctgagtgccagcataactctaccacccctgtttggctgggcccagaatgtgaatgatgacaaagtttgccttatctctcaggattttgggtacactatctatagtactgccgtggctttctatatccctatgtctgtgatgctcttcatgtattaccagatttacaaggccgccagaaaatctgcggccaaacacaagtttccaggattcccaagggtggagccagatagcgtgattgcgcttaatggcatagttaagctgcagaaagaagtggaggaatgtgctaacctctctcgtctactgaagcacgagcgcaagaacatctccatctttaagcgggaacagaaggctgcaaccactctcggaataattgttggggctttcaccgtgtgttggctgccattttttctgctgtccactgccaggcctttcatatgcggcacttcttgtagctgtatccccctgtgggtggaaaggactttcttgtggctgggttacgcgaatagcttgataaaccctttcatttacgccttttttaacagggatttgcgcacgacttaccggagcctacttcaatgtcagtacaggaacatcaatcggaagctcagcgccgccggcatgcatgaagccctgaagctggcagagcgtcctgaacggcccgaatttgttctgcagaacgctgattactgccggaaaaagggtcacgattcctag

SEQ ID NO: 16649 - DNA, 1338 bp, Artificial Sequence
  derived and/or modified sequence
atgatggacgtgaattctagcggccgtccagatctgtacggacacctgcgctcctttttgttgcccgaagtcggtcggggactccctgaccttagtcccgacggaggcgctgaccctgtggctggatcctgggcaccccacctgctgagcgaggtcacggcgtcccccgctccaacgtgggatgctccaccagataacgcttccgggtgtggagaacagattaactatggtagagtcgaaaaggtggtgatagggtcaattcttacccttattactcttctgaccatagccggtaattgtttagtggtgatatcagtgtgctttgtgaagaaactgcgccaaccctccaattaccttattgtttccctggctctggcggatctgtccgtggcggtggcggttatgccgtttgtgtcagtgacagacctgatcgggggtaagtggatcttcggacattttttctgcaacgttttcatcgccatggacgtgatgtgttgcacagcttctatcatgactctgtgcgtaatttctatcgacagataccttggaattacacggcctctgacctatcctgtacggcagaacggaaaatgcatggctaaaatgatattgagtgtttggctgctgtcggcttcaatcacactgccccctctgtttggatgggcacagaatgtgaatgatgataaggtgtgcctgattagccaggactttgggtacaccatttatagcactgccgttgcattttatatccccatgtctgtcatgcttttcatgtactatcagatctataaagctgctagaaagtcggcggctaagcataaattccctgggttccccagggtcgagccggattcagtcattgcgctgaacggcatcgtcaaattgcagaaagaggttgaagagtgtgccaacctctctcgccttcttaaacatgaaagaaagaacatttctatctttaagagagagcagaaggccgcaaccacgctgggaatcattgtgggcgcatttactgtttgctggctgccttttttcctcttgtctaccgctcgaccatttatttgcggcacctcttgttcctgcatcccgttgtgggtcgaacgcacttttttatggttggggtacgcaaattctctgattaacccattcatatacgccttctttaaccgggacctgagaactacctatcgttccctcttgcaatgtcaatacaggaatattaaccggaagctttcagcagcagggatgcacgaggccctaaaactcgctgagcgcccagagaggcccgagttcgtgttacagaacgctgattactgtcgcaagaaagggcatgatagctag

SEQ ID NO: 16650 - DNA, 3028 bp, Artificial Sequence
  derived and/or modified sequence
ccatgggcagcggcacacggcggcgcgatgatggacgttaacagcagcggccgcccggacctctacgggcacctccgctctttccttctgccagaagtggggcgcgggctgcccgacttgagccccgacggtggcgccgacccggtcgcgggctcctgggcgccgcacctgctgagcgaggtgacagccagcccggcgcccacctgggacgcgcccccggacaatgcctccggctgtggggaacagatcaactacggcagagtcgagaaagttgtgatcggctccatcctgacgctcatcacgctgctgacgatcgcgggcaactgcctggtggtgatctccgtgtgcttcgtcaagaagctccgccagccctccaactacctgatcgtgtccctggcgctggccgacctctcggtggctgtggcggtcatgcccttcgtcagcgtcaccgacctcatcgggggcaagtggatctttggacactttttctgtaatgtcttcatcgccatggacgtcatgtgctgcacggcctcgatcatgaccctgtgcgtgatcagcattgacaggtaccttgggatcacaaggcccctcacataccctgtgaggcagaatgggaaatgcatggcgaagatgattctctccgtctggcttctctccgcctccatcaccttacctccactctttggatgggctcagaatgtaaatgatgataaggtgtgcttgatcagccaggactttggctatacgatttactctaccgcagtggcattttatatccccatgtccgtcatgcttttcatgtactaccagatttacaaggctgccaggaagagtgctgccaaacacaagtttcctggcttccctcgagtggagccagacagcgtcatcgccctgaatggcatagtgaagctccagaaggaggtggaagagtgtgcaaacctttcgagactcctcaagcatgaaaggaaaaacatctccatctttaagcgagaacagaaagcagccaccaccctggggatcatcgtcggggcctttaccgtgtgctggctgccatttttcctcctctcgacagccagacccttcatctgtggcacttcctgcagctgcatcccactgtgggtggagaggacatttctgtggctaggctatgcaaactctctcattaacccttttatatatgccttcttcaaccgggacctgaggaccacctatcgcagcctgctccagtgccagtaccggaatatcaaccggaagctctcagctgcaggcatgcatgaagccctgaagcttgctgagaggccagagagacctgagtttgtgctacaaaatgctgactactgtagaaaaaaaggtcatgattcatgattgaaagcagaacaatggagatgaaataaacaaggcaaaatagaggtggaaacagaaggaagtcatttgctgagtctgcagaatggaatgcagcttctgtcctttcttgggatgtctaaaacatgacaaacagggtgatctgttgtacacactatcttatgagggagatggtgacttctccttttttctgtggatcagtgctattgtgtgttctcagtttaagatagcagatcatctcagcagtaagcacaccaacagaactgagttccagaaaggaagcagtttctggtgctttgcatatgtccaaatccatgcaagtgggagaaagttccagtgcacacttcccatgcttctgagtctaggcgttgtggtgaatatgcaggaatcattcatgagacagaatgtattttgttgtatgacagaaggcttttccaagcaaactgcggtgagcgtagtgttgaatatgttgcatgtccatgttagaaaacagaatccagtcatcagctaatacaaatgatttcccagagcagtgtttgtttcaagcttctgtcaaatagtttggcttttctgcagggtctctgtgatttccccacctatgtacttttctgtgttaactcacttattatggtataactcaggaacaggtctcaggatggagagaagcatacaacatgagcaaagctttttctcgtgctctgaagggtcttgagaggggagtgggatgccttctgtgaggatttttatcgcagtgaagctcaagtggtacccaactgcgttgtaattaacatgattattggcatgtttttgactctcattttctacaaggctgcagtgggcccacccatgggctggcccataactgtatgttatgtggaagaagtgtgggaatgatgggttttccatgaaatgtgatgcttctggagatggggcataaacatgttcattcttgttgagctgcattgtgttaaaccaaattgtgtgaagcgaggtcacctggaccactcttgggaaatgcttcagaacaccagtctgttccttctagagaatttgtttttgtgttctatgtatcttaaatcaaatgtgtgcctaagcaattctgtcctctgattcccacccctacccaccaaaaaatggtagacatgaaaggcaggtgaggaaacagaaaaggtctctttgcagatatatattttttaaatggcactatgtagtaattaagagctaaggagacagaaagacagtagatgagaatagaagagtacctgtacctacaaggggaaaaatgaatgcaattctttatttgataagagtgaactgaaagagaatattattttcctacaataaagcaagctgtcctctcacaggataaagtggaattctgacatggattatggacttcttctaactcccattgacattgcttcttaccagacatggggaaaagctacctttcctgaaaggggaggagggcactgtcctttcagacaaagcttgtacaaattcctgaaccgcaaatttgctgaagtgaccgtatatattatattcataatttaaatgattatttatggtcagatacatattgttaaacttgaaaatgttttattacattacatcaaataaagtttatttgtagctgaaataaagcaacgtaagtaacaatttttaa

SEQ ID NO: 16651 - DNA, 1338 bp, Artificial Sequence
  derived and/or modified sequence
atgatggacgtgaacagcagcggcagacccgacctgtacggccacctgagaagcttcctgctgcccgaggtgggcagaggcctgcccgacctgagccccgacggcggcgccgaccccgtggccggcagctgggccccccacctgctgagcgaggtgaccgccagccccgcccccacctgggacgccccccccgacaacgccagcggctgcggcgagcagatcaactacggcagagtggagaaggtggtgatcggcagcatcctgaccctgatcaccctgctgaccatcgccggcaactgcctggtggtgatcagcgtgtgcttcgtgaagaagctgagacagcccagcaactacctgatcgtgagcctggccctggccgacctgagcgtggccgtggccgtgatgcccttcgtgagcgtgaccgacctgatcggcggcaagtggatcttcggccacttcttctgcaacgtgttcatcgccatggacgtgatgtgctgcaccgccagcatcatgaccctgtgcgtgatcagcatcgacagatacctgggcatcaccagacccctgacctaccccgtgagacagaacggcaagtgcatggccaagatgatcctgagcgtgtggctgctgagcgccagcatcaccctgccccccctgttcggctgggcccagaacgtgaacgacgacaaggtgtgcctgatcagccaggacttcggctacaccatctacagcaccgccgtggccttctacatccccatgagcgtgatgctgttcatgtactaccagatctacaaggccgccagaaagagcgccgccaagcacaagttccccggcttccccagagtggagcccgacagcgtgatcgccctgaacggcatcgtgaagctgcagaaggaggtggaggagtgcgccaacctgagcagactgctgaagcacgagagaaagaacatcagcatcttcaagagagagcagaaggccgccaccaccctgggcatcatcgtgggcgccttcaccgtgtgctggctgcccttcttcctgctgagcaccgccagacccttcatctgcggcaccagctgcagctgcatccccctgtgggtggagagaaccttcctgtggctgggctacgccaacagcctgatcaaccccttcatctacgccttcttcaacagagacctgagaaccacctacagaagcctgctgcagtgccagtacagaaacatcaacagaaagctgagcgccgccggcatgcacgaggccctgaagctggccgagagacccgagagacccgagttcgtgctgcagaacgccgactactgcagaaagaagggccacgacagctag

SEQ ID NO: 16652 - protein, 1367 aa, Artificial Sequence
  derived and/or modified sequence
MKSGSGGGSPTSLWGLLFLSAALSLWPTSGEICGPGIDIRNDYQQLKRLENCTVIEGYLHILLISKAEDYRSYRFPKLTVITEYLLLFRVAGLESLGDLFPNLTVIRGWKLFYNYALVIFEMTNLKDIGLYNLRNITRGAIRIEKNADLCYLSTVDWSLILDAVSNNYIVGNKPPKECGDLCPGTMEEKPMCEKTTINNEYNYRCWTTNRCQKMCPSTCGKRACTENNECCHPECLGSCSAPDNDTACVACRHYYYAGVCVPACPPNTYRFEGWRCVDRDFCANILSAESSDSEGFVIHDGECMQECPSGFIRNGSQSMYCIPCEGPCPKVCEEEKKTKTIDSVTSAQMLQGCTIFKGNLLINIRRGNNIASELENFMGLIEVVTGYVKIRHSHALVSLSFLKNLRLILGEEQLEGNYSFYVLDNQNLQQLWDWDHRNLTIKAGKMYFAFNPKLCVSEIYRMEEVTGTKGRQSKGDINTRNNGERASCESDVLHFTSTTTSKNRIIITWHRYRPPDYRDLISFTVYYKEAPFKNVTEYDGQDACGSNSWNMVDVDLPPNKDVEPGILLHGLKPWTQYAVYVKAVTLTMVENDHIRGAKSEILYIRTNASVPSIPLDVLSASNSSSQLIVKWNPPSLPNGNLSYYIVRWQRQPQDGYLYRHNYCSKDKIPIRKYADGTIDIEEVTENPKTEVCGGEKGPCCACPKTEAEKQAEKEEAEYRKVFENFLHNSIFVPRPERKRRDVMQVANTTMSSRSRNTTAADTYNITDPEELETEYPFFESRVDNKERTVISNLRPFTLYRIDIHSCNHEAEKLGCSASNFVFARTMPAEGADDIPGPVTWEPRPENSIFLKWPEPENPNGLILMYEIKYGSQVEDQRECVSRQEYRKYGGAKLNRLNPGNYTARIQATSLSGNGSWTDPVFFYVQAKTGYENFIHLIIALPVAVLLIVGGLVIMLYVFHRKRNNSRLGNGVLYASVNPEYFSAADVYVPDEWEVAREKITMSRELGQGSFGMVYEGVAKGVVKDEPETRVAIKTVNEAASMRERIEFLNEASVMKEFNCHHVVRLLGVVSQGQPTLVIMELMTRGDLKSYLRSLRPEMENNPVLAPPSLSKMIQMAGEIADGMAYLNANKFVHRDLAARNCMVAEDFTVKIGDFGMTRDIYETDYYRKGGKGLLPVRWMSPESLKDGVFTTYSDVWSFGVVLWEIATLAEQPYQGLSNEQVLRFVMEGGLLDKPDNCPDMLFELMRMCWQYNPKMRPSFLEIISSIKEEMEPGFREVSFYYSEENKLPEPEELDLEPENMESVPLDPSASSSSLPLPDRHSGHKAENGPGPGVLVLRASFDERQPYAHMNGGRKNERALPLPQSSTC

SEQ ID NO: 16653 - DNA, 4104 bp, Artificial Sequence
  derived and/or modified sequence
atgaagagcggcagcggcggcggcagccccaccagcctgtggggcctgctgttcctgagcgccgccctgagcctgtggcccaccagcggcgagatctgcggccccggcatcgacatcagaaacgactaccagcagctgaagagactggagaactgcaccgtgatcgagggctacctgcacatcctgctgatcagcaaggccgaggactacagaagctacagattccccaagctgaccgtgatcaccgagtacctgctgctgttcagagtggccggcctggagagcctgggcgacctgttccccaacctgaccgtgatcagaggctggaagctgttctacaactacgccctggtgatcttcgagatgaccaacctgaaggacatcggcctgtacaacctgagaaacatcaccagaggcgccatcagaatcgagaagaacgccgacctgtgctacctgagcaccgtggactggagcctgatcctggacgccgtgagcaacaactacatcgtgggcaacaagccccccaaggagtgcggcgacctgtgccccggcaccatggaggagaagcccatgtgcgagaagaccaccatcaacaacgagtacaactacagatgctggaccaccaacagatgccagaagatgtgccccagcacctgcggcaagagagcctgcaccgagaacaacgagtgctgccaccccgagtgcctgggcagctgcagcgcccccgacaacgacaccgcctgcgtggcctgcagacactactactacgccggcgtgtgcgtgcccgcctgcccccccaacacctacagattcgagggctggagatgcgtggacagagacttctgcgccaacatcctgagcgccgagagcagcgacagcgagggcttcgtgatccacgacggcgagtgcatgcaggagtgccccagcggcttcatcagaaacggcagccagagcatgtactgcatcccctgcgagggcccctgccccaaggtgtgcgaggaggagaagaagaccaagaccatcgacagcgtgaccagcgcccagatgctgcagggctgcaccatcttcaagggcaacctgctgatcaacatcagaagaggcaacaacatcgccagcgagctggagaacttcatgggcctgatcgaggtggtgaccggctacgtgaagatcagacacagccacgccctggtgagcctgagcttcctgaagaacctgagactgatcctgggcgaggagcagctggagggcaactacagcttctacgtgctggacaaccagaacctgcagcagctgtgggactgggaccacagaaacctgaccatcaaggccggcaagatgtacttcgccttcaaccccaagctgtgcgtgagcgagatctacagaatggaggaggtgaccggcaccaagggcagacagagcaagggcgacatcaacaccagaaacaacggcgagagagccagctgcgagagcgacgtgctgcacttcaccagcaccaccaccagcaagaacagaatcatcatcacctggcacagatacagaccccccgactacagagacctgatcagcttcaccgtgtactacaaggaggcccccttcaagaacgtgaccgagtacgacggccaggacgcctgcggcagcaacagctggaacatggtggacgtggacctgccccccaacaaggacgtggagcccggcatcctgctgcacggcctgaagccctggacccagtacgccgtgtacgtgaaggccgtgaccctgaccatggtggagaacgaccacatcagaggcgccaagagcgagatcctgtacatcagaaccaacgccagcgtgcccagcatccccctggacgtgctgagcgccagcaacagcagcagccagctgatcgtgaagtggaacccccccagcctgcccaacggcaacctgagctactacatcgtgagatggcagagacagccccaggacggctacctgtacagacacaactactgcagcaaggacaagatccccatcagaaagtacgccgacggcaccatcgacatcgaggaggtgaccgagaaccccaagaccgaggtgtgcggcggcgagaagggcccctgctgcgcctgccccaagaccgaggccgagaagcaggccgagaaggaggaggccgagtacagaaaggtgttcgagaacttcctgcacaacagcatcttcgtgcccagacccgagagaaagagaagagacgtgatgcaggtggccaacaccaccatgagcagcagaagcagaaacaccaccgccgccgacacctacaacatcaccgaccccgaggagctggagaccgagtaccccttcttcgagagcagagtggacaacaaggagagaaccgtgatcagcaacctgagacccttcaccctgtacagaatcgacatccacagctgcaaccacgaggccgagaagctgggctgcagcgccagcaacttcgtgttcgccagaaccatgcccgccgagggcgccgacgacatccccggccccgtgacctgggagcccagacccgagaacagcatcttcctgaagtggcccgagcccgagaaccccaacggcctgatcctgatgtacgagatcaagtacggcagccaggtggaggaccagagagagtgcgtgagcagacaggagtacagaaagtacggcggcgccaagctgaacagactgaaccccggcaactacaccgccagaatccaggccaccagcctgagcggcaacggcagctggaccgaccccgtgttcttctacgtgcaggccaagaccggctacgagaacttcatccacctgatcatcgccctgcccgtggccgtgctgctgatcgtgggcggcctggtgatcatgctgtacgtgttccacagaaagagaaacaacagcagactgggcaacggcgtgctgtacgccagcgtgaaccccgagtacttcagcgccgccgacgtgtacgtgcccgacgagtgggaggtggccagagagaagatcaccatgagcagagagctgggccagggcagcttcggcatggtgtacgagggcgtggccaagggcgtggtgaaggacgagcccgagaccagagtggccatcaagaccgtgaacgaggccgccagcatgagagagagaatcgagttcctgaacgaggccagcgtgatgaaggagttcaactgccaccacgtggtgagactgctgggcgtggtgagccagggccagcccaccctggtgatcatggagctgatgaccagaggcgacctgaagagctacctgagaagcctgagacccgagatggagaacaaccccgtgctggccccccccagcctgagcaagatgatccagatggccggcgagatcgccgacggcatggcctacctgaacgccaacaagttcgtgcacagagacctggccgccagaaactgcatggtggccgaggacttcaccgtgaagatcggcgacttcggcatgaccagagacatctacgagaccgactactacagaaagggcggcaagggcctgctgcccgtgagatggatgagccccgagagcctgaaggacggcgtgttcaccacctacagcgacgtgtggagcttcggcgtggtgctgtgggagatcgccaccctggccgagcagccctaccagggcctgagcaacgagcaggtgctgagattcgtgatggagggcggcctgctggacaagcccgacaactgccccgacatgctgttcgagctgatgagaatgtgctggcagtacaaccccaagatgagacccagcttcctggagatcatcagcagcatcaaggaggagatggagcccggcttcagagaggtgagcttctactacagcgaggagaacaagctgcccgagcccgaggagctggacctggagcccgagaacatggagagcgtgcccctggaccccagcgccagcagcagcagcctgcccctgcccgacagacacagcggccacaaggccgagaacggccccggccccggcgtgctggtgctgagagccagcttcgacgagagacagccctacgcccacatgaacggcggcagaaagaacgagagagccctgcccctgccccagagcagcacctgctag

SEQ ID NO: 16654 - DNA, 4104 bp, Artificial Sequence
  derived and/or modified sequence
atgaaatcagggtccggtggcgggtccccaaccagtctgtggggcctactgtttctcagtgctgcgttgtccttgtggccaacatcgggcgaaatttgcggtccaggaattgacattagaaacgattatcaacaactcaaacgcctggagaactgcaccgtgattgagggataccttcacatcctactgatcagcaaggctgaagactatagatcttatcgctttccaaagctgaccgtgataactgaatatctccttttgtttagggtggctggcttggaaagcctcggcgatctgttccctaatctgaccgtgattcggggctggaagctgttttacaactatgcactggtgatcttcgagatgactaatttaaaagacatagggctttacaacttacggaacataactcgtggcgcgatcaggatcgagaagaatgccgacctgtgctacttgtctactgtcgactggtcgttgatcttagacgcagtctctaacaattacatagttggcaacaaaccgccaaaggagtgcggcgacctctgccccggaactatggaggagaagccgatgtgtgagaaaacaacgatcaacaatgagtataactacagatgttggaccaccaataggtgtcagaagatgtgtccttctacatgcggtaaacgcgcctgcacagagaacaatgaatgctgtcatccagaatgtctgggctcctgctccgctcccgataacgacacagcttgtgttgcatgtcgacactattactacgcaggggtgtgcgtgcccgcctgcccccccaacacctatcggttcgagggctggaggtgtgtggatcgtgacttctgtgccaatatacttagtgccgagtcaagtgactccgagggtttcgtgatccacgatggtgaatgcatgcaagagtgcccctccggcttcatccggaacgggagtcagagcatgtactgtatcccctgcgagggcccctgccccaaagtgtgcgaggaagaaaagaagactaagactatagactcagttacaagcgctcagatgctccaggggtgtaccatttttaaagggaacctgttaatcaacattcggcggggaaataacattgcttccgagttggaaaactttatggggctcatcgaggtcgtgacaggctatgtgaaaatcaggcacagccatgctctcgtgtctttgagcttcttgaagaatctgcggttaatactcggtgaagagcaacttgaaggaaactactcattctacgtgctcgacaaccagaacctccagcagctgtgggactgggatcatcgtaatctcacaatcaaggcaggcaagatgtatttcgcctttaatcccaagctgtgcgtatccgagatctacagaatggaggaggtcaccggaactaagggccgccaatccaaaggtgacatcaacacaaggaataacggcgagcgagcctcttgtgagtccgacgtgctacattttactagcaccactacatctaaaaatcgcataattattacttggcatcgatatcggcctcccgattatcgcgatctgatctcctttacggtttattataaggaggccccatttaagaatgtcacagagtacgatggccaggatgcttgtggcagtaactcctggaatatggtagatgtagacttgcctcctaacaaagacgtggagcccgggatcctcctgcatgggctcaagccatggacccagtacgccgtttacgtcaaagctgtaacccttacaatggttgaaaatgatcacattagaggggctaagagcgagatactatacattcgcactaacgcctcagtaccatccatcccactggacgttctgtctgcttccaattcaagctcccagctgattgtgaagtggaaccctccctccttacccaacggcaacctatcctattatattgtaagatggcaaagacagcctcaagacggttatctttaccgtcataactactgttcaaaagacaagatacccataaggaagtacgcagacggtactatagatatagaggaggtgaccgaaaatccaaagacagaagtctgcggaggtgaaaagggcccttgctgtgcttgcccgaaaacggaggctgaaaagcaggctgaaaaggaggaggctgaataccgaaaggtcttcgaaaactttctccataattcaatttttgtgccccgtcccgaaagaaagagacgggacgtcatgcaagtagccaatacaacaatgtcctcccggtcacgaaacactacagcggcggacacctataatataaccgaccccgaggagctggagaccgagtatcccttcttcgaaagccgcgtcgataataaggagagaacagtaatttccaatttacgcccgtttaccctgtatagaatcgatattcactcatgtaaccacgaggcagagaagctggggtgttccgcctccaatttcgtctttgcacggacaatgcccgcggaaggcgccgacgacattccgggtcccgtgacttgggaacctagaccggagaattcaatttttctgaaatggcctgagccagagaaccctaacgggcttatcctgatgtacgagattaagtacggttcacaggttgaggaccagagggagtgtgtgagtaggcaggagtataggaagtacggaggagccaagttgaacaggcttaatccagggaactacacagctaggatccaggctacaagtctaagcgggaacggatcttggactgacccggttttcttctacgtgcaagcaaagactgggtacgagaattttatccacttaattatcgctctgccagtggccgtcctgctcatcgtgggcggcctggtgatcatgctgtatgtgttccaccgtaagcgaaacaacagtcgcttgggcaacggggtcttgtacgcttcagtcaacccagaatactttagtgccgcggatgtgtatgtccccgacgagtgggaggtggccagggagaaaatcacaatgtcccgggaactaggccagggtagcttcgggatggtttatgagggcgtcgctaagggggtggtaaaggacgagccagaaactcgagtcgccattaagacagtcaatgaggccgctagcatgcgggagcgcattgagtttctcaatgaagcctccgtcatgaaagagttcaattgtcatcacgtagtgagactgcttggggtggtgtcccaggggcaacctaccctcgtcatcatggagctgatgacgcggggagacctcaaatcctacctgcgctccctgcggccagagatggagaacaatccagtattagctcccccatccttgtctaagatgatacagatggctggggagatcgccgacgggatggcctacctgaacgccaacaagttcgtgcacagggacctggctgccaggaactgtatggtggcagaggacttcactgttaaaatcggtgactttggcatgaccagagacatttatgagactgattattaccgaaagggtggtaagggccttctgcccgtcaggtggatgtctcccgagtccctcaaggacggagtcttcaccacctatagcgatgtctggagtttcggagtagtgctgtgggaaatcgctacccttgcagagcaaccataccagggcctgagtaacgagcaagtcctcaggtttgtgatggagggcggactactggacaaacctgacaattgcccagacatgctcttcgagctgatgaggatgtgttggcagtataaccctaagatgaggccatcttttctcgaaatcatttcatccatcaaggaggaaatggagcccggcttccgcgaagtgtccttttactactctgaagagaataaattacccgaaccggaggagcttgacctcgagcctgagaacatggaatcagtcccgctggacccgagcgcttcatccagctcactgccgctgcccgataggcatagcggtcacaaagccgagaatggccccggacccggcgttcttgttttgcgggcaagctttgacgaacgtcagccttacgcccacatgaacggcggtcggaagaacgaaagggctttacccctccctcagagcagcacatgctag

SEQ ID NO: 16655 - DNA, 4104 bp, Artificial Sequence
  derived and/or modified sequence
atgaagagcggcagcggcggcggcagccccaccagcctgtggggcctgctcttcctgtctgctgccctgagcctgtggcccaccagcggggagatctgtggccctggcatcgacatcagaaatgactaccagcagctgaagaggctggagaactgcaccgtgattgagggctacctgcacatcctgctgatcagcaaggccgaggactaccgcagctaccgcttccccaagctgaccgtcatcacagagtacctgctgctcttccgggtggccggcctggagagcctgggggacctcttccccaacctgaccgtcatccggggctggaagctgttctacaactatgccctggtgatctttgagatgaccaacctgaaggacatcggcctgtacaacctgaggaacatcaccaggggggccatcagaattgagaagaatgctgacctgtgctacctgagcacagtggactggagcctcatcctggatgctgtgagcaacaactacatcgtgggcaacaagccacccaaggaatgtggggacctgtgccccggcaccatggaggagaagcccatgtgtgagaagaccaccatcaacaatgagtacaactaccgctgctggaccaccaaccgctgccagaagatgtgccccagcacctgtgggaagagggcctgcacagagaacaatgaatgctgccaccctgagtgcctgggcagctgcagcgccccagacaatgacacagcctgtgtggcctgccgccactactactatgccggcgtgtgtgtgcctgcctgcccccccaacacctacagatttgagggctggaggtgtgtggaccgggacttctgtgccaacatcctgtctgctgagagcagtgacagcgagggcttcgtcatccatgatggagagtgcatgcaggagtgccccagcggcttcatcagaaatggcagccagagcatgtactgcatcccctgtgagggcccctgccccaaggtgtgtgaggaggagaagaagaccaagaccattgattctgtgaccagcgcccagatgctgcagggctgcaccatcttcaagggcaacctgctgatcaacatcagaagaggcaacaacatcgccagcgagctggagaacttcatgggcctgattgaggtggtgacaggctacgtgaagatccgccacagccacgccctggtgtccctgtccttcctgaagaacctgcggctcatcctgggggaggagcagctggagggcaactacagcttctacgtgctggacaaccagaacctgcagcagctgtgggactgggaccacaggaacctgaccatcaaggccggcaagatgtactttgccttcaaccccaagctgtgtgtgtctgagatctacaggatggaggaggtgacaggcaccaagggccggcagagcaagggggacatcaacaccaggaacaacggggagcgggccagctgtgagagtgatgtgctgcacttcaccagcaccaccaccagcaagaaccgcatcatcatcacctggcaccgctaccggcccccagactacagagacctgatctccttcaccgtgtactacaaggaggcccccttcaagaatgtgacagaatatgatggccaggatgcctgtggcagcaacagctggaacatggtggatgtggacctgccccccaacaaggatgtggagcccggcatcctgctgcacggcctgaagccctggacccagtatgctgtgtatgtgaaggctgtgaccctgaccatggtggagaatgaccacatccggggggccaagtctgagatcctgtacatccgcaccaatgcctctgtgcccagcatccccctggatgtgctgagcgccagcaacagcagcagccagctgattgtgaagtggaacccccccagcctgcccaacggcaacctgagctactacatcgtgcgctggcagaggcagccccaggacggctacctgtaccgccacaactactgcagcaaggacaagatccccatcagaaaatatgcagatggcaccatcgacatcgaggaggtgacagagaaccccaagacagaggtgtgtggcggggagaagggcccctgctgtgcctgccccaagacagaagctgagaagcaggccgagaaggaggaggccgagtacaggaaggtgtttgagaacttcctgcacaacagcatctttgtgcccaggcctgagaggaagagaagagatgtgatgcaggtggccaacaccaccatgagcagccgcagcaggaacaccacagctgctgacacctacaacatcacagatcctgaggagctggagacagagtaccccttctttgagagccgggtggacaacaaggagaggacagtcatcagcaacctgcggcccttcaccctgtacagaattgacatccacagctgcaaccacgaggccgagaagctgggctgcagcgccagcaactttgtgtttgcccggaccatgcctgctgagggcgcagatgacatccctggccctgtgacctgggagcccaggccagaaaattccatcttcctgaagtggccagagcctgagaaccccaacggcctcatcctgatgtatgagatcaagtatggcagccaggtggaggaccagcgggagtgtgtgtcccggcaggagtacagaaaatatggaggagccaagctgaaccggctgaaccctggcaactacacagcccgcatccaggccaccagcctgtctggaaatggctcctggacagatcctgtgttcttctacgtgcaggccaagacaggctatgagaacttcatccacctgatcatcgccctgcctgtggccgtgctgctgattgtgggcggcctggtgatcatgctgtatgtgttccacaggaagaggaacaacagccggctgggcaatggagtgctgtatgcctctgtgaaccctgagtacttctctgctgctgatgtgtatgtgcctgatgagtgggaggtggcccgggagaagatcaccatgagccgggagctgggccagggcagctttggcatggtgtatgagggcgtggccaagggcgtggtgaaggatgagcctgagaccagggtggccatcaagacagtgaatgaggccgcctccatgagggagagaattgagttcctgaatgaggcctctgtgatgaaggagttcaactgccaccacgtggtgcggctgctgggcgtggtgtcccagggccagcccaccctggtgatcatggagctgatgaccaggggggacctgaagagctacctgcggagcctgcggcctgagatggagaacaaccctgtgctggccccacccagcctgagcaagatgatccagatggccggggagattgctgatggcatggcctacctgaatgccaacaagtttgtgcaccgggacctggccgccaggaactgcatggtggccgaggacttcaccgtgaagattggagactttggcatgacccgggacatctatgaaacagactactacaggaagggcggcaagggcctgctgcctgtgcgctggatgagccctgagagcctgaaggatggagtcttcaccacctacagtgatgtgtggagctttggagtggtgctgtgggagatcgccaccctggccgagcagccctaccagggcctgagcaatgagcaggtgctgcgctttgtgatggagggcggcctgctggacaagccagacaactgcccagacatgctgtttgagctgatgaggatgtgctggcagtacaaccccaagatgaggcccagcttcctggagatcatcagcagcatcaaggaggagatggagcccggcttccgggaggtgtccttctactacagcgaggagaacaagctgcctgagcctgaggagctggacctggagcctgagaacatggagagcgtgcccctggaccccagcgccagcagcagcagcctgcccctgcctgacagacattctggccacaaggccgagaatggacctggccctggggtgctggtgctgcgggccagctttgatgagcggcagccctatgcccacatgaatggaggcaggaagaatgaaagagccctgcccctgccccagagcagcacctgctag

SEQ ID NO: 16656 - DNA, 11803 bp, Artificial Sequence
  derived and/or modified sequence
gggaaggagctcgccgcggcggcggcggcgctgagggaggaggcggcggcgagcggagccaggaggaggaggaggagggggagccgctcattcattttgactccgcgtttctgcccctcgccggcctcgcctgtgacccggacttcggggcgatcttgcgaactgcgtcgcgccctcccgcggcggaagctcgggcgtccggccgcctcccgcgcggccagggccgggcttgtttttcctcgcctaggcagatttgggctttgccccctttctttgcagttttccccccttcctgcctctccgggtttgaaaatggaggccgacgacgccgacagcccgccccggcgcgcctcgggttcccgactccgccgagccctgggccgctgctgccggcgctgaggggccgccccgcgccgcccgccccgtccgcgcacccggagggccccggcggcgccgccttcggagtattgtttccttcgcccttgtttttggagggggagcgaagactgagtttgagacttgtttcctttcatttcctttttttcttttcttttcttttttttttttttttttttttttgagaaaggggaatttcatcccaaataaaaggaatgaagtctggctccggaggagggtccccgacctcgctgtgggggctcctgtttctctccgccgcgctctcgctctggccgacgagtggagaaatctgcgggccaggcatcgacatccgcaacgactatcagcagctgaagcgcctggagaactgcacggtgatcgagggctacctccacatcctgctcatctccaaggccgaggactaccgcagctaccgcttccccaagctcacggtcattaccgagtacttgctgctgttccgagtggctggcctcgagagcctcggagacctcttccccaacctcacggtcatccgcggctggaaactcttctacaactacgccctggtcatcttcgagatgaccaatctcaaggatattgggctttacaacctgaggaacattactcggggggccatcaggattgagaaaaatgctgacctctgttacctctccactgtggactggtccctgatcctggatgcggtgtccaataactacattgtggggaataagcccccaaaggaatgtggggacctgtgtccagggaccatggaggagaagccgatgtgtgagaagaccaccatcaacaatgagtacaactaccgctgctggaccacaaaccgctgccagaaaatgtgcccaagcacgtgtgggaagcgggcgtgcaccgagaacaatgagtgctgccaccccgagtgcctgggcagctgcagcgcgcctgacaacgacacggcctgtgtagcttgccgccactactactatgccggtgtctgtgtgcctgcctgcccgcccaacacctacaggtttgagggctggcgctgtgtggaccgtgacttctgcgccaacatcctcagcgccgagagcagcgactccgaggggtttgtgatccacgacggcgagtgcatgcaggagtgcccctcgggcttcatccgcaacggcagccagagcatgtactgcatcccttgtgaaggtccttgcccgaaggtctgtgaggaagaaaagaaaacaaagaccattgattctgttacttctgctcagatgctccaaggatgcaccatcttcaagggcaatttgctcattaacatccgacgggggaataacattgcttcagagctggagaacttcatggggctcatcgaggtggtgacgggctacgtgaagatccgccattctcatgccttggtctccttgtccttcctaaaaaaccttcgcctcatcctaggagaggagcagctagaagggaattactccttctacgtcctcgacaaccagaacttgcagcaactgtgggactgggaccaccgcaacctgaccatcaaagcagggaaaatgtactttgctttcaatcccaaattatgtgtttccgaaatttaccgcatggaggaagtgacggggactaaagggcgccaaagcaaaggggacataaacaccaggaacaacggggagagagcctcctgtgaaagtgacgtcctgcatttcacctccaccaccacgtcgaagaatcgcatcatcataacctggcaccggtaccggccccctgactacagggatctcatcagcttcaccgtttactacaaggaagcaccctttaagaatgtcacagagtatgatgggcaggatgcctgcggctccaacagctggaacatggtggacgtggacctcccgcccaacaaggacgtggagcccggcatcttactacatgggctgaagccctggactcagtacgccgtttacgtcaaggctgtgaccctcaccatggtggagaacgaccatatccgtggggccaagagtgagatcttgtacattcgcaccaatgcttcagttccttccattcccttggacgttctttcagcatcgaactcctcttctcagttaatcgtgaagtggaaccctccctctctgcccaacggcaacctgagttactacattgtgcgctggcagcggcagcctcaggacggctacctttaccggcacaattactgctccaaagacaaaatccccatcaggaagtatgccgacggcaccatcgacattgaggaggtcacagagaaccccaagactgaggtgtgtggtggggagaaagggccttgctgcgcctgccccaaaactgaagccgagaagcaggccgagaaggaggaggctgaataccgcaaagtctttgagaatttcctgcacaactccatcttcgtgcccagacctgaaaggaagcggagagatgtcatgcaagtggccaacaccaccatgtccagccgaagcaggaacaccacggccgcagacacctacaacatcaccgacccggaagagctggagacagagtaccctttctttgagagcagagtggataacaaggagagaactgtcatttctaaccttcggcctttcacattgtaccgcatcgatatccacagctgcaaccacgaggctgagaagctgggctgcagcgcctccaacttcgtctttgcaaggactatgcccgcagaaggagcagatgacattcctgggccagtgacctgggagccaaggcctgaaaactccatctttttaaagtggccggaacctgagaatcccaatggattgattctaatgtatgaaataaaatacggatcacaagttgaggatcagcgagaatgtgtgtccagacaggaatacaggaagtatggaggggccaagctaaaccggctaaacccggggaactacacagcccggattcaggccacatctctctctgggaatgggtcgtggacagatcctgtgttcttctatgtccaggccaaaacaggatatgaaaacttcatccatctgatcatcgctctgcccgtcgctgtcctgttgatcgtgggagggttggtgattatgctgtacgtcttccatagaaagagaaataacagcaggctggggaatggagtgctgtatgcctctgtgaacccggagtacttcagcgctgctgatgtgtacgttcctgatgagtgggaggtggctcgggagaagatcaccatgagccgggaacttgggcaggggtcgtttgggatggtctatgaaggagttgccaagggtgtggtgaaagatgaacctgaaaccagagtggccattaaaacagtgaacgaggccgcaagcatgcgtgagaggattgagtttctcaacgaagcttctgtgatgaaggagttcaattgtcaccatgtggtgcgattgctgggtgtggtgtcccaaggccagccaacactggtcatcatggaactgatgacacggggcgatctcaaaagttatctccggtctctgaggccagaaatggagaataatccagtcctagcacctccaagcctgagcaagatgattcagatggccggagagattgcagacggcatggcatacctcaacgccaataagttcgtccacagagaccttgctgcccggaattgcatggtagccgaagatttcacagtcaaaatcggagattttggtatgacgcgagatatctatgagacagactattaccggaaaggagggaaagggctgctgcccgtgcgctggatgtctcctgagtccctcaaggatggagtcttcaccacttactcggacgtctggtccttcggggtcgtcctctgggagatcgccacactggccgagcagccctaccagggcttgtccaacgagcaagtccttcgcttcgtcatggagggcggccttctggacaagccagacaactgtcctgacatgctgtttgaactgatgcgcatgtgctggcagtataaccccaagatgaggccttccttcctggagatcatcagcagcatcaaagaggagatggagcctggcttccgggaggtctccttctactacagcgaggagaacaagctgcccgagccggaggagctggacctggagccagagaacatggagagcgtccccctggacccctcggcctcctcgtcctccctgccactgcccgacagacactcaggacacaaggccgagaacggccccggccctggggtgctggtcctccgcgccagcttcgacgagagacagccttacgcccacatgaacgggggccgcaagaacgagcgggccttgccgctgccccagtcttcgacctgctgatccttggatcctgaatctgtgcaaacagtaacgtgtgcgcacgcgcagcggggtggggggggagagagagttttaacaatccattcacaagcctcctgtacctcagtggatcttcagaactgcccttgctgcccgcgggagacagcttctctgcagtaaaacacatttgggatgttccttttttcaatatgcaagcagctttttattccctgcccaaacccttaactgacatgggcctttaagaaccttaatgacaacacttaatagcaacagagcacttgagaaccagtctcctcactctgtccctgtccttccctgttctccctttctctctcctctctgcttcataacggaaaaataattgccacaagtccagctgggaagccctttttatcagtttgaggaagtggctgtccctgtggccccatccaaccactgtacacacccgcctgacaccgtgggtcattacaaaaaaacacgtggagatggaaatttttacctttatctttcacctttctagggacatgaaatttacaaagggccatcgttcatccaaggctgttaccattttaacgctgcctaattttgccaaaatcctgaactttctccctcatcggcccggcgctgattcctcgtgtccggaggcatgggtgagcatggcagctggttgctccatttgagagacacgctggcgacacactccgtccatccgactgcccctgctgtgctgctcaaggccacaggcacacaggtctcattgcttctgactagattattatttgggggaactggacacaataggtctttctctcagtgaaggtggggagaagctgaaccggcttccctgccctgcctccccagccccctgcccaacccccaagaatctggtggccatgggccccgaagcagcctggcggacaggcttggagtcaaggggccccatgcctgcttctctcccagccccagctcccccgcccgcccccaaggacacagatgggaaggggtttccagggactcagccccactgttgatgcaggtttgcaaggaaagaaattcaaacaccacaacagcagtaagaagaaaagcagtcaatggattcaagcattctaagctttgttgacattttctctgttcctaggacttcttcatgggtcttacagttctatgttagaccatgaaacatttgcatacacatcgtctttaatgtcacttttataacttttttacggttcagatattcatctatacgtctgtacagaaaaaaaaaagctgctattttttttgttcttgatctttgtggatttaatctatgaaaaccttcaggtccaccctctcccctttctgctcactccaagaaacttcttatgctttgtactagagtgcgtgactttcttcctcttttcccggtaatggatacttctatcacataatttgccatgaactgttggatgcctttttataaatacatcccccatccctgctcccacctgcccctttagttgttttctaacccgtaggctctctgggcacgaggcagaaagcaggccgggcacccatcctgagagggccgcgctcctctccccagcctgccctcacagcattggagcctgttacagtgcaagacatgatacaaactcaggtcagaaaaacaaaggttaaatatttcacacgtctttgttcagtgtttccactcaccgtggttgagaagcctcaccctctctttcccttgcctttgcttaggttgtgacacacatatatatatatttttttaattcttgggtacaacagcagtgttaaccgcagacactaggcatttggattactatttttcttaatggctatttaatccttccatcccacgaaaaacagctgctgagtccaagggagcagcagagcgtggtccggcagggcctgttgtggccctcgccacccccctcaccggaccgactgacctgtctttggaaccagaacatcccaagggaactccttcgcactggcgttgagtgggaccccgggatccaggctggcccagggcggcaccctcagggctgtgcccgctggagtgctaggtggaggcagcacagacgccacggtggcccaagagcccctttgcttcttgctgggggaccagggctgtggtgctggcccactttccctcggccaggaatccaggtccttggggcccaggggtcttgtcttgtttcatttttagcacttctcaccagagagatgacagcacaagagttgcttctgggatagaaatgtttaggagtaagaacaaagctgggatacggtgattgctagttgtgactgaagattcaacacagaaaagaaagtttatacggcttttttgctggtcagcagtttgtcccactgctttctctagtctctatcccatagcgtgttccctttaaaaaaaaaaaaaaggtattatatgtaggagttttcttttaatttattttgtgataaattaccagtttcaatcactgtagaaaagccccattatgaatttaaatttcaaggaaagggtgtgtgtgtgtgtatgtgtggggtgtgtgtgtgtgagagtgatgggacagttcttgattttttgggttttttttcccccaaacatttatctacctcactcttattttttatatgtgtatatagacaaaagaatacatctcacctttctcagcacctgacaataggccgttgatactggtaacctcatccacgccacaggcgccacacccaggtgatgcagggggaagccaggctgtattccggggtcaaagcaacactaactcacctctctgctcatttcagacagcttgcctttttctgagatgtcctgttttgtgttgctttttttgttttgttttctatcttggtttccaccaaggtgttagatttctcctcctcctagccaggtggccctgtgaggccaacgagggcaccagagcacacctgggggagccaccaggctgtccctggctggttgtctttggaacaaactgcttctgtgcagatggaatgaccaacacatttcgtccttaagagagcagtggttcctcaggttctgaggagaggaaggtgtccaggcagcaccatctctgtgcgaatccccagggtaaaggcgtggggcattgggtttgctccccttgctgctgctccatccctgcaggaggctcgcgctgaggcaggaccgtgcggccatggctgctgcattcattgagcacaaaggtgcagctgcagcagcagctggagagcaagagtcacccagcctgtgcgccagaatgcagaggctcctgacctcacagccagtccctgatagaacacacgcaggagcagagtcccctccccctccaggctgccctctcaacttctccctcacctccttccctaggggtagacagagatgtaccaaaccttccggctggaaagcccagtggccggcgccgaggctcgtggcgtcacgccccccccgccagggctgtacctccgtctccctggtcctgctgctcacaggacagacggctcgctcccctcttccagcagctgctcttacaggcactgatgatttcgctgggaagtgtggcgggcagctttgcctaagcgtggatggctcctcggcaattccagcctaagtgaaggcgctcaggagcctcctgctggaacgcgacccatctctcccaggaccccggggatcttaaggtcattgagaaatactgttggatcagggttttgttcttccacactgtaggtgaccccttggaataacggcctctcctctcgtgcacatacctaccggtttccacaactggatttctacagatcattcagctggttataagggttttgtttaaactgtccgagttactgatgtcattttgtttttgttttatgtaggtagcttttaagtagaaaacactaacagtgtagtgcccatcatagcaaatgcttcagaaacacctcaataaaagagaaaacttggcttgtgtgatggtgcagtcactttactggaccaacccacccaccttgactataccaaggcatcatctatccacagttctagcctaacttcatgctgatttctctgcctcttgatttttctctgtgtgttccaaataatcttaagctgagttgtggcattttccatgcaacctccttctgccagcagctcacactgcttgaagtcatatgaaccactgaggcacatcatggaattgatgtgagcattaagacgttctcccacacagcccttccctgaggcagcaggagctggtgtgtactggagacactgttgaacttgatcaagacccagaccaccccaggtctccttcgtgggatgtcatgacgtttgacatacctttggaacgagcctcctccttggaagatggaagaccgtgttcgtggccgacctggcctctcctggcctgtttcttaagatgcggagtcacatttcaatggtacgaaaagtggcttcgtaaaatagaagagcagtcactgtggaactaccaaatggcgagatgctcggtgcacattggggtgctttgggataaaagatttatgagccaactattctctggcaccagattctaggccagtttgttccactgaagcttttcccacagcagtccacctctgcaggctggcagccgaatggcttgccagtggctctgtggcaagatcacactgagatcgatgggtgagaaggctaggatgcttgtctagtgttcttagctgtcacgttggctccttccagggtggccagacggtgttggccactcccttctaaaacacaggcgccctcctggtgacagtgacccgccgtggtatgccttggcccattccagcagtcccagttatgcatttcaagtttggggtttgttcttttcgttaatgttcctctgtgttgtcagctgtcttcatttcctgggctaagcagcattgggagatgtggaccagagatccactccttaagaaccagtggcgaaagacactttctttcttcactctgaagtagctggtggtacaaatgagaacttcaagagaggatgttatttagactgaacctctgttgccagagatgctgaagatacagaccttggacaggtcagagggtttcatttttggccttcatcttagatgactggttgcgtcatttggagaagtgagtgctccttgatggtggaatgaccgggtggtgggtacagaaccattgtcacagggatcctggcacagagaagagttacgagcagcagggtgcagggcttggaaggaatgtgggcaaggttttgaacttgattgttcttgaagctatcagaccacatcgaggctcagcagtcatccgtgggcatttggtttcaacaaagaaacctaacatcctactctggaaactgatctcggagttaaggcgaattgttcaagaacacaaactacatcgcactcgtcagttgtcagttctggggcatgactttagcgttttgtttctgcgagaacataacgatcactcatttttatgtcccacgtgtgtgtgtccgcatctttctggtcaacattgttttaactagtcactcattagcgttttcaatagggctcttaagtccagtagattacgggtagtcagttgacgaagatctggtttacaagaactaattaaatgtttcattgcatttttgtaagaacagaataattttataaaatgtttgtagtttataattgccgaaaataatttaaagacactttttttttctctgtgtgtgcaaatgtgtgtttgtgatccattttttttttttttttttaggacacctgtttactagctagctttacaatatgccaaaaaaggatttctccctgaccccatccgtggttcaccctcttttccccccatgctttttgccctagtttataacaaaggaatgatgatgatttaaaaagtagttctgtatcttcagtatcttggtcttccagaaccctctggttgggaaggggatcattttttactggtcatttccctttggagtgtagctactttaacagatggaaagaacctcattggccatggaaacagccgaggtgttggagcccagcagtgcatggcaccgttcggcatctggcttgattggtctggctgccgtcattgtcagcacagtgccatggacatgggaagacttgactgcacagccaatggttttcatgatgattacagcatacacagtgatcacataaacgatgacagctatggggcacacaggccatttgcttacatgcctcgtatcatgactgattactgctttgttagaacacagaagagaccctattttatttaaggcagaaccccgaagatacgtatttccaatacagaaaagaatttttaataaaaactataacatacacaaaaattggttttaaagttgactccacttcctctaactccagtggattgttggccatgtctccccaactccacaatatctctatcatgggaaacacctggggtttttgcgctacataggagaaagatctggaaactatttgggttttgttttcaacttttcatttggatgtttggcgttgcacacacacatccaccggtggaagagacgcccggtgaaaacacctgtctgctttctaagccagtgaggttgaggtgagaggtttgccagagtttgtctacctctgggtatccctttgtctgggataaaaaaaatcaaaccagaaggcgggatggaatggatgcaccgcaaataatgcattttctgagttttcttgttaaaaaaaaatttttttaagtaagaaaaaaaaaggtaataacatggccaatttgttacataaaatgactttctgtgtataaattattcctaaaaaatcctgtttatataaaaaatcagtagatgaaaaaaatttcaaaatgtttttgtatattctgttgtaagaatttattcctgttattgcgatatactctggattctttacataatggaaaaaagaaactgtctattttgaatggctgaagctaaggcaacgttagtttctcttactctgcttttttctagtaaagtactacatggtttaagttaaataaaataattctgtatgca

SEQ ID NO: 16657 - DNA, 4104 bp, Artificial Sequence
  derived and/or modified sequence
atgaagagcggcagcggcggcggcagccccaccagcctgtggggcctgctttttctgtctgcagcgctcagtctctggccgacctcgggggagatctgtggcccaggaatcgatattaggaacgactaccaacagctgaagcgcctcgagaactgcacagttatcgaaggctatctgcacattttgttaatatccaaggccgaggattataggagttatagatttcctaaactcaccgtgattacggagtatctgcttctgttccgagtcgcaggtttagagtcactgggtgatctcttccctaatctgaccgtgatccgaggttggaaacttttttataattacgcactggttatcttcgaaatgacaaatctgaaggatatcgggttgtacaatttaagaaacattacgcggggtgctatcagaattgagaaaaacgcagatctgtgttacttatcaactgttgattggagtctcatcctggacgccgtgtcgaacaactatattgtaggcaacaagcctccaaaggaatgcggggatttatgccccggcactatggaggaaaaaccgatgtgtgagaagacaaccattaataatgagtataattataggtgctggacaacaaatcggtgtcagaagatgtgtccatcaacgtgcggcaaaagagcatgcaccgagaacaacgagtgctgccatcccgaatgtttggggtcctgtagcgcccctgacaatgacacagcctgtgtcgcctgtcgccactactactacgcaggggtctgtgtgcctgcatgcccccccaatacgtatagatttgaaggatggcggtgcgtggatagggacttctgcgcaaacatactgagcgccgagagcagcgattccgaaggattcgttatccacgacggagaatgtatgcaggagtgtccatctggtttcattaggaacggctctcagtccatgtactgtatcccatgcgaggggccttgccccaaggtctgtgaagaagagaaaaagactaagactattgacagcgtaacctcagcacagatgctgcaggggtgcacaatatttaaggggaatctcttgatcaacatccgccgtggaaataacatcgcttcagagctggagaactttatgggtttgatagaagtggttactggctacgttaagataagacattcacacgcgcttgtgagtctatcattcctgaagaatctccggctgattctcggcgaagagcagctggagggcaactacagcttttacgtactcgacaaccagaatttacaacagttatgggactgggaccatcgaaatttaacaataaaagcaggcaaaatgtactttgcattcaatcctaagctgtgcgtttcggagatttatcggatggaggaagtcaccggcactaagggtcggcagagcaagggcgacattaatacaagaaataatggcgaacgagcctcgtgtgagtccgatgtgttgcatttcacctccactaccaccagcaaaaatcgtattatcattacgtggcaccggtacagaccaccggattaccgggacttaatcagttttaccgtgtattacaaggaagcccctttcaagaatgtaaccgagtatgatggccaagatgcttgtgggagtaattcttggaatatggtagatgtggacctgcccccaaacaaggatgttgagcccggtatccttctgcacggtctcaaaccttggacccagtacgcagtttacgtcaaggccgttactctcacaatggtggagaatgaccacatccggggtgcaaagtccgagattttgtatatcagaacgaatgcatctgtccctagtattccactcgacgtgctgtccgcgagcaactccagtagtcagctgattgtgaaatggaaccccccttcactcccgaacggaaacttgagttactatatcgttcggtggcagaggcagccacaggatggctatctctatcgccacaattattgctccaaagacaaaatccccatacgcaaatacgccgacggcacgattgatattgaggaggtgactgagaaccccaaaaccgaggtctgcggcggggaaaaaggcccatgttgcgcatgtccaaaaaccgaggcagagaagcaggccgaaaaggaggaggcggaatatagaaaagttttcgagaacttccttcataactccatttttgtgcccagacccgagagaaagagaagggacgtaatgcaagtggccaacaccacaatgagctcacgtagccgaaacaccacagcagctgacacttataacattaccgaccccgaggagcttgagaccgaatatcctttcttcgagtcccgagtcgacaacaaagagagaaccgtcatcagtaacctgaggcccttcactttgtacagaatcgacattcactcttgtaaccacgaggctgaaaagctcggctgttccgccagcaatttcgtttttgcccgaaccatgccagccgagggagctgatgatatacctggtcctgtaacatgggagcccagacccgagaatagcatcttcctcaaatggcccgaacccgaaaatcccaatggcctgatactcatgtacgagattaagtacggaagccaagttgaggatcagcgagagtgtgtttcacgccaagagtacaggaaatatggaggggccaagctgaacaggctcaaccctggtaactatactgccagaattcaagcaaccagtcttagtggcaacggctcttggaccgaccccgtctttttctatgttcaggcaaagaccggatacgaaaacttcatacatctgattatcgccttgccggtggccgttctgctcatagtgggcggcctggtaatcatgctctacgtcttccaccggaaacgcaataattcccgcctgggcaatggtgttttatacgcctctgtgaatccagaatacttcagcgctgctgacgtttacgtgcccgatgagtgggaggtcgctcgggagaagataacaatgtcaagagaactggggcagggaagctttggaatggtctacgaaggtgttgctaaaggggtggtgaaggacgaacctgagacgagagtggcaatcaaaacagtcaatgaagcagccagcatgcgagagagaattgagtttctgaacgaggcctccgtaatgaaggagtttaattgccatcacgtcgtccgactgctgggcgttgtgtcacaggggcagcctacactggttataatggagctgatgactaggggggatctgaagagctacctcagaagcttaaggcccgagatggaaaacaaccctgtgctcgcccccccaagcttgtccaaaatgatacaaatggcaggagagatcgcagacggaatggcctacctaaacgcaaataagtttgtgcaccgggatctggccgcacgaaattgtatggtagctgaagatttcacagtcaagatcggcgactttgggatgactcgggatatctacgaaactgattattacaggaagggggggaaaggtctactgccggtgcgatggatgagccctgaaagcctaaaggacggcgtgttcacaacgtacagcgatgtgtggtcgttcggagtggtgctgtgggagatagccacactagctgagcagccatatcagggactgagcaacgaacaagttcttcggttcgtgatggagggggggttacttgataagccggataattgcccagatatgctgtttgagttaatgcgcatgtgttggcagtacaaccctaagatgagaccgtctttcctagaaattatcagctcaattaaggaggagatggaacctgggtttcgtgaagtgagcttttattattctgaagagaacaaactgccagagcccgaagaacttgacttggagccagaaaacatggagtcagtgcccctagacccctccgcaagctcttcctccttacctttaccggataggcactccgggcataaagcggaaaacggaccaggacccggggtccttgttctgcgggcttcgtttgatgaacgacagccatacgcccatatgaatggaggcagaaagaacgagagagcgctgcctttgcctcagtcctctacatgctag

SEQ ID NO: 16658 - DNA, 4103 bp, Artificial Sequence
  derived and/or modified sequence
atgaaaagcggcagcggaggcggttctcccacaagcctctgggggttattatttctgtcggccgctctgtctctctggccaaccagcggtgaaatatgtgggcctggtatcgacattaggaatgattaccaacagcttaaaagactcgaaaactgtacagtaatagaaggatacttacatattctgttgattagcaaggctgaggactacagaagctaccgttttccaaagctgacggtgatcaccgaatacctactccttttccgagtggcaggacttgagtccctgggggatctgttccccaaccttactgttattagagggtggaaactgttttacaattacgccctcgtgattttcgaaatgacaaacctgaaagatatcggcctgtacaacttaagaaatatcactcgcggtgccataaggattgaaaaaaacgcagatctctgttacctgagcactgtcgattggagcctaatcctcgacgccgtgtccaataattacatcgtgggtaacaagccgccaaaggagtgcggggacctgtgtccaggaacaatggaagaaaagcccatgtgcgagaagactaccatcaataatgaatataattatcgttgctggaccacaaaccggtgccagaagatgtgtcctagcacttgcggcaaaagggcgtgcactgagaacaatgaatgctgccaccctgaatgcctgggcagctgctcagcaccagataacgatacagcttgtgtcgcttgcagacactactattacgccggtgtgtgcgttcccgcttgtccccctaacacctaccggttcgaaggatggaggtgcgtggacagggacttttgtgctaacatccttagtgctgaatcctcagactccgaaggatttgtgatccacgatggagagtgtatgcaggaatgtccaagcggcttcatccgcaatggttcccagtctatgtactgtataccttgcgagggcccatgcccgaaggtatgcgaggaagaaaaaaaaacgaaaactattgactcggtgacatccgcccagatgctgcagggttgcaccatcttcaaaggcaacctgttgatcaacatccggagaggcaacaatatcgcttccgagttagaaaactttatgggcctcatcgaagtcgtcactgggtacgtcaagattagacactcccacgccctggtcagcctcagttttttgaaaaatctgagactcatccttggcgaggaacaattagagggtaattattctttctatgtcctggataatcaaaacctacaacagctgtgggactgggaccacagaaacctcaccattaaagccggaaagatgtattttgccttcaacccgaagctctgcgtctcagaaatctaccgcatggaggaagttacaggaacaaagggcagacagtccaaaggcgacataaatacgagaaataatggcgaaagggcatcttgcgaatcggacgttctccactttacaagcaccaccacaagtaagaacaggatcataattacctggcacaggtatcggccaccagattatagggatcttatttccttcactgtttactacaaggaagcacccttcaagaatgtgactgaatatgacggccaggatgcatgtgggtccaattcatggaacatggtggacgtagatctgccgcctaataaggacgttgagcctgggatcctgttgcacggcctgaaaccgtggacccagtacgcagtgtacgtgaaagccgttaccctgaccatggtggaaaatgaccatataagaggcgcaaagtctgaaatcctctacatcagaaccaatgcctcagtccccagcattcccctggatgtgctctccgcttcaaacagctcgtcacaactgatcgtgaagtggaatccgccaagtctcccaaacggaaacctctcctactacatcgtccgctggcagagacagcctcaagatggatatctgtacaggcataactactgctctaaagataaaatccctattagaaaatacgccgacggcactattgacattgaagaggtgacggagaatcccaagacagaggtctgcggaggtgaaaaggggccatgctgcgcctgcccaaaaacagaggcagaaaagcaggccgagaaagaagaagctgaataccggaaggtctttgaaaattttttacacaattctattttcgttccgcgtcccgagcggaagcggagagatgtgatgcaggtggccaacaccactatgtccagtcggtctagaaacaccactgccgctgacacatacaacatcaccgaccccgaggagctggagactgaataccccttttttgaatctagagtggataataaagaacgtaccgtgatatctaatctgagaccattcactctttatcggatcgatattcattcctgtaaccacgaagcggaaaagttggggtgctccgcatccaatttcgtgtttgcacgaacaatgcccgcagaaggggctgatgatattccaggtcccgttacctgggagccaagaccggagaattcaatattcttaaaatggcccgagcctgagaaccccaacggtctgatcctaatgtatgagatcaaatacggaagtcaggtcgaggatcagagggagtgcgtgagtcgccaggagtatcggaaatacgggggagctaaactgaataggctcaaccctggcaactacacggctaggatacaggccacaagcctttcaggcaatgggagttggactgatcccgtctttttttatgtgcaggcaaaaacaggatatgaaaattttattcacctcatcatagcgctgccagtagcggtgttgcttattgttggcggtctagtcatcatgctgtacgtctttcatagaaagaggaacaatagccggctgggaaatggcgtcctatatgcctcagttaatcctgagtactttagcgcagctgatgtgtacgtgcccgacgagtgggaagtggcaagggagaaaatcacaatgtccagagagttgggacagggatcattcggcatggtgtatgagggggtggccaagggtgttgtgaaagacgaacctgagaccagagtggccattaaaacagtgaatgaggctgcctctatgcgggaacggattgaattcctgaacgaggcctctgtgatgaaggagttcaactgccaccacgttgttcgccttctcggtgttgttagccaggggcagcctacactcgtaatcatggagctgatgacacgcggagaccttaaaagctaccttcggtcacttcgccctgaaatggaaaataatccagttctggcgcctccttctcttagtaagatgatacagatggccggagagatcgccgatgggatggcatacctcaatgctaataaatttgtccaccgggatctcgctgcgaggaattgcatggtggcagaggattttaccgtgaaaattggcgatttcggtatgacgagagatatctatgaaactgactattacagaaagggcggtaaggggctcctgccagtcagatggatgtcaccagagagcttgaaagatggagtttttactacatatagtgatgtatggagttttggcgtggtactgtgggaaattgcgaccctcgccgagcagccatatcagggactgtctaatgaacaagtgctgcggtttgttatggaggggggtctgcttgataagccagacaattgtccagatatgctattcgaactgatgcgcatgtgctggcagtataaccctaagatgcggccatcatttttagaaatcatttcgagtattaaggaagagatggaacccggattcagagaggtgagcttctattattccgaagagaacaaacttcccgagccagaagagctcgatcttgaacctgaaaatatggagagtgtgcctttggatccatctgcctcctcctcgtccttacccctgcctgaccgacattccggtcacaaggccgagaatggccctggacccggagtgcttgtcctgcgcgctagcttcgacgaaagacagccctatgctcatatgaatggaggcagaaaaaatgaacgggcactgcctctgccccagtccagcacgtgtta

SEQ ID NO: 16659 - protein, 2491 aa, Artificial Sequence
  derived and/or modified sequence
MGAAAGRSPHLGPAPARRPQRSLLLLQLLLLVAAPGSTQAQAAPFPELCSYTWEAVDTKNNVLYKINICGSVDIVQCGPSSAVCMHDLKTRTYHSVGDSVLRSATRSLLEFNTTVSCDQQGTNHRVQSSIAFLCGKTLGTPEFVTATECVHYFEWRTTAACKKDIFKANKEVPCYVFDEELRKHDLNPLIKLSGAYLVDDSDPDTSLFINVCRDIDTLRDPGSQLRACPPGTAACLVRGHQAFDVGQPRDGLKLVRKDRLVLSYVREEAGKLDFCDGHSPAVTITFVCPSERREGTIPKLTAKSNCRYEIEWITEYACHRDYLESKTCSLSGEQQDVSIDLTPLAQSGGSSYISDGKEYLFYLNVCGETEIQFCNKKQAAVCQVKKSDTSQVKAAGRYHNQTLRYSDGDLTLIYFGGDECSSGFQRMSVINFECNKTAGNDGKGTPVFTGEVDCTYFFTWDTEYACVKEKEDLLCGATDGKKRYDLSALVRHAEPEQNWEAVDGSQTETEKKHFFINICHRVLQEGKARGCPEDAAVCAVDKNGSKNLGKFISSPMKEKGNIQLSYSDGDDCGHGKKIKTNITLVCKPGDLESAPVLRTSGEGGCFYEFEWHTAAACVLSKTEGENCTVFDSQAGFSFDLSPLTKKNGAYKVETKKYDFYINVCGPVSVSPCQPDSGACQVAKSDEKTWNLGLSNAKLSYYDGMIQLNYRGGTPYNNERHTPRATLITFLCDRDAGVGFPEYQEEDNSTYNFRWYTSYACPEEPLECVVTDPSTLEQYDLSSLAKSEGGLGGNWYAMDNSGEHVTWRKYYINVCRPLNPVPGCNRYASACQMKYEKDQGSFTEVVSISNLGMAKTGPVVEDSGSLLLEYVNGSACTTSDGRQTTYTTRIHLVCSRGRLNSHPIFSLNWECVVSFLWNTEAACPIQTTTDTDQACSIRDPNSGFVFNLNPLNSSQGYNVSGIGKIFMFNVCGTMPVCGTILGKPASGCEAETQTEELKNWKPARPVGIEKSLQLSTEGFITLTYKGPLSAKGTADAFIVRFVCNDDVYSGPLKFLHQDIDSGQGIRNTYFEFETALACVPSPVDCQVTDLAGNEYDLTGLSTVRKPWTAVDTSVDGRKRTFYLSVCNPLPYIPGCQGSAVGSCLVSEGNSWNLGVVQMSPQAAANGSLSIMYVNGDKCGNQRFSTRITFECAQISGSPAFQLQDGCEYVFIWRTVEACPVVRVEGDNCEVKDPRHGNLYDLKPLGLNDTIVSAGEYTYYFRVCGKLSSDVCPTSDKSKVVSSCQEKREPQGFHKVAGLLTQKLTYENGLLKMNFTGGDTCHKVYQRSTAIFFYCDRGTQRPVFLKETSDCSYLFEWRTQYACPPFDLTECSFKDGAGNSFDLSSLSRYSDNWEAITGTGDPEHYLINVCKSLAPQAGTEPCPPEAAACLLGGSKPVNLGRVRDGPQWRDGIIVLKYVDGDLCPDGIRKKSTTIRFTCSESQVNSRPMFISAVEDCEYTFAWPTATACPMKSNEHDDCQVTNPSTGHLFDLSSLSGRAGFTAAYSEKGLVYMSICGENENCPPGVGACFGQTRISVGKANKRLRYVDQVLQLVYKDGSPCPSKSGLSYKSVISFVCRPEARPTNRPMLISLDKQTCTLFFSWHTPLACEQATECSVRNGSSIVDLSPLIHRTGGYEAYDESEDDASDTNPDFYINICQPLNPMHGVPCPAGAAVCKVPIDGPPIDIGRVAGPPILNPIANEIYLNFESSTPCLADKHFNYTSLIAFHCKRGVSMGTPKLLRTSECDFVFEWETPVVCPDEVRMDGCTLTDEQLLYSFNLSSLSTSTFKVTRDSRTYSVGVCTFAVGPEQGGCKDGGVCLLSGTKGASFGRLQSMKLDYRHQDEAVVLSYVNGDRCPPETDDGVPCVFPFIFNGKSYEECIIESRAKLWCSTTADYDRDHEWGFCRHSNSYRTSSIIFKCDEDEDIGRPQVFSEVRGCDVTFEWKTKVVCPPKKLECKFVQKHKTYDLRLLSSLTGSWSLVHNGVSYYINLCQKIYKGPLGCSERASICRRTTTGDVQVLGLVHTQKLGVIGDKVVVTYSKGYPCGGNKTASSVIELTCTKTVGRPAFKRFDIDSCTYYFSWDSRAACAVKPQEVQMVNGTITNPINGKSFSLGDIYFKLFRASGDMRTNGDNYLYEIQLSSITSSRNPACSGANICQVKPNDQHFSRKVGTSDKTKYYLQDGDLDVVFASSSKCGKDKTKSVSSTIFFHCDPLVEDGIPEFSHETADCQYLFSWYTSAVCPLGVGFDSENPGDDGQMHKGLSERSQAVGAVLSLLLVALTCCLLALLLYKKERRETVISKLTTCCRRSSNVSYKYSKVNKEEETDENETEWLMEEIQLPPPRQGKEGQENGHITTKSVKALSSLHGDDQDSEDEVLTIPEVKVHSGRGAGAESSHPVRNAQSNALQEREDDRVGLVRGEKARKGKSSSAQQKTVSSTKLVSFHDDSDEDLLHI

SEQ ID NO: 16660 - DNA, 7476 bp, Artificial Sequence
  derived and/or modified sequence
atgggggcagccgctggcaggtctcctcacctgggaccagcaccagctcggcgaccacagaggagcctgctcctgcttcagttgcttctgcttgtcgccgcacccggatctactcaggctcaggcagccccatttccggaactgtgctcctatacgtgggaagcagtggacacgaagaataatgtgctttacaaaattaatatctgcggatcagtggacatcgtacagtgcgggccctcctctgcagtctgtatgcacgacttaaagacgaggacgtaccactccgtcggcgactccgtattaaggagcgctacccgaagtcttctcgaattcaatactaccgtgagctgcgatcaacagggcacaaatcaccgcgtgcagagctccattgccttcctgtgcggcaaaacgctgggcacccctgaattcgtcacagccaccgagtgtgtgcactatttcgagtggaggaccaccgcagcatgcaaaaaagatatttttaaagccaacaaggaggtgccctgctacgtgtttgatgaagagctgagaaagcatgacctgaacccactgattaaactgtcgggagcatatctcgttgatgacagtgacccagacacgagcctcttcattaacgtttgtagggacatcgatacgctgcgggatccaggcagccagctgcgcgcttgcccccccgggactgcggcgtgcctggtaagaggccaccaggcatttgatgtcggtcagccaagggacgggttgaaacttgtgagaaaggatagacttgtgctcagctacgtacgcgaggaagctgggaagcttgacttctgcgatggccattcgcccgccgtcacaattaccttcgtgtgtccttctgaacgaagggaaggaaccatccctaagttaaccgccaagtccaactgtcgttacgagatcgagtggattactgaatatgcttgccatagagattacctagaatcaaagacatgtagtctgagcggagaacagcaggacgtctctatcgacttgaccccattggcccagtccggaggctcaagctatataagcgatggcaaagaatacctgttttaccttaacgtttgcggtgagaccgaaatacagttttgtaacaagaagcaggctgccgtgtgtcaagtaaagaagagcgacactagtcaagtgaaagcagcgggccgttatcataatcagacgctgcggtactctgacggtgatctgaccctcatctatttcggaggtgatgaatgttcttcagggttccagcggatgtcagtgattaacttcgagtgcaacaaaaccgccgggaatgacggtaaggggaccccggttttcactggggaggttgactgtacctactttttcacatgggacactgagtatgcctgtgtgaaggagaaggaagaccttctgtgtggcgctacagatggcaagaagcgctatgacctgtccgcccttgtacgccacgctgaaccagagcagaactgggaggctgtggatggaagtcagaccgaaactgagaagaagcacttctttatcaatatatgccaccgggtcctgcaagaggggaaagctaggggctgccctgaggatgccgcagtgtgcgcggtagataagaacggctctaagaatctggggaagttcataagcagtcccatgaaagaaaaggggaacatccagctgtcatactcagatggcgacgactgtgggcatggcaagaagatcaagactaacattacactcgtctgcaagcccggggatctggaatcagccccagtcctacgaacttcaggggagggaggatgtttctacgagttcgagtggcatacagctgccgcttgtgttttgtcaaaaacggaaggagagaattgcactgtctttgactctcaggcagggttctcattcgacctttctccactgactaaaaaaaatggagcttacaaggtcgagacaaaaaagtacgacttctatatcaatgtatgtggtcctgtgtctgtgtctccttgccagcccgactccggtgcttgtcaagtcgccaaatcagacgaaaagacatggaatttgggactgtctaatgccaaactctcttactatgatggcatgattcagcttaactatcgcgggggcacgccttacaacaatgagcggcacacacctcgggccactctcatcacatttctttgcgaccgggacgctggggtgggatttcccgaataccaggaggaggacaactctacctataacttcaggtggtacacatcctatgcgtgtcctgaggagccactcgaatgtgtcgtcacagatccgtcaacactcgagcagtatgatttatcttctctcgccaagagtgagggagggctgggaggcaactggtacgcaatggataattccggagagcatgtgacttggcggaaatattatattaatgtgtgccggccgcttaatcccgtgcccggatgcaatcgttatgcatcagcatgtcagatgaaatacgagaaggaccagggctcctttacagaagttgtgagcattagtaacttagggatggccaagactggccccgtggtggaggacagcgggtcgctgctgttagaatacgtcaacggtagtgcctgcacgacaagcgatggcaggcagaccacatataccacgcgaatccacctggtttgctccagaggaaggctcaattcccatccgatcttctcgctaaactgggagtgcgtcgttagcttcctgtggaataccgaggcagcatgtccaatacaaaccactacagacactgatcaagcctgttcaatccgggacccaaactcgggattcgtctttaacctgaaccccctcaatagctcgcaggggtacaacgtgtccggcatcggcaagatattcatgttcaacgtgtgcggtacaatgcctgtttgtgggacaattcttggaaagccagcctctggttgcgaagctgaaacgcagaccgaggaattaaagaactggaagcccgccagacctgtagggatagagaagtccttgcagctaagcaccgaaggctttattaccctgacctacaaaggccccctctctgctaaagggacagctgatgctttcatcgtccggttcgtgtgcaacgacgacgtatactccgggcctcttaagttccttcaccaggatatagactccggtcaggggattagaaacacttattttgagttcgaaacagcactggcatgcgtccccagcccagtagattgtcaggtgactgatcttgctgggaatgaatatgatctgacaggattgagcaccgtccggaagccttggactgctgtcgacacatcagtcgatggaagaaaaagaaccttttacctctcagtatgcaacccgctgccatatatccccgggtgccaaggaagcgccgtgggctcatgtctggtgtctgaaggaaatagttggaacttaggggttgtgcagatgtcaccacaggctgctgccaacggatcgctaagtataatgtacgtgaatggggacaagtgtggtaaccaacgttttagcaccaggataacgttcgaatgtgcccagatctcaggctctcccgctttccaacttcaggacggttgcgaatatgtctttatttggcggactgttgaggcttgtccggtggtgagagtggaaggtgacaattgtgaagttaaggacccgaggcacggcaacctctacgatctgaaacccctgggcttaaacgatacaatcgtgtcggctggcgaatatacatactatttccgggtttgcggaaagctaagtagcgacgtgtgtccaaccagcgacaagtccaaggtggtaagcagctgtcaggagaaacgcgagccgcaaggcttccataaagtggctgggctactgacacagaaattgacctatgagaacgggctgctgaaaatgaacttcacaggcggggatacctgccacaaagtttaccagcgaagcactgcaatcttcttttattgtgaccgtgggactcagcgtcccgtgtttcttaaggaaacctctgattgttcttacttgttcgagtggagaactcagtacgcttgcccaccattcgatctgacagaatgctcgtttaaggacggcgcgggcaactcctttgacctctcttctctgtcaaggtactctgacaattgggaagcaattaccggcacaggggaccctgagcattatttgattaatgtgtgtaagtccctggccccacaggcaggcaccgaaccgtgtcctccagaggcagcagcttgcctgctaggtggaagcaagccggtcaatctgggacgtgtgcgagacgggccccagtggcgggacggtattattgtcctgaaatatgttgacggcgacctatgcccggacgggatcaggaagaaaagcaccacgatcaggttcacatgctccgaatcccaggttaatagtaggccaatgttcattagcgcagtggaggactgcgaatatacttttgcctggcctacagctactgcctgcccaatgaaatccaacgaacatgacgattgccaagtcacaaatccctcaactggtcatctctttgatctgagctccctgagtggaagggcgggcttcacggccgcgtactccgaaaaaggcctagtatacatgtcgatatgcggtgagaacgagaactgccctcctggtgttggcgcatgcttcggtcaaactcggatttctgtggggaaagcgaataagcggctgagatatgtggatcaagtgttgcagctggtctacaaggacggttccccgtgcccttccaaaagtggactttcctacaaaagtgtgatttctttcgtgtgtcgacccgaagcaagaccaactaataggcccatgctaatctcgcttgacaaacaaacatgcaccctgtttttctcatggcacacccccctggcgtgcgagcaagcgacagagtgttcagtgcgaaatgggtcttcaattgtcgacctgagcccattgattcatcgaactgggggctacgaagcatatgatgaaagcgaagatgacgcctcggatacaaacccagacttctatataaacatctgccaacctttaaaccctatgcatggagtgccctgccccgctggcgccgccgtatgcaaagttcccatcgatggtccgccgattgacatagggagggtggcaggaccaccgatactcaacccgatcgccaacgagatttacctgaactttgagtcaagcaccccctgcttggctgacaagcacttcaactatacatccttaatcgcctttcactgcaagcggggcgtgtcaatgggcacgcccaagctcttgcggacgagcgagtgtgatttcgtcttcgaatgggaaacccccgtggtctgccccgacgaagtacggatggatggatgtacccttacggacgaacagcttctttactccttcaatttaagcagcttgtcaacgagtacctttaaggttactcgggattctcgaacatactccgtcggcgtctgtacattcgctgtgggccccgagcagggggggtgcaaagatggcggcgtatgcctactaagtgggaccaaaggcgcatcatttggcaggctgcagagcatgaagcttgattatcggcatcaggatgaggcggtggtgctgagttatgtgaatggcgaccgatgtcccccggaaacagatgacggtgtgccctgcgtctttccgttcatctttaacggaaaatcatacgaggaatgcatcatcgagtccagggcaaagctgtggtgtagcaccacagcggattacgatcgcgatcatgagtgggggttttgtaggcactccaactcctacagaacaagctccattatttttaaatgtgacgaggatgaggatataggtcgcccccaggtcttctccgaagtcagggggtgtgatgtgacttttgagtggaaaaccaaggtggtgtgtccacctaaaaagctggagtgtaagtttgtccaaaaacataagacatacgacctgaggctcctgtcaagcctgaccggctcctggagtttagttcataacggtgtgtcttactacatcaatctgtgtcagaagatttataaaggacccctagggtgcagcgagcgggcatctatctgtagaaggaccactacaggagacgtgcaggtactcggactcgtgcatactcagaagctgggggtgatcggcgacaaggttgtggtgacctattcaaagggatacccctgtggtggtaataaaaccgctagctctgttattgaactcacctgtaccaaaaccgtgggaaggcctgccttcaaaaggtttgacatcgactcctgcacatattacttctcctgggacagtagggccgcctgcgccgtgaaaccacaggaggtccaaatggtgaatgggactatcacaaaccccatcaacgggaagagctttagcctcggcgacatctatttcaagctgtttcgagcgagtggtgatatgagaactaacggcgataactacctgtatgagattcagttatcaagtatcacctcttccagaaaccctgcatgtagcggtgcaaatatttgccaagtgaagcccaatgaccagcacttcagccgcaaggtaggtacatctgacaaaaccaaatactatctgcaggatggagacctggatgtagttttcgcctcctccagtaagtgtggcaaggacaagacaaagtctgtatcctcaacaatcttcttccactgtgacccattggtcgaagacggtatcccagagtttagtcatgagaccgcagactgtcaatatctgttctcttggtataccagcgccgtatgcccccttggggtgggtttcgactcagagaacccaggagatgacggccagatgcataaggggctcagcgagcggtcacaggcagtgggcgccgtcctgtctttgctcttggtcgctctcacctgctgtctgctggctctgctgttgtacaagaaagagcgacgcgagacagttatctccaagttaactacctgctgtaggcgttctagtaacgtctcttataagtattctaaggttaacaaagaagaggagacagacgaaaacgaaacagagtggctaatggaggagatccagctgccgcccccacgtcagggaaaggaggggcaagagaatggacatataaccaccaaaagtgtgaaggccttaagttccttgcatggagacgatcaggatagtgaagatgaggtgttgacgatcccagaggttaaggtgcactccgggagaggagctggcgcagagtcttcacatcccgttcggaacgcccagtccaacgccctgcaggaaagggaagacgaccgggtgggcctagtccgcggcgaaaaggcaaggaagggcaaatcaagtagcgcccagcagaagacagtgagctcaacaaagttggtctctttccacgacgattccgacgaggatctcttacatatatag

SEQ ID NO: 16661 - DNA, 9091 bp, Artificial Sequence
  derived and/or modified sequence
cgagcccagtcgagccgcgctcacctcgggctcccgctccgtctccacctccgcctttgccctggcggcgcgaccccgtcccgggcgcggcccccagcagtcgcgcgccgttagcctcgcgcccgccgcgcagtccgggcccggcgcgatgggggccgccgccggccggagcccccacctggggcccgcgcccgcccgccgcccgcagcgctctctgctcctgctgcagctgctgctgctcgtcgctgccccggggtccacgcaggcccaggccgccccgttccccgagctgtgcagttatacatgggaagctgttgataccaaaaataatgtactttataaaatcaacatctgtggaagtgtggatattgtccagtgcgggccatcaagtgctgtttgtatgcacgacttgaagacacgcacttatcattcagtgggtgactctgttttgagaagtgcaaccagatctctcctggaattcaacacaacagtgagctgtgaccagcaaggcacaaatcacagagtccagagcagcattgccttcctgtgtgggaaaaccctgggaactcctgaatttgtaactgcaacagaatgtgtgcactactttgagtggaggaccactgcagcctgcaagaaagacatatttaaagcaaataaggaggtgccatgctatgtgtttgatgaagagttgaggaagcatgatctcaatcctctgatcaagcttagtggtgcctacttggtggatgactccgatccggacacttctctattcatcaatgtttgtagagacatagacacactacgagacccaggttcacagctgcgggcctgtccccccggcactgccgcctgcctggtaagaggacaccaggcgtttgatgttggccagccccgggacggactgaagctggtgcgcaaggacaggcttgtcctgagttacgtgagggaagaggcaggaaagctagacttttgtgatggtcacagccctgcggtgactattacatttgtttgcccgtcggagcggagagagggcaccattcccaaactcacagctaaatccaactgccgctatgaaattgagtggattactgagtatgcctgccacagagattacctggaaagtaaaacttgttctctgagcggcgagcagcaggatgtctccatagacctcacaccacttgcccagagcggaggttcatcctatatttcagatggaaaagaatatttgttttatttgaatgtctgtggagaaactgaaatacagttctgtaataaaaaacaagctgcagtttgccaagtgaaaaagagcgatacctctcaagtcaaagcagcaggaagataccacaatcagaccctccgatattcggatggagacctcaccttgatatattttggaggtgatgaatgcagctcagggtttcagcggatgagcgtcataaactttgagtgcaataaaaccgcaggtaacgatgggaaaggaactcctgtattcacaggggaggttgactgcacctacttcttcacatgggacacggaatacgcctgtgttaaggagaaggaagacctcctctgcggtgccaccgacgggaagaagcgctatgacctgtccgcgctggtccgccatgcagaaccagagcagaattgggaagctgtggatggcagtcagacggaaacagagaagaagcattttttcattaatatttgtcacagagtgctgcaggaaggcaaggcacgagggtgtcccgaggacgcggcagtgtgtgcagtggataaaaatggaagtaaaaatctgggaaaatttatttcctctcccatgaaagagaaaggaaacattcaactctcttattcagatggtgatgattgtggtcatggcaagaaaattaaaactaatatcacacttgtatgcaagccaggtgatctggaaagtgcaccagtgttgagaacttctggggaaggcggttgcttttatgagtttgagtggcacacagctgcggcctgtgtgctgtctaagacagaaggggagaactgcacggtctttgactcccaggcagggttttcttttgacttatcacctctcacaaagaaaaatggtgcctataaagttgagacaaagaagtatgacttttatataaatgtgtgtggcccggtgtctgtgagcccctgtcagccagactcaggagcctgccaggtggcaaaaagtgatgagaagacttggaacttgggtctgagtaatgcgaagctttcatattatgatgggatgatccaactgaactacagaggcggcacaccctataacaatgaaagacacacaccgagagctacgctcatcacctttctctgtgatcgagacgcgggagtgggcttccctgaatatcaggaagaggataactccacctacaacttccggtggtacaccagctatgcctgcccggaggagcccctggaatgcgtagtgaccgacccctccacgctggagcagtacgacctctccagtctggcaaaatctgaaggtggccttggaggaaactggtatgccatggacaactcaggggaacatgtcacgtggaggaaatactacattaacgtgtgtcggcctctgaatccagtgccgggctgcaaccgatatgcatcggcttgccagatgaagtatgaaaaagatcagggctccttcactgaagtggtttccatcagtaacttgggaatggcaaagaccggcccggtggttgaggacagcggcagcctccttctggaatacgtgaatgggtcggcctgcaccaccagcgatggcagacagaccacatataccacgaggatccatctcgtctgctccaggggcaggctgaacagccaccccatcttttctctcaactgggagtgtgtggtcagtttcctgtggaacacagaggctgcctgtcccattcagacaacgacggatacagaccaggcttgctctataagggatcccaacagtggatttgtgtttaatcttaatccgctaaacagttcgcaaggatataacgtctctggcattgggaagatttttatgtttaatgtctgcggcacaatgcctgtctgtgggaccatcctgggaaaacctgcttctggctgtgaggcagaaacccaaactgaagagctcaagaattggaagccagcaaggccagtcggaattgagaaaagcctccagctgtccacagagggcttcatcactctgacctacaaagggcctctctctgccaaaggtaccgctgatgcttttatcgtccgctttgtttgcaatgatgatgtttactcagggcccctcaaattcctgcatcaagatatcgactctgggcaagggatccgaaacacttactttgagtttgaaaccgcgttggcctgtgttccttctccagtggactgccaagtcaccgacctggctggaaatgagtacgacctgactggcctaagcacagtcaggaaaccttggacggctgttgacacctctgtcgatgggagaaagaggactttctatttgagcgtttgcaatcctctcccttacattcctggatgccagggcagcgcagtggggtcttgcttagtgtcagaaggcaatagctggaatctgggtgtggtgcagatgagtccccaagccgcggcgaatggatctttgagcatcatgtatgtcaacggtgacaagtgtgggaaccagcgcttctccaccaggatcacgtttgagtgtgctcagatatcgggctcaccagcatttcagcttcaggatggttgtgagtacgtgtttatctggagaactgtggaagcctgtcccgttgtcagagtggaaggggacaactgtgaggtgaaagacccaaggcatggcaacttgtatgacctgaagcccctgggcctcaacgacaccatcgtgagcgctggcgaatacacttattacttccgggtctgtgggaagctttcctcagacgtctgccccacaagtgacaagtccaaggtggtctcctcatgtcaggaaaagcgggaaccgcagggatttcacaaagtggcaggtctcctgactcagaagctaacttatgaaaatggcttgttaaaaatgaacttcacggggggggacacttgccataaggtttatcagcgctccacagccatcttcttctactgtgaccgcggcacccagcggccagtatttctaaaggagacttcagattgttcctacttgtttgagtggcgaacgcagtatgcctgcccacctttcgatctgactgaatgttcattcaaagatggggctggcaactccttcgacctctcgtccctgtcaaggtacagtgacaactgggaagccatcactgggacgggggacccggagcactacctcatcaatgtctgcaagtctctggccccgcaggctggcactgagccgtgccctccagaagcagccgcgtgtctgctgggtggctccaagcccgtgaacctcggcagggtaagggacggacctcagtggagagatggcataattgtcctgaaatacgttgatggcgacttatgtccagatgggattcggaaaaagtcaaccaccatccgattcacctgcagcgagagccaagtgaactccaggcccatgttcatcagcgccgtggaggactgtgagtacacctttgcctggcccacagccacagcctgtcccatgaagagcaacgagcatgatgactgccaggtcaccaacccaagcacaggacacctgtttgatctgagctccttaagtggcagggcgggattcacagctgcttacagcgagaaggggttggtttacatgagcatctgtggggagaatgaaaactgccctcctggcgtgggggcctgctttggacagaccaggattagcgtgggcaaggccaacaagaggctgagatacgtggaccaggtcctgcagctggtgtacaaggatgggtccccttgtccctccaaatccggcctgagctataagagtgtgatcagtttcgtgtgcaggcctgaggccaggccaaccaataggcccatgctcatctccctggacaagcagacatgcactctcttcttctcctggcacacgccgctggcctgcgagcaagcgaccgaatgttccgtgaggaatggaagctctattgttgacttgtctccccttattcatcgcactggtggttatgaggcttatgatgagagtgaggatgatgcctccgataccaaccctgatttctacatcaatatttgtcagccactaaatcccatgcacggagtgccctgtcctgccggagccgctgtgtgcaaagttcctattgatggtccccccatagatatcggccgggtagcaggaccaccaatactcaatccaatagcaaatgagatttacttgaattttgaaagcagtactccttgcttagcggacaagcatttcaactacacctcgctcatcgcgtttcactgtaagagaggtgtgagcatgggaacgcctaagctgttaaggaccagcgagtgcgactttgtgttcgaatgggagactcctgtcgtctgtcctgatgaagtgaggatggatggctgtaccctgacagatgagcagctcctctacagcttcaacttgtccagcctttccacgagcacctttaaggtgactcgcgactcgcgcacctacagcgttggggtgtgcacctttgcagtcgggccagaacaaggaggctgtaaggacggaggagtctgtctgctctcaggcaccaagggggcatcctttggacggctgcaatcaatgaaactggattacaggcaccaggatgaagcggtcgttttaagttacgtgaatggtgatcgttgccctccagaaaccgatgacggcgtcccctgtgtcttccccttcatattcaatgggaagagctacgaggagtgcatcatagagagcagggcgaagctgtggtgtagcacaactgcggactacgacagagaccacgagtggggcttctgcagacactcaaacagctaccggacatccagcatcatatttaagtgtgatgaagatgaggacattgggaggccacaagtcttcagtgaagtgcgtgggtgtgatgtgacatttgagtggaaaacaaaagttgtctgccctccaaagaagttggagtgcaaattcgtccagaaacacaaaacctacgacctgcggctgctctcctctctcaccgggtcctggtccctcgtccacaacggagtctcgtactatataaatctgtgccagaaaatatataaagggcccctgggctgctctgaaagggccagcatttgcagaaggaccacaactggtgacgtccaggtcctgggactcgttcacacgcagaagctgggtgtcataggtgacaaagttgttgtcacgtactccaaaggttatccgtgtggtggaaataagaccgcatcctccgtgatagaattgacctgtacaaagacggtgggcagacctgcattcaagaggtttgatatcgacagctgcacttactacttcagctgggactcccgggctgcctgcgccgtgaagcctcaggaggtgcagatggtgaatgggaccatcaccaaccctataaatggcaagagcttcagcctcggagatatttattttaagctgttcagagcctctggggacatgaggaccaatggggacaactacctgtatgagatccaactttcctccatcacaagctccagaaacccggcgtgctctggagccaacatatgccaggtgaagcccaacgatcagcacttcagtcggaaagttggaacctctgacaagaccaagtactaccttcaagacggcgatctcgatgtcgtgtttgcctcttcctctaagtgcggaaaggataagaccaagtctgtttcttccaccatcttcttccactgtgaccctctggtggaggacgggatccccgagttcagtcacgagactgccgactgccagtacctcttctcttggtacacctcagccgtgtgtcctctgggggtgggctttgacagcgagaatcccggggacgacgggcagatgcacaaggggctgtcagaacggagccaggcagtcggcgcggtgctcagcctgctgctggtggcgctcacctgctgcctgctggccctgttgctctacaagaaggagaggagggaaacagtgataagtaagctgaccacttgctgtaggagaagttccaacgtgtcctacaaatactcaaaggtgaataaggaagaagagacagatgagaatgaaacagagtggctgatggaagagatccagctgcctcctccacggcagggaaaggaagggcaggagaacggccatattaccaccaagtcagtgaaagccctcagctccctgcatggggatgaccaggacagtgaggatgaggttctgaccatcccagaggtgaaagttcactcgggcaggggagctggggcagagagctcccacccagtgagaaacgcacagagcaatgcccttcaggagcgtgaggacgatagggtggggctggtcaggggtgagaaggcgaggaaagggaagtccagctctgcacagcagaagacagtgagctccaccaagctggtgtccttccatgacgacagcgacgaggacctcttacacatctgactccgcagtgcctgcaggggagcacggagccgcgggacagccaagcacctccaaccaaataagacttccactcgatgatgcttctataattttgcctttaacagaaactttcaaaagggaagagtttttgtgatgggggagagggtgaaggaggtcaggccccactccttcctgattgtttacagtcattggaataaggcatggctcagatcggccacagggcggtaccttgtgcccagggttttgccccaagtcctcatttaaaagcataaggccggacgcatctcaaaacagagggctgcattcgaagaaacccttgctgctttagtcccgatagggtatttgaccccgatatattttagcattttaattctctccccctatttattgactttgacaattactcaggtttgagaaaaaggaaaaaaaaacagccaccgtttcttcctgccagcaggggtgtgatgtaccagtttgtccatcttgagatggtgaggctgtcagtgtatggggcagcttccggcgggatgttgaactggtcattaatgtgtcccctgagttggagctcattctgtctcttttctcttttgctttctgtttcttaagggcacacacacgtgcgtgcgagcacacacacacatacgtgcacagggtccccgagtgcctaggttttggagagtttgcctgttctatgcctttagtcaggaatggctgcacctttttgcatgatatcttcaagcctgggcgtacagagcacatttgtcagtatttttgccggctggtgaattcaaacaacctgcccaaagattgatttgtgtgtttgtgtgtgtgtgtgtgtgtgtgtgtgtgtgtgtgagtggagttgaggtgtcagagaaaatgaattttttccagatttggggtataggtctcatctcttcaggttctcatgataccacctttactgtgcttatttttttaagaaaaaagtgttgatcaaccattcgacctataagaagccttaatttgcacagtgtgtgacttacagaaactgcatgaaaaatcatgggccagagcctcggccctagcattgcacttggcctcatgctggagggaggctgggcgggtacagcgcggaggaggagggaggccaggcgggcatggcgtggaggaggagggaggccgggcggtcacagcatggaggaggagggaggcgctgctggtgttcttattctggcggcagcgcctttcctgccatgtttagtgaatgacttttctcgcattgtagaattgtatatagactctggtgttctattgctgagaagcaaaccgccctgcagcatccctcagcctgtaccggtttggctggcttgtttgatttcaacatgagtgtattttttaaaattgatttttctcttcatttttttttcaatcaactttactgtaatataaagtattcaacaatttcaataaaagataaattattaa

SEQ ID NO: 16662 - DNA, 7476 bp, Artificial Sequence
  derived and/or modified sequence
atgggcgctgctgctggccgcagcccccacctgggccctgccccagcccggcggccccagaggagcctgctgctgctgcagctgctgctgctggtggccgcccctggcagcacccaggcccaggccgcccccttccctgagctgtgcagctacacctgggaggccgtggacaccaagaacaacgtgctgtacaagatcaacatctgtggctctgtggacatcgtgcagtgtggccccagcagcgctgtgtgcatgcatgacctgaagaccaggacctaccacagcgtgggggacagcgtgctgcggagcgccaccaggagcctgctggagttcaacaccaccgtgtcctgtgaccagcagggcaccaaccaccgggtgcagagcagcatcgccttcctgtgtgggaagaccctgggcaccccagagtttgtgacagccacagaatgtgtgcactactttgagtggaggaccacagctgcctgcaagaaggacatcttcaaggccaacaaggaggtgccctgctacgtgtttgatgaggagctgaggaagcatgacctgaaccccctcatcaagctgagcggggcctacctggtggatgacagcgaccctgacaccagcctcttcatcaacgtgtgccgggacatcgacaccctgcgggaccccggcagccagctgcgggcctgccccccaggcacagctgcctgcctggtgcggggccaccaggcctttgatgtgggccagcccagagatggcctgaagctggtgaggaaggaccggctggtgctgtcctatgtgcgggaggaggccggcaagctggacttctgtgatggccacagccctgctgtgaccatcacctttgtgtgccccagcgagcggcgggagggcaccatccccaagctgacagccaagagcaactgccgctatgaaattgagtggatcacagaatatgcctgccaccgggactacctggagagcaagacctgcagcctgtctggagagcagcaggatgtgtccattgacctgacccccctggcccagagcggcggcagcagctacatcagtgatggcaaggagtacctgttctacctgaatgtgtgtggggagacagagatccagttctgcaacaagaagcaggccgctgtgtgccaggtgaagaagagtgacaccagccaggtgaaggctgctggccgctaccacaaccagaccctgcgctacagtgatggagacctgaccctcatctactttggaggagatgaatgtagcagcggcttccagaggatgtctgtcatcaactttgagtgcaacaagacagctggaaatgatggcaagggcacccctgtgttcaccggggaggtggactgcacctacttcttcacctgggacacagaatatgcctgtgtgaaggagaaggaggacctgctgtgtggggccacagatggcaagaagagatatgacctgagcgccctggtgagacatgctgagcctgagcagaactgggaggccgtggatggcagccagacagaaacagagaagaagcacttcttcatcaacatctgccaccgggtgctgcaggagggcaaggcccggggctgcccagaagatgctgctgtgtgtgctgtggacaagaatggcagcaagaacctgggcaagttcatcagcagccccatgaaggagaagggcaacatccagctgagctacagtgatggagatgactgtggccacggcaagaagatcaagaccaacatcaccctggtgtgcaagccaggggacctggagagcgcccctgtgctgcggaccagcggggagggcggctgcttctatgaatttgagtggcacacagctgctgcctgtgtgctgagcaagacagaaggagagaactgcaccgtgtttgacagccaggccggcttctcctttgacctgagccccctgaccaagaagaatggagcctacaaggtggagaccaagaagtatgacttctacatcaacgtgtgtggccctgtgtctgtgagcccctgccagcctgacagcggggcctgccaggtggccaagagtgatgagaagacctggaacctgggcctgagcaatgccaagctgagctactatgatggcatgatccagctgaactacagaggaggcaccccctacaacaatgaaagacacaccccccgggccaccctcatcaccttcctgtgtgacagagatgctggggtgggcttccctgagtaccaggaggaggacaacagcacctacaacttccgctggtacaccagctatgcctgcccagaggagcccctggagtgtgtggtgacagaccccagcaccctggagcagtatgacctgagcagcctggccaagtctgagggcggcctgggcggcaactggtacgccatggacaacagcggggagcacgtgacctggaggaagtactacatcaacgtgtgccggcccctgaaccctgtgcccggctgcaacagatatgccagcgcctgccagatgaagtatgagaaggaccagggcagcttcacagaggtggtgtccatcagcaacctgggcatggccaagacaggccctgtggtggaggacagcggcagcctgctgctggagtatgtgaatggaagtgcctgcaccaccagtgatggccggcagaccacctacaccacccgcatccacctggtgtgcagccggggccgcctgaacagccaccccatcttcagcctgaactgggagtgtgtggtgtccttcctgtggaacacagaggccgcctgccccatccagaccaccacagacacagaccaggcctgcagcatccgggaccccaacagcggctttgtgttcaacctgaaccccctgaacagcagccagggctacaacgtgtctggaattggcaagatcttcatgttcaacgtgtgtggcaccatgcctgtgtgtggcaccatcctgggcaagccagccagcggctgtgaggccgagacccagacagaggagctgaagaactggaagccagcccggcctgtgggcatcgagaagagcctgcagctgagcacagagggcttcatcaccctgacctacaagggccccctgagcgccaagggcacagcagatgccttcatcgtgcgctttgtgtgcaatgatgatgtgtacagcggccccctgaagttcctgcaccaggacatcgacagcggccagggcatccggaacacctactttgaatttgaaacagccctggcctgtgtgcccagccctgtggactgccaggtgacagacctggccggaaatgaatatgacctgaccggcctgagcacagtgaggaagccctggacagctgtggacacctctgtggatggcaggaagaggaccttctacctgtctgtgtgcaaccccctgccctacatccctggctgccagggcagcgctgtgggcagctgcctggtgtctgagggcaacagctggaacctgggcgtggtgcagatgagcccccaggccgccgccaacggcagcctgagcatcatgtatgtgaatggagacaagtgtggcaaccagcgcttcagcacccgcatcacctttgaatgtgcccagatcagcggcagccctgccttccagctgcaggacggctgtgaatatgtgttcatctggaggacagtggaggcctgccctgtggtgcgggtggagggggacaactgtgaggtgaaggaccccaggcatggcaacctgtatgacctgaagcccctgggcctgaatgacaccatcgtgtctgctggggagtacacctactacttccgggtgtgtgggaagctgagcagtgatgtgtgccccaccagtgacaagagcaaggtggtgagcagctgccaggagaagcgggagccccagggcttccacaaggtggccggcctgctgacccagaagctgacctatgaaaatggcctgctgaagatgaacttcaccggcggggacacctgccacaaggtgtaccagaggagcacagccatcttcttctactgtgaccggggcacccagaggcctgtgttcctgaaggagaccagtgactgcagctacctgtttgagtggaggacccagtatgcctgccccccatttgacctgacagagtgcagcttcaaggatggagctggcaacagctttgacctgagcagcctgagccgctacagcgacaactgggaggccatcactggaactggagaccctgagcactacctgatcaacgtgtgcaagagcctggccccccaggccggcacagagccctgccccccagaggccgccgcctgcctgctgggcggcagcaagcctgtgaacctgggccgggtgagagatggcccccagtggagagatggcatcatcgtgctgaagtatgtggatggagacctgtgcccagatggcatcaggaagaagagcaccaccatccgcttcacctgcagcgagagccaggtgaacagccggcccatgttcatctctgctgtggaggactgtgagtacacctttgcctggcccacagccacagcctgccccatgaagagcaatgaacatgatgactgccaggtgaccaaccccagcacaggccacctgtttgacctgagcagcctgagcggccgggccggcttcaccgctgcctacagcgagaagggcctggtgtacatgagcatctgtggagaaaatgaaaactgccccccaggagtgggcgcctgcttcggccagacccgcatctctgtgggcaaggccaacaagaggctgcgctacgtggaccaggtgctgcagctggtgtacaaggatggcagcccctgccccagcaagagcggcctgagctacaagagcgtcatcagctttgtgtgcaggcctgaggcccggcccaccaaccggcccatgctgatcagcctggacaagcagacctgcaccctcttcttctcctggcacacccccctggcctgtgagcaggccacagaatgttctgtgagaaatggcagcagcatcgtggacctgagccccctcatccacaggactggaggctatgaggcctatgatgaaagtgaagatgatgccagtgacaccaacccagacttctacatcaacatctgccagcccctgaaccccatgcacggcgtgccctgcccagctggagctgctgtgtgcaaggtgcccattgatggcccccccatcgacatcggccgggtggccggcccccccatcctgaaccccatcgccaatgagatctacctgaactttgagagcagcaccccctgcctggccgacaagcacttcaactacaccagcctcatcgccttccactgcaagaggggcgtgtccatgggcacccccaagctgctgcggaccagtgaatgtgactttgtgtttgagtgggagacccctgtggtgtgcccagatgaggtgaggatggatggctgcaccctgacagatgagcagctgctgtacagcttcaacctgagcagcctgagcaccagcaccttcaaggtgacccgggacagcaggacctacagcgtgggcgtgtgcacctttgctgtgggccctgagcagggcggctgcaaggatggcggcgtgtgcctgctgagcggcaccaagggggccagctttggccgcctgcagagcatgaagctggactaccgccaccaggatgaggccgtggtgctgtcctatgtgaatggagaccgctgccccccagagacagatgatggagtgccctgtgtgttccccttcatcttcaacgggaagagctatgaggagtgcatcatcgagagccgggccaagctgtggtgcagcaccacagctgactatgaccgggaccacgagtggggcttctgccgccacagcaacagctaccgcaccagcagcatcatcttcaagtgtgatgaagatgaagatattggccggccccaggtgttcagcgaggtgcggggctgtgatgtgacctttgagtggaagaccaaggtggtgtgcccccccaagaagctggagtgcaagtttgtgcagaagcacaagacctatgacctgcggctgctgagcagcctgaccggctcctggagcctggtgcacaacggggtgtcctactacatcaacctgtgccagaagatctacaagggccccctgggctgcagcgagcgggccagcatctgcaggaggaccaccactggagatgtgcaggtgctgggcctggtgcacacccagaagctgggcgtcatcggggacaaggtggtggtgacctacagcaagggctacccctgtggcggcaacaagacagccagcagcgtcatcgagctgacctgcaccaagacagtgggccgcccagccttcaagagatttgacatcgacagctgcacctactacttctcctgggacagcagagctgcctgtgctgtgaagccccaggaggtgcagatggtgaatggcaccatcaccaaccccatcaacgggaagagcttcagcctgggggacatctacttcaagctgttccgggccagcggggacatgaggaccaatggagacaactacctgtatgagatccagctgagcagcatcaccagcagcaggaacccagcctgcagcggggccaacatctgccaggtgaagcccaatgaccagcacttcagcaggaaggtgggcaccagtgacaagaccaagtactacctgcaggatggagacctggatgtggtgtttgccagcagcagcaaatgtgggaaggacaagaccaagtctgtgagcagcaccatcttcttccactgtgaccccctggtggaggatggcatccctgagttcagccatgaaacagctgactgccagtacctgttctcctggtacaccagcgctgtgtgccccctgggcgtgggctttgacagtgaaaatcctggagatgatggccagatgcacaagggcctgtctgagaggagccaggccgtgggcgctgtgctgagcctgctgctggtggccctgacctgctgcctgctggccctgctgctgtacaagaaggagcggcgggagaccgtcatcagcaagctgaccacctgctgccgccgcagcagcaatgtgtcctacaagtacagcaaggtgaacaaggaggaggagacagatgaaaatgaaacagagtggctgatggaggagatccagctgcccccaccccggcagggcaaggagggccaggagaatggccacatcaccaccaagtctgtgaaggccctgagcagcctgcatggagatgaccaggacagtgaagatgaggtgctgaccatccctgaggtgaaggtgcacagcggcagaggagctggagctgagagcagccaccctgtgagaaatgcccagagcaatgccctgcaggagagagaagatgacagagtgggcctggtgcggggggagaaggccaggaagggcaagagcagcagcgcccagcagaagacagtgagcagcaccaagctggtgtccttccatgatgacagtgatgaggacctgctgcacatctag

SEQ ID NO: 16663 - DNA, 7476 bp, Artificial Sequence
  derived and/or modified sequence
atgggcgccgccgccggccggagcccccacctgggccccgcccccgcgagaagaccccagcggagtcttctgctcctccagttgctgctgctggtcgctgcgcccgggtccacccaagcccaggcagcaccttttcccgagctgtgcagttatacctgggaggccgtcgacactaagaataatgtactgtataaaataaatatttgtggctccgtggatattgtgcagtgtgggccaagctctgccgtctgcatgcatgacctgaaaactcgaacatatcacagcgtgggggattccgtcctccgctcggctaccaggtcattactggagtttaataccaccgtaagctgcgatcaacagggaaccaatcacagagtgcaaagctccatagctttcctctgcggaaagacactagggacaccagaatttgtgaccgccaccgaatgtgtgcattacttcgaatggcgaacaacggctgcatgtaaaaaagacattttcaaggccaacaaggaagtgccttgttacgtgttcgatgaagaacttcgaaagcatgaccttaatccactgatcaaattgtcgggggcatacctggttgacgattcagaccccgacacttcactgttcataaatgtgtgtcgcgacattgatacattgcgtgatccagggtcacagctgcgcgcctgcccccccggcaccgctgcctgccttgtcagaggtcaccaagctttcgatgtcggtcaacctagagacggactcaagctggtgcgtaaggataggctggtgttatcttacgtacgagaggaggccggcaagctggacttctgcgacggccactcacctgccgtgactattactttcgtatgcccatctgagcggcgggagggtacaattcccaagctgaccgctaagagtaactgccgttacgagatcgagtggattacagaatacgcctgccacagagactatctggaatccaaaacctgctctctttcaggcgagcagcaggatgtcagcattgacctgactcccctggcccagtcgggcgggagtagctacatatcagacggaaaagagtatctcttctatcttaatgtatgcggcgaaacggaaatccagttctgcaacaagaagcaggctgccgtgtgccaagtaaaaaaatccgatacatcacaagtaaaggccgctggcaggtatcataaccaaaccctccgctacagtgatggagacctcacccttatttactttggcggagacgaatgttcttcaggatttcaaagaatgagcgtcatcaatttcgagtgcaacaaaacagctgggaacgacggcaaggggaccccagtctttacgggtgaagtagactgtacctattttttcacgtgggatacggagtacgcttgcgtgaaagaaaaggaagatctgctttgcggtgccactgatggaaaaaaaaggtatgatctcagtgccctagtacgacatgccgagccagagcagaattgggaggcagttgatggctcccagaccgaaacagagaagaagcatttcttcatcaatatttgccatcgcgtcctccaggagggtaaggccaggggctgcccggaagacgccgctgtgtgcgccgtggataaaaacgggagcaagaaccttggtaaattcatctcttctcccatgaaggaaaaaggcaacatacaactctcttattctgacggggatgactgcggtcacgggaaaaaaattaagactaacatcaccctggtttgcaaacccggcgacctggaatctgcaccagttttaaggacttctggcgaaggtggctgtttttatgaatttgagtggcatactgcggcagcctgtgtgctctcaaagacagagggggagaattgtacagtattcgatagccaagccgggttctccttcgatctgagcccgcttacaaagaaaaacggcgcctataaggtggaaacaaaaaagtacgacttttatatcaatgtctgcgggcctgtttccgttagcccttgccagcccgattcaggcgcttgtcaggttgcaaaatccgatgaaaagacttggaacctgggtttgagcaatgctaaactgagctattacgatggcatgatccaactgaactatcgggggggaaccccatacaataatgagaggcacactccaagggccactctgatcaccttcttatgcgatagagatgccggcgtggggttcccggagtatcaggaggaggacaatagcacttacaactttagatggtacaccagctacgcctgtcccgaggagcctttggaatgtgtcgtgaccgacccaagcactctggagcagtatgacttgagttccttggcaaagagcgagggcggcctcggcggaaactggtatgcaatggacaactcaggcgagcacgtaacttggagaaaatactacatcaacgtgtgtcgcccactaaaccctgttcccggctgtaaccggtacgccagcgcctgccagatgaaatacgaaaaggatcaaggaagcttcactgaagtggtgagcatctctaacctgggcatggcaaagactggccccgtggttgaggacagtggcagtcttctgctcgaatatgtgaatggatctgcctgcaccaccagtgacggcagacagacaacatacactactaggatccatctggtctgttcccgagggcggctgaatagccaccccattttttccttaaactgggaatgcgtggtaagtttcctgtggaatactgaggcggcctgccccattcagaccaccactgacaccgaccaggcctgcagcataagggaccctaactccggctttgtgtttaatttaaaccccctgaactcttcacagggctataatgtgtccgggatcggcaagatctttatgtttaatgtctgcggcaccatgcccgtatgcggtacaattcttggaaaaccagccagcggatgcgaagctgagacccagaccgaggagctgaagaattggaaaccggccagaccggtcgggatcgagaagtcgttgcagttaagtacggagggcttcatcactttgacctacaagggaccactttctgccaaggggacagctgacgcctttattgtgcgcttcgtttgcaatgacgacgtttatagcggacctctgaaatttctgcaccaagatattgactccggacagggaattcgcaacacatatttcgaattcgagaccgcactggcctgtgtccctagcccggttgattgtcaggtgaccgacctagccggcaatgaatacgacttgacagggctgtcgacagtcagaaaaccttggacggcagttgacaccagcgtggatggcaggaagcgcactttctatctctccgtgtgtaacccgttaccctacatcccgggttgccagggatcggcagtgggcagttgtcttgtgagcgagggcaacagctggaacctaggcgtggtgcagatgtctccccaggctgctgccaatggaagcctcagcataatgtacgtgaacggagataaatgtggcaaccaacggttcagcaccaggatcacatttgagtgtgctcagatctcaggcagccctgccttccagctccaggacggttgcgagtacgtgttcatctggaggaccgtcgaagcctgcccagtcgtgcgagtggagggagacaactgcgaggtgaaagaccctagacacggaaatctctatgacctgaagcccctggggcttaacgataccatcgtctctgctggagaatatacctactactttagggtatgcggtaagctgagctccgacgtttgccctacttccgacaaatcaaaagttgtaagttcttgccaggagaaaagggaacctcaagggtttcataaagtcgccggcctccttactcaaaagctaacgtacgagaacgggctgctgaaaatgaattttaccggcggagacacctgccataaggtgtaccagagatctactgccatattcttctattgcgatagggggacgcagcggcccgtgtttctcaaagagacttcagactgttcgtaccttttcgagtggcgcacccagtacgcctgccccccctttgacttgacggagtgctcgtttaaggacggtgccggtaattcttttgacctgtcttccctgtctaggtatagtgacaactgggaggctattaccggaacaggcgatcctgagcattatctgattaacgtgtgcaagtctcttgccccacaggctgggaccgagccatgcccacctgaagccgccgcttgtcttttaggtggctccaagcccgtgaacctagggagagtccgcgatggccctcaatggcgtgatgggattatcgtccttaaatacgtagatggggacctatgccctgacggaatcagaaagaagagcacaacgatccgttttacgtgctctgagtctcaggtcaacagccgtcccatgttcatttcagcagtcgaggattgcgagtatacgttcgcttggccgaccgctactgcttgccctatgaagagtaacgaacacgatgactgccaggtgaccaatccttccacaggtcatttattcgacctgtccagcctttccggacgggctggatttacagcggcctacagtgaaaaaggactagtgtacatgagtatttgcggagagaacgagaactgtccgcctggcgttggcgcttgctttgggcagaccagaatttctgtgggtaaagccaacaagaggctgagatatgttgatcaagtgcttcagttggtgtacaaggatgggtccccatgccccagcaagtctgggttgtcttataagtccgtcatctcattcgtttgtagaccggaggctcgtcctactaatcgacctatgctgatctccctggacaagcaaacatgtactctgttttttagttggcatacccctctcgcctgtgagcaggcaacagaatgcagcgtgcgcaacggcagctcaatcgttgatttgtctccactgatacaccgcaccgggggttacgaggcatatgatgagtccgaagatgatgcctccgacactaaccccgacttttacatcaacatatgccaacctctgaatcctatgcacggagtgccctgtccggcaggggcggcggtgtgcaaggtgccaattgatgggccgcccatcgacatcggccgcgtggctgggcctcccattctgaacccaattgctaacgaaatttacctgaattttgaatcgtcaaccccctgcctggccgacaaacactttaattacacatcgctgattgccttccactgcaaacggggagtgagcatggggacacctaagctgcttagaacgtccgagtgtgatttcgtgttcgagtgggaaacaccagtcgtctgccctgacgaagtgagaatggatggttgtacactgacagacgagcaactgctttattcattcaacttaagctctcttagcactagcactttcaaagtgacacgggactctaggacttattccgtgggagtgtgcacttttgccgtggggccggagcaggggggctgcaaagacggtggagtgtgcctgctgagcggaactaaaggggcttccttcggccggttacagtctatgaaattggactataggcaccaagacgaggccgtcgtccttagctacgtgaatggtgaccgttgtcccccggaaaccgacgacggcgtcccatgtgttttcccatttattttcaacggtaaatcttatgaggagtgtatcatagaaagccgggcaaaactctggtgttccactaccgcagattatgacagagatcacgaatggggattctgccggcactctaattcttaccgaacctcatcgatcatcttcaaatgcgacgaggacgaagatataggtagacctcaagtgttcagtgaggtgagagggtgcgacgtcaccttcgagtggaagacgaaggtagtgtgtccacccaagaagctcgaatgcaaatttgtgcaaaagcacaaaacctacgaccttagactcctctcttccctgacaggctcttggtcacttgtgcataatggcgtttcctattatattaacttatgccagaaaatctacaagggaccgttaggttgttctgagagggctagtatctgtagaagaacaaccactggcgacgtgcaagttctgggactggtgcatacacagaaactgggagtgatcggtgataaggtcgtggtaacatattcgaaaggctatccgtgtggaggcaataagactgcaagttccgtcattgaactcacctgtactaaaacggtgggtagacccgctttcaaaaggtttgatatcgacagttgtacatattatttctcatgggatagccgggccgcgtgcgctgtcaagccccaagaggtccagatggtcaacgggaccattacaaacccaatcaacggcaagagtttttctctaggggacatttactttaagctgttcagagcatcaggcgacatgcgcacaaatggggacaattatctttacgaaatccagctgtcctccatcacctccagtcggaatccagcttgcagcggcgctaatatctgccaagtcaagcctaacgaccagcactttagcaggaaagtgggcacgtccgataagactaaatattatctgcaagacggggacctagacgttgtgttcgcctctagttctaagtgtggcaaggataagacgaaatccgtatcatctaccatctttttccattgcgacccactggtggaagatggaatcccggaattttcacacgaaaccgctgattgccagtatctcttctcttggtacacctcggcagtctgccctctgggcgtcggctttgactctgagaaccctggagacgacggtcagatgcacaagggcctttcagagaggagccaggccgtgggcgcagtgctctctcttctcctggttgccctgacttgctgcctgttggctctgttactatacaagaaggagcggagggagaccgtcatctccaaacttaccacttgctgccgcagatcaagcaacgtttcctataagtacagcaaggttaataaagaagaagaaacggatgagaacgagactgagtggttaatggaggagattcagcttcctcctcctaggcagggcaaggaggggcaggaaaacggccacattaccacgaagtctgtcaaagccctctccagtctccacggcgacgaccaagacagcgaagatgaggtcttgacgatccccgaggtgaaggtgcacagcggaaggggagcaggcgctgaaagctctcatcctgtacgcaatgcccagagcaacgctctacaagagcgcgaagatgatcgcgttgggttagtgcgaggcgagaaggcccggaagggcaagagctcaagcgcgcagcagaagacagtctcatcaaccaaactggtatcgtttcatgatgacagtgacgaggacctgctgcatatctag

SEQ ID NO: 16664 - DNA, 7475 bp, Artificial Sequence
  derived and/or modified sequence
atgggtgccgctgccggacgttccccacacctggggcctgcaccagctaggaggccccaacgtagtctgttactgctacaattactgctgttggtcgccgcaccgggtagtacacaggcccaggcagccccatttcccgagctgtgtagttatacctgggaggccgtggacactaaaaacaatgttctgtacaagattaatatctgcggatccgttgacattgtccaatgcggaccatctagtgccgtttgcatgcacgacctgaagacacgcacttaccacagcgtcggtgactccgtcctgagaagtgccacacgctctctgctggagtttaatactaccgttagttgtgatcagcaggggacaaaccacagagtccagtcttctatcgctttcctgtgcggcaaaaccctgggaacacctgagttcgtgacggctaccgaatgcgttcattacttcgaatggagaacaaccgctgcatgcaaaaaggacatctttaaggcaaataaggaagtgccctgttacgtctttgatgaggagcttcgcaaacacgacctcaaccctctgattaaacttagcggcgcatacctggtcgatgatagtgatccggatacaagcctttttatcaatgtctgccgagatattgacacacttcgcgacccgggaagtcaactgcgggcatgtcccccagggaccgccgcatgtctggtcagggggcaccaggcctttgacgtcggacagccacgcgatgggttgaagctggtcagaaaggatagactggtgctctcatatgtccgtgaagaggctggtaagttggacttctgcgacgggcactcccccgcagtgactattacttttgtctgccctagcgagcgtcgagaaggtaccattcccaagctaacagcaaagagtaactgccggtacgagatcgaatggattacagagtacgcctgtcacagggactaccttgaatcgaagacgtgctctctgtcaggcgagcagcaagacgtttcaattgatcttacaccccttgcacagagtggcggttcttcctacatctccgacggcaaggagtatttattttacttaaacgtgtgtggggagaccgaaatacagttttgtaacaagaaacaagccgctgtgtgccaggtgaagaagtcagatactagccaggtaaaggccgcaggtagatatcacaaccagaccctgaggtacagtgatggggaccttaccctgatttatttcggaggtgatgaatgtagcagcgggtttcagagaatgagcgtgatcaatttcgagtgcaacaaaacagcaggcaatgacggcaagggcacaccagtttttaccggcgaggtcgactgcacatatttttttacgtgggatacggaatatgcatgcgtgaaggagaaggaagatcttctctgcggcgctaccgacggaaagaagcgctacgatctcagtgccctggtgcgccacgcggagccagagcagaactgggaagccgtcgatggcagtcaaaccgaaaccgagaaaaagcactttttcatcaatatctgtcaccgagttctccaggaaggcaaggcacgcggatgccctgaagacgccgcagtttgtgcggtggacaaaaatggttcgaagaacctgggcaagttcattagtagccctatgaaggagaagggaaacatccagctgtcatatagcgacggtgacgattgcggtcacggtaagaagataaagacaaacatcactctggtgtgtaagccaggtgatctggagtctgcaccagtgttgcgcactagtggggaaggtggatgcttttatgagttcgaatggcataccgcagccgcatgcgtgctatccaagacggaaggcgaaaattgcaccgtgtttgacagccaggccggtttctcatttgacctgagccccctgacaaaaaagaacggggcatataaggtagagacaaaaaagtatgatttttacatcaatgtttgcgggcctgtgtctgtcagcccatgtcaaccggattcgggagcctgtcaagtggcgaagtccgatgaaaaaacatggaatcttggtctctccaatgccaagctgtcatactacgacggtatgatccagttaaactatagggggggaacaccatacaacaacgaacggcacaccccacgcgctacgctgataacattcttgtgcgaccgggacgcgggagtggggtttccagagtaccaagaggaggataactccacctacaactttcgttggtatacttcgtacgcatgcccagaagaacctttggagtgtgttgtgactgacccctccacacttgaacagtacgatctctcatcgctggctaaaagcgagggagggctgggaggcaactggtacgccatggataacagcggcgagcacgtgacttggcggaagtactacattaatgtctgtagacctctgaatcccgtccccggttgtaaccggtacgcctctgcctgccaaatgaaatacgaaaaagaccagggatcttttaccgaggtggtgagcatctcaaatctgggcatggctaaaactgggcctgttgtagaagactccggtagtctgcttcttgaatatgtgaatggaagcgcgtgcaccacaagtgacggacgacaaactacatatacaacaagaatacacctggtgtgcagccgcggacgacttaattcccaccccatcttttctctgaactgggagtgcgtcgtgtccttcctgtggaatacggaagcggcttgccctatccaaactaccaccgatacagaccaagcttgtagcataagagatcctaatagtggcttcgtgttcaacctgaatcccctcaatagtagtcagggctacaacgtcagcggtataggtaagatcttcatgttcaacgtgtgtggcaccatgccagtgtgcgggacaatcctcggcaagcccgcatccgggtgcgaagctgagacacaaaccgaagaactcaagaattggaagcctgccaggcctgtgggaatcgaaaaaagtctacagctgtcaacagaaggttttataacgctgacatacaagggaccccttagcgctaagggcacagctgacgccttcatcgtgcgcttcgtgtgcaacgacgatgtttattccgggcctctgaaattcttgcatcaagatattgatagtggacagggaatccggaatacgtacttcgaatttgaaaccgcattggcttgtgtcccctctcctgtggattgccaagtgaccgatctggccggtaacgagtatgatttaaccgggcttagcactgtcaggaagccctggactgccgtcgatacatccgtcgacggacgcaaacgcactttctatctgagtgtctgcaatcctctaccttacatccccggatgccaaggaagtgctgtcggcagctgcctggtgagcgagggcaactcatggaacctgggtgtcgtgcagatgagcccacaggcagccgcaaacggatcattgtccatcatgtatgtgaacggcgataaatgtggcaatcagcgcttctccacccggattacgttcgagtgtgctcagatttcaggatccccggcttttcagctacaggacggctgcgagtacgttttcatttggcgcactgtagaagcatgtccagtggttagagtggagggagataactgtgaggtgaaggatcccaggcatggcaacctctatgatcttaagcccctggggctcaacgataccattgtctccgccggtgaatacacctactatttccgcgtgtgtggaaagctgtcaagtgatgtgtgtcctacatctgacaaaagcaaggtcgtgagctcatgtcaggaaaaaagagagcctcagggattccacaaagttgcaggattgctcactcagaaattgacgtatgagaatgggctgctgaaaatgaacttcaccggtggagatacgtgccataaggtctaccaacggtccacagcaatattcttttattgcgaccgaggcacccaacgtccggtctttctcaaagaaaccagtgactgtagctacctcttcgagtggcgaacccaatacgcttgccccccatttgacctgacagaatgttcttttaaggatggagcagggaacagcttcgatctgtccagcttgtcaaggtattctgacaactgggaagctatcaccggtaccggcgatcctgaacactacttaatcaatgtctgtaagtccctggccccacaggccggtactgaaccttgcccaccagaagccgcagcttgcctgcttgggggatcaaagccagtcaacctgggccgagtacgcgatggtccgcagtggcgtgatggtattattgtgcttaagtacgttgacggtgatctctgtcccgatggcatccgcaaaaagagtaccaccattcgtttcacatgtagcgaaagccaggtgaattcccgtcccatgtttatatctgccgtcgaggattgtgaatacactttcgcttggcctacagccaccgcctgcccaatgaagagcaacgaacacgatgattgccaagttaccaatcccagtaccggacacttattcgacctgtcatcacttagcggcagagccggattcacagctgcttacagcgagaaagggctggtttatatgtctatctgtggcgaaaacgagaattgcccccctggggtcggcgcatgttttggccaaacccggatttctgtcggcaaggcaaacaagaggcttagatacgtcgaccaggtgctacagcttgtgtacaaggacggctcaccatgtccttccaaaagcgggctgtcttataaatctgtgatctcgtttgtctgtaggccagaagctcgcccaacaaaccggccaatgttaatctccctcgataagcaaacttgtaccttgttcttcagctggcacactccattggcctgtgaacaggccacggaatgttcagtgaggaatggctcttccattgtggacctgagcccactgattcacagaactggtgggtacgaagcttatgacgagtcagaagacgatgcctctgacacaaaccctgacttttatattaatatctgccagcccctgaatcccatgcatggcgttccctgtcccgcaggtgcagctgtgtgcaaggtgcctattgacggcccacctatcgatattgggcgtgtcgccggacccccaattctcaacccgatcgctaatgaaatctatctgaattttgagtcctccacaccttgtcttgccgacaaacactttaactacacctctctcattgctttccattgtaagcgtggtgttagcatgggtacccccaagctgctgaggacctcagaatgcgattttgtgtttgaatgggaaactcccgtcgtctgtccagacgaggtccgcatggacggttgtacccttacagatgagcagctgttgtatagcttcaacctctcctcactctccacaagcacttttaaggtgacacgtgactcaaggacctatagcgtgggcgtctgcaccttcgcggtgggaccggagcaaggagggtgtaaagatggcggagtctgcctattgagcgggacaaaaggggcttctttcggaagactgcagtcaatgaaactcgattaccgccaccaagacgaagcagtggttctctcttacgttaatggcgataggtgtcccccagaaaccgatgatggggttccctgcgtctttccattcattttcaatggaaaatcatacgaggagtgtattatcgaaagcagggctaagctctggtgtagcaccacagccgactatgacagagatcacgagtggggattctgcagacactcgaactcatatcgtacgtcctcgataatcttcaagtgtgacgaggacgaagacattggcaggcctcaagtgttctccgaagtccgcggttgcgatgtgacctttgaatggaaaactaaagttgtgtgcccgcctaagaaactcgagtgtaaattcgttcagaagcataaaacttacgatcttcggcttctctcaagcctgacaggctcctggagcctggttcataacggcgtcagttactacatcaatctgtgtcagaaaatttataaggggcctctgggatgttccgaaagggcgtcgatctgccgcaggaccacaacgggagatgtccaagtacttggtcttgtgcacacccagaaattgggtgtcatcggagacaaggtggtggtaacctattcaaagggatacccctgtggtggcaacaaaactgcctcttcagtcatcgaactgacgtgtacaaaaacagtgggccgacccgcttttaagcgctttgacatcgatagttgtacttactacttttcatgggattcccgggctgcatgtgccgtcaagccccaggaagtacaaatggttaacgggacaatcactaaccccatcaatggaaagtctttctctcttggtgatatatactttaagctattccgggcttcaggtgacatgcgcaccaacggggacaattatctttacgagatccaacttagcagcataacctcatctcggaacccagcatgctcaggagccaatatttgccaggtgaagccaaatgatcaacatttcagccggaaagtaggcacttctgataagactaagtactacctgcaggacggagacctggacgttgtgtttgcatcatcgagtaaatgcggtaaagataaaactaaatccgtttcttctacaatctttttccactgcgacccgctggtcgaggacggtattccggagttcagtcacgagactgcagattgtcagtacttgttcagctggtacacatcagccgtttgtcccttaggcgttggtttcgacagcgaaaatcctggagacgacgggcaaatgcacaagggactctcggagcgcagccaggctgtaggtgccgtgctgtcattacttctggtcgccctgacttgttgcttgcttgctcttctgctctacaagaaggagcgcagggagacagtcatttcaaaacttaccacatgttgccgccgaagtagcaacgtgtcctataagtattcaaaggtgaacaaggaagaggaaaccgatgagaatgagaccgagtggctgatggaggagattcaactgccaccacccaggcaggggaaggaaggacaagagaacggacatatcacaaccaaaagtgtgaaagccttatctagcctccacggcgacgaccaggactccgaggacgaggttttgacaattcccgaagtaaaggtacattcagggcgtggagccggtgccgagtcttctcaccccgttcggaatgcacagagtaacgctctgcaagagcgcgaagacgaccgtgtaggtctggtgcgcggtgagaaggcgcgtaagggcaaatcatcaagcgctcagcagaagacagtgagctccaccaaattggtctcctttcatgatgattcagacgaggatctgttacatatcta

SEQ ID NO: 16665 - DNA, 7476 bp, Artificial Sequence
  derived and/or modified sequence
atgggcgccgccgccggcagaagcccccacctgggccccgcccccgccagaagaccccagagaagcctgctgctgctgcagctgctgctgctggtggccgcccccggcagcacccaggcccaggccgcccccttccccgagctgtgcagctacacctgggaggccgtggacaccaagaacaacgtgctgtacaagatcaacatctgcggcagcgtggacatcgtgcagtgcggccccagcagcgccgtgtgcatgcacgacctgaagaccagaacctaccacagcgtgggcgacagcgtgctgagaagcgccaccagaagcctgctggagttcaacaccaccgtgagctgcgaccagcagggcaccaaccacagagtgcagagcagcatcgccttcctgtgcggcaagaccctgggcacccccgagttcgtgaccgccaccgagtgcgtgcactacttcgagtggagaaccaccgccgcctgcaagaaggacatcttcaaggccaacaaggaggtgccctgctacgtgttcgacgaggagctgagaaagcacgacctgaaccccctgatcaagctgagcggcgcctacctggtggacgacagcgaccccgacaccagcctgttcatcaacgtgtgcagagacatcgacaccctgagagaccccggcagccagctgagagcctgcccccccggcaccgccgcctgcctggtgagaggccaccaggccttcgacgtgggccagcccagagacggcctgaagctggtgagaaaggacagactggtgctgagctacgtgagagaggaggccggcaagctggacttctgcgacggccacagccccgccgtgaccatcaccttcgtgtgccccagcgagagaagagagggcaccatccccaagctgaccgccaagagcaactgcagatacgagatcgagtggatcaccgagtacgcctgccacagagactacctggagagcaagacctgcagcctgagcggcgagcagcaggacgtgagcatcgacctgacccccctggcccagagcggcggcagcagctacatcagcgacggcaaggagtacctgttctacctgaacgtgtgcggcgagaccgagatccagttctgcaacaagaagcaggccgccgtgtgccaggtgaagaagagcgacaccagccaggtgaaggccgccggcagataccacaaccagaccctgagatacagcgacggcgacctgaccctgatctacttcggcggcgacgagtgcagcagcggcttccagagaatgagcgtgatcaacttcgagtgcaacaagaccgccggcaacgacggcaagggcacccccgtgttcaccggcgaggtggactgcacctacttcttcacctgggacaccgagtacgcctgcgtgaaggagaaggaggacctgctgtgcggcgccaccgacggcaagaagagatacgacctgagcgccctggtgagacacgccgagcccgagcagaactgggaggccgtggacggcagccagaccgagaccgagaagaagcacttcttcatcaacatctgccacagagtgctgcaggagggcaaggccagaggctgccccgaggacgccgccgtgtgcgccgtggacaagaacggcagcaagaacctgggcaagttcatcagcagccccatgaaggagaagggcaacatccagctgagctacagcgacggcgacgactgcggccacggcaagaagatcaagaccaacatcaccctggtgtgcaagcccggcgacctggagagcgcccccgtgctgagaaccagcggcgagggcggctgcttctacgagttcgagtggcacaccgccgccgcctgcgtgctgagcaagaccgagggcgagaactgcaccgtgttcgacagccaggccggcttcagcttcgacctgagccccctgaccaagaagaacggcgcctacaaggtggagaccaagaagtacgacttctacatcaacgtgtgcggccccgtgagcgtgagcccctgccagcccgacagcggcgcctgccaggtggccaagagcgacgagaagacctggaacctgggcctgagcaacgccaagctgagctactacgacggcatgatccagctgaactacagaggcggcaccccctacaacaacgagagacacacccccagagccaccctgatcaccttcctgtgcgacagagacgccggcgtgggcttccccgagtaccaggaggaggacaacagcacctacaacttcagatggtacaccagctacgcctgccccgaggagcccctggagtgcgtggtgaccgaccccagcaccctggagcagtacgacctgagcagcctggccaagagcgagggcggcctgggcggcaactggtacgccatggacaacagcggcgagcacgtgacctggagaaagtactacatcaacgtgtgcagacccctgaaccccgtgcccggctgcaacagatacgccagcgcctgccagatgaagtacgagaaggaccagggcagcttcaccgaggtggtgagcatcagcaacctgggcatggccaagaccggccccgtggtggaggacagcggcagcctgctgctggagtacgtgaacggcagcgcctgcaccaccagcgacggcagacagaccacctacaccaccagaatccacctggtgtgcagcagaggcagactgaacagccaccccatcttcagcctgaactgggagtgcgtggtgagcttcctgtggaacaccgaggccgcctgccccatccagaccaccaccgacaccgaccaggcctgcagcatcagagaccccaacagcggcttcgtgttcaacctgaaccccctgaacagcagccagggctacaacgtgagcggcatcggcaagatcttcatgttcaacgtgtgcggcaccatgcccgtgtgcggcaccatcctgggcaagcccgccagcggctgcgaggccgagacccagaccgaggagctgaagaactggaagcccgccagacccgtgggcatcgagaagagcctgcagctgagcaccgagggcttcatcaccctgacctacaagggccccctgagcgccaagggcaccgccgacgccttcatcgtgagattcgtgtgcaacgacgacgtgtacagcggccccctgaagttcctgcaccaggacatcgacagcggccagggcatcagaaacacctacttcgagttcgagaccgccctggcctgcgtgcccagccccgtggactgccaggtgaccgacctggccggcaacgagtacgacctgaccggcctgagcaccgtgagaaagccctggaccgccgtggacaccagcgtggacggcagaaagagaaccttctacctgagcgtgtgcaaccccctgccctacatccccggctgccagggcagcgccgtgggcagctgcctggtgagcgagggcaacagctggaacctgggcgtggtgcagatgagcccccaggccgccgccaacggcagcctgagcatcatgtacgtgaacggcgacaagtgcggcaaccagagattcagcaccagaatcaccttcgagtgcgcccagatcagcggcagccccgccttccagctgcaggacggctgcgagtacgtgttcatctggagaaccgtggaggcctgccccgtggtgagagtggagggcgacaactgcgaggtgaaggaccccagacacggcaacctgtacgacctgaagcccctgggcctgaacgacaccatcgtgagcgccggcgagtacacctactacttcagagtgtgcggcaagctgagcagcgacgtgtgccccaccagcgacaagagcaaggtggtgagcagctgccaggagaagagagagccccagggcttccacaaggtggccggcctgctgacccagaagctgacctacgagaacggcctgctgaagatgaacttcaccggcggcgacacctgccacaaggtgtaccagagaagcaccgccatcttcttctactgcgacagaggcacccagagacccgtgttcctgaaggagaccagcgactgcagctacctgttcgagtggagaacccagtacgcctgcccccccttcgacctgaccgagtgcagcttcaaggacggcgccggcaacagcttcgacctgagcagcctgagcagatacagcgacaactgggaggccatcaccggcaccggcgaccccgagcactacctgatcaacgtgtgcaagagcctggccccccaggccggcaccgagccctgcccccccgaggccgccgcctgcctgctgggcggcagcaagcccgtgaacctgggcagagtgagagacggcccccagtggagagacggcatcatcgtgctgaagtacgtggacggcgacctgtgccccgacggcatcagaaagaagagcaccaccatcagattcacctgcagcgagagccaggtgaacagcagacccatgttcatcagcgccgtggaggactgcgagtacaccttcgcctggcccaccgccaccgcctgccccatgaagagcaacgagcacgacgactgccaggtgaccaaccccagcaccggccacctgttcgacctgagcagcctgagcggcagagccggcttcaccgccgcctacagcgagaagggcctggtgtacatgagcatctgcggcgagaacgagaactgcccccccggcgtgggcgcctgcttcggccagaccagaatcagcgtgggcaaggccaacaagagactgagatacgtggaccaggtgctgcagctggtgtacaaggacggcagcccctgccccagcaagagcggcctgagctacaagagcgtgatcagcttcgtgtgcagacccgaggccagacccaccaacagacccatgctgatcagcctggacaagcagacctgcaccctgttcttcagctggcacacccccctggcctgcgagcaggccaccgagtgcagcgtgagaaacggcagcagcatcgtggacctgagccccctgatccacagaaccggcggctacgaggcctacgacgagagcgaggacgacgccagcgacaccaaccccgacttctacatcaacatctgccagcccctgaaccccatgcacggcgtgccctgccccgccggcgccgccgtgtgcaaggtgcccatcgacggcccccccatcgacatcggcagagtggccggcccccccatcctgaaccccatcgccaacgagatctacctgaacttcgagagcagcaccccctgcctggccgacaagcacttcaactacaccagcctgatcgccttccactgcaagagaggcgtgagcatgggcacccccaagctgctgagaaccagcgagtgcgacttcgtgttcgagtgggagacccccgtggtgtgccccgacgaggtgagaatggacggctgcaccctgaccgacgagcagctgctgtacagcttcaacctgagcagcctgagcaccagcaccttcaaggtgaccagagacagcagaacctacagcgtgggcgtgtgcaccttcgccgtgggccccgagcagggcggctgcaaggacggcggcgtgtgcctgctgagcggcaccaagggcgccagcttcggcagactgcagagcatgaagctggactacagacaccaggacgaggccgtggtgctgagctacgtgaacggcgacagatgcccccccgagaccgacgacggcgtgccctgcgtgttccccttcatcttcaacggcaagagctacgaggagtgcatcatcgagagcagagccaagctgtggtgcagcaccaccgccgactacgacagagaccacgagtggggcttctgcagacacagcaacagctacagaaccagcagcatcatcttcaagtgcgacgaggacgaggacatcggcagaccccaggtgttcagcgaggtgagaggctgcgacgtgaccttcgagtggaagaccaaggtggtgtgcccccccaagaagctggagtgcaagttcgtgcagaagcacaagacctacgacctgagactgctgagcagcctgaccggcagctggagcctggtgcacaacggcgtgagctactacatcaacctgtgccagaagatctacaagggccccctgggctgcagcgagagagccagcatctgcagaagaaccaccaccggcgacgtgcaggtgctgggcctggtgcacacccagaagctgggcgtgatcggcgacaaggtggtggtgacctacagcaagggctacccctgcggcggcaacaagaccgccagcagcgtgatcgagctgacctgcaccaagaccgtgggcagacccgccttcaagagattcgacatcgacagctgcacctactacttcagctgggacagcagagccgcctgcgccgtgaagccccaggaggtgcagatggtgaacggcaccatcaccaaccccatcaacggcaagagcttcagcctgggcgacatctacttcaagctgttcagagccagcggcgacatgagaaccaacggcgacaactacctgtacgagatccagctgagcagcatcaccagcagcagaaaccccgcctgcagcggcgccaacatctgccaggtgaagcccaacgaccagcacttcagcagaaaggtgggcaccagcgacaagaccaagtactacctgcaggacggcgacctggacgtggtgttcgccagcagcagcaagtgcggcaaggacaagaccaagagcgtgagcagcaccatcttcttccactgcgaccccctggtggaggacggcatccccgagttcagccacgagaccgccgactgccagtacctgttcagctggtacaccagcgccgtgtgccccctgggcgtgggcttcgacagcgagaaccccggcgacgacggccagatgcacaagggcctgagcgagagaagccaggccgtgggcgccgtgctgagcctgctgctggtggccctgacctgctgcctgctggccctgctgctgtacaagaaggagagaagagagaccgtgatcagcaagctgaccacctgctgcagaagaagcagcaacgtgagctacaagtacagcaaggtgaacaaggaggaggagaccgacgagaacgagaccgagtggctgatggaggagatccagctgcccccccccagacagggcaaggagggccaggagaacggccacatcaccaccaagagcgtgaaggccctgagcagcctgcacggcgacgaccaggacagcgaggacgaggtgctgaccatccccgaggtgaaggtgcacagcggcagaggcgccggcgccgagagcagccaccccgtgagaaacgcccagagcaacgccctgcaggagagagaggacgacagagtgggcctggtgagaggcgagaaggccagaaagggcaagagcagcagcgcccagcagaagaccgtgagcagcaccaagctggtgagcttccacgacgacagcgacgaggacctgctgcacatctag

SEQ ID NO: 16666 - protein, 551 aa, Artificial Sequence
  derived and/or modified sequence
MAAPALSWRLPLLILLLPLATSWASAAVNGTSQFTCFYNSRANISCVWSQDGALQDTSCQVHAWPDRRRWNQTCELLPVSQASWACNLILGAPDSQKLTTVDIVTLRVLCREGVRWRVMAIQDFKPFENLRLMAPISLQVVHVETHRCNISWEISQASHYFERHLEFEARTLSPGHTWEEAPLLTLKQKQEWICLETLTPDTQYEFQVRVKPLQGEFTTWSPWSQPLAFRTKPAALGKDTIPWLGHLLVGLSGAFGFIILVYLLINCRNTGPWLKKVLKCNTPDPSKFFSQLSSEHGGDVQKWLSSPFPSSSFSPGGLAPEISPLEVLERDKVTQLLLQQDKVPEPASLSSNHSLTSCFTNQGYFFFHLPDALEIEACQVYFTYDPYSEEDPDEGVAGAPTGSSPQPLQPLSGEDDAYCTFPSRDDLLLFSPSLLGGPSPPSTAPGGSGAGEERMPPSLQERVPRDWDPQPLGPPTPGVPDLVDFQPPPELVLREAGEEVPDAGPREGVSFPWSRPPGQGEFRALNARLPLNTDAYLSLQELQGQDPTHLV

SEQ ID NO: 16667 - protein, 146 aa, Artificial Sequence
  derived and/or modified sequence
MAAPALSWRLPLLILLLPLATSWASAAVNGTSQFTCFYNSRANISCVWSQDGALQDTSCQVHAWPDRRRWNQTCELLPVSQASWACNLILGAPDSQKLTTVDIVTLRVLCREGVRWRVMAIQDFKPFENLRLMAPISLQVVHVETH

SEQ ID NO: 16668 - protein, 88 aa, Artificial Sequence
  derived and/or modified sequence
MAAPALSWRLPLLILLLPLATSWASAAVNGTSQFTCFYNSRANISCVWSQDGALQDTSCQVHAWPDRRRWNQTCELLPVSQASWACNL

SEQ ID NO: 16669 - protein, 188 aa, Artificial Sequence
  derived and/or modified sequence
MAAPALSWRLPLLILLLPLATSWASAAVNGTSQFTCFYNSRANISCVWSQDGALQDTSCQVHAWPDRRRWNQTCELLPVSQASWACNLILGAPDSQKLTTVDIVTLRVLCREGVRWRVMAIQDFKPFENLRLMAPISLQVVHVETHRCNISWEISQASHYFERHLEFEARTLSPGHTWEEAPLLTLKQ

SEQ ID NO: 16670 - DNA, 1656 bp, Artificial Sequence
  derived and/or modified sequence
atggctgcaccagctctatcctggcgacttccattgctcatccttctgctccccctggctacctcgtgggcctcagcagccgttaatggaacctcccagtttacttgcttttacaactcaagagcgaatatttcatgcgtgtggtcacaggatggcgccctccaggacacatcctgccaggtacacgcatggccagacagacggagatggaatcagacatgtgagttgctgcccgtgagccaagcttcgtgggcctgtaatttgattttaggagcccctgatagtcagaaactgacaactgttgatatcgtcacactgcgtgtgttgtgccgcgagggcgttcggtggagagtgatggcgatccaagattttaagcctttcgagaacttaagactgatggctccaattagtttacaggtggtgcacgtcgagacgcaccgttgtaacatttcctgggaaatttcacaagcctctcattactttgagagacacctggagtttgaggcccggacactgtcacccggtcacacctgggaggaggcccctctcctgacgcttaaacagaaacaagaatggatctgcctggagactcttacacctgatactcagtatgagtttcaagtccgagtgaagcccctccaaggtgaatttaccacatggagtccgtggtctcaaccgcttgccttcagaacaaagcctgctgcattgggtaaggataccataccctggctgggacatctcttggtcggtctctccggcgcttttgggttcatcattctggtgtacctcctcatcaactgcagaaataccggcccttggcttaagaaggtgctgaagtgcaatacccctgacccctctaagttcttttctcagctttcatccgaacacggcggcgatgtccaaaaatggctgtcgagtccctttccaagcagcagctttagcccaggagggcttgctcccgagattagccccttggaggtgctcgagcgggacaaagtcacacaactactgcttcagcaagacaaagtgcctgagcctgccagcctatcttccaaccactccctaactagttgttttacaaaccagggatatttttttttccacttgcccgacgcgctcgaaattgaagcgtgtcaggtgtatttcacttacgatccttactctgaagaggaccccgatgagggagtagcgggggctcccaccggctcttcaccacagccgctgcagccgctctctggagaggatgacgcatactgcacttttccatctagagatgatctgctgcttttctcaccctcactgctggggggccccagccctccatccaccgcgccaggcgggtcgggcgcaggagaagagaggatgccacccagtttgcaggagcgagtgcccagggactgggaccctcagcccctcggccctcctaccccaggggtacctgatctggtggacttccagcctccgccagaactcgtcttaagagaagccggtgaagaggtcccggatgccgggcctcgcgaaggcgtgtcatttccttggtcgcggcctcctggacagggggagtttcgtgccttgaacgctaggctgcctctgaataccgatgcctatctgagcttgcaagagcttcagggccaagatcctacacacctcgtgtag

SEQ ID NO: 16671 - DNA, 1656 bp, Artificial Sequence
  derived and/or modified sequence
atggccgccccagccctgtcctggaggctgcccctgctgatcctgctgctgcccctggccacctcctgggccagcgctgctgtgaatggcaccagccagttcacctgcttctacaacagccgggccaacatcagctgtgtgtggagccaggatggagccctgcaggacaccagctgccaggtgcacgcctggccagacagaagacgctggaaccagacctgtgagctgctgcctgtgtcccaggcctcctgggcctgcaacctgatcctgggcgccccagacagccagaagctgaccaccgtggacatcgtgaccctgcgggtgctgtgccgggagggcgtgcgctggagggtgatggccatccaggacttcaagccctttgagaacctgcggctgatggcccccatcagcctgcaggtggtgcacgtggagacccaccgctgcaacatctcctgggagatcagccaggccagccactactttgagcggcacctggagtttgaggcccggaccctgagccctggccacacctgggaggaggcccccctgctgaccctgaagcagaagcaggagtggatctgcctggagaccctgaccccagacacccagtatgagttccaggtgcgggtgaagcccctgcagggcgagttcaccacctggagcccctggagccagcccctggccttccgcaccaagccagctgccctgggcaaggacaccatcccctggctgggccacctgctggtgggcctgagcggggccttcggcttcatcatcctggtgtacctgctgatcaactgcaggaacacaggcccctggctgaagaaggtgctgaagtgcaacaccccagaccccagcaagttcttcagccagctgagcagcgagcacggcggagatgtgcagaagtggctgagcagccccttccccagcagcagcttcagccctgggggcctggcccctgagatcagccccctggaggtgctggagcgggacaaggtgacccagctgctgctgcagcaggacaaggtgcctgagcccgccagcctgagcagcaaccacagcctgaccagctgcttcaccaaccagggctacttcttcttccacctgcctgatgccctggagattgaggcctgccaggtgtacttcacctatgacccctacagcgaggaggaccctgatgaaggagtggccggggcccccaccggcagcagcccccagcccctgcagcccctgagcggggaggatgatgcctactgcaccttccccagcagagatgacctgctgctcttcagccccagcctgctgggcggccccagcccccccagcacagcccctgggggcagcggggccggggaggagaggatgccacccagcctgcaggagcgggtgccccgggactgggacccccagcccctgggcccccccaccccaggagtgcctgacctggtggacttccagcccccacctgagctggtgctgcgggaggccggggaggaggtgcctgatgctggcccccgggagggcgtgtccttcccctggagccggcccccaggccagggcgagttccgggccctgaatgcccggctgcccctgaacacagatgcctacctgagcctgcaggagctgcagggccaggaccccacccacctggtgtag

SEQ ID NO: 16672 - DNA, 1656 bp, Artificial Sequence
  derived and/or modified sequence
atggccgcccccgccctgagctggcggctgcccctgctgatcctgctgctgcctttggcaacctcatgggctagcgccgccgtcaacggtacctcccaattcacttgtttttataactctcgtgcaaatattagctgtgtttggtcccaagatggtgctttacaggatactagctgtcaggtccatgcctggccagaccgccgccggtggaaccagacatgtgaacttctacctgtgagccaggccagttgggcatgtaatcttattttgggggccccagactctcaaaagctgaccactgtggatatcgtgactctgcgggtactatgtcgtgagggtgtgcgctggcgtgtgatggccatacaggattttaagccctttgaaaatctacgactcatggctccaatcagtcttcaggtggtgcacgtcgagacccacaggtgcaatatctcctgggagatctcccaagcatcgcactacttcgagaggcacctggagtttgaagccagaaccctgagtccaggacacacatgggaagaagcaccactcctcaccctcaaacagaaacaggagtggatttgcttggagacacttacccccgacacccagtacgaattccaggtccgggtcaagcccctgcagggtgagttcaccacctggtctccctggtcccagcccctggccttcaggacaaaacctgctgcccttggtaaggacaccatcccctggctcggccacctgctggttggactctcaggcgcatttggttttataatcctggtatacctgctcatcaattgccgcaatactggcccgtggctgaagaaagtcctgaaatgcaacactccggatccgagcaagtttttctcccagctttcctccgaacacggaggcgacgtgcagaagtggctcagtagtcctttcccttcttccagcttctcccccggagggctcgcccccgagatcagccccttggaggtcctggaacgagacaaggtcacacagctgctgctgcagcaggataaggttcccgagccagcttcactgtcttctaaccacagcctcacttcatgtttcacaaaccagggctattttttctttcacctgcccgacgccctggagatcgaggcatgccaagtctacttcacttacgacccctacagcgaagaagaccctgatgagggcgtggctggtgctccaaccggcagctccccacagcccctgcagccgctgtcaggcgaagatgatgcctattgcaccttcccaagcagggacgacctcttgctattttctccatcgctgctcggcgggccatcaccgccctctaccgctccagggggctccggagcaggggaagagcggatgccaccgagcctgcaggaaagagtgccccgcgactgggatccacagcctttggggccccccaccccaggggtgcctgatctggtggatttccaaccaccacctgaactagtgctgagggaggctggtgaagaggtgccagatgccgggccccgggaaggagtcagtttcccttggagcagaccacccgggcagggcgagttcagagcccttaacgctagactgccccttaataccgacgcatatctgtctctgcaggagctgcagggccaggatcctacacaccttgtctag

SEQ ID NO: 16673 - DNA, 1656 bp, Artificial Sequence
  derived and/or modified sequence
atggccgctcccgctctgtcttggagactgcccctcctgattctcctactgcccttggcaacttcttgggcaagcgcggctgttaacgggacatctcagttcacatgtttttataattccagagctaatatttcatgtgtgtggtctcaagacggggcattacaagacactagttgtcaggtgcacgcgtggcctgatagaaggaggtggaaccagacttgtgagcttttgcccgtatcccaggcatcttgggcttgcaacttgatcctcggagctcctgattcacagaaacttactaccgttgacatcgttacgttgagggtgctttgtcgggaaggggttaggtggcgcgtcatggcaatccaggactttaaacccttcgagaacctgaggctgatggccccaatcagcttgcaggtggtgcatgttgaaacccatcggtgtaatatatcgtgggagatttctcaggcctctcactactttgagagacaccttgagtttgaggcccgaaccctctccccaggccatacttgggaggaagccccactgctaaccctgaagcagaaacaagagtggatctgccttgaaaccttgacacctgacactcagtacgagtttcaagtgcgtgtgaagccgctccaaggggagttcacgacatggtctccatggtcgcaacctttggccttccggaccaaacctgcagcactgggaaaagatacaattccctggctaggtcacctcctggttggcctcagtggcgctttcgggttcattattctggtgtacctgctgataaactgtcggaatactggcccttggctaaagaaggtcctgaaatgtaacacacccgacccctccaagtttttcagccagctgtcctccgagcatgggggagacgtgcagaagtggctgagttcaccctttccatcttcttctttcagccccggaggtcttgctccagaaatctcgcccctggaggtgctggagcgagacaaggtgactcagctgctgctgcagcaggacaaagtgcccgaacccgcatccttatcctccaaccactccctcacgtcttgcttcacgaaccagggctatttctttttccacctgcccgacgcccttgagattgaagcctgccaggtgtatttcacttatgatccatacagcgaagaggatccagacgagggagtggccggtgctccaacaggttcttcaccacagccactgcagcctctgagcggtgaggatgacgcgtattgcacgttcccctcaagagacgacctactcctgtttagtccttccttactaggcggtccctcccctcccagcacagcccctgggggatctggggcaggggaggagaggatgcccccttccctgcaggaaagagtgcctcgcgactgggatccccagcctctggggcctccaacacctggtgtcccggatctggtggacttccagcccccaccggaactggtccttcgcgaagccggtgaggaggttcccgatgcaggcccacgcgagggcgtttcattcccttggtctcggcctcctggacaaggtgaatttcgggctttgaatgcaagactcccactgaatactgacgcttacctgtccctccaagagctgcagggtcaagaccctacacacctggtgtag

SEQ ID NO: 16674 - DNA, 1656 bp, Artificial Sequence
  derived and/or modified sequence
atggccgcccccgccctgagctggagactgcccctgctgatcctgctgctgcccctggccaccagctgggccagcgccgccgtgaacggcaccagccagttcacctgcttctacaacagcagagccaacatcagctgcgtgtggagccaggacggcgccctgcaggacaccagctgccaggtgcacgcctggcccgacagaagaagatggaaccagacctgcgagctgctgcccgtgagccaggccagctgggcctgcaacctgatcctgggcgcccccgacagccagaagctgaccaccgtggacatcgtgaccctgagagtgctgtgcagagagggcgtgagatggagagtgatggccatccaggacttcaagcccttcgagaacctgagactgatggcccccatcagcctgcaggtggtgcacgtggagacccacagatgcaacatcagctgggagatcagccaggccagccactacttcgagagacacctggagttcgaggccagaaccctgagccccggccacacctgggaggaggcccccctgctgaccctgaagcagaagcaggagtggatctgcctggagaccctgacccccgacacccagtacgagttccaggtgagagtgaagcccctgcagggcgagttcaccacctggagcccctggagccagcccctggccttcagaaccaagcccgccgccctgggcaaggacaccatcccctggctgggccacctgctggtgggcctgagcggcgccttcggcttcatcatcctggtgtacctgctgatcaactgcagaaacaccggcccctggctgaagaaggtgctgaagtgcaacacccccgaccccagcaagttcttcagccagctgagcagcgagcacggcggcgacgtgcagaagtggctgagcagccccttccccagcagcagcttcagccccggcggcctggcccccgagatcagccccctggaggtgctggagagagacaaggtgacccagctgctgctgcagcaggacaaggtgcccgagcccgccagcctgagcagcaaccacagcctgaccagctgcttcaccaaccagggctacttcttcttccacctgcccgacgccctggagatcgaggcctgccaggtgtacttcacctacgacccctacagcgaggaggaccccgacgagggcgtggccggcgcccccaccggcagcagcccccagcccctgcagcccctgagcggcgaggacgacgcctactgcaccttccccagcagagacgacctgctgctgttcagccccagcctgctgggcggccccagcccccccagcaccgcccccggcggcagcggcgccggcgaggagagaatgccccccagcctgcaggagagagtgcccagagactgggacccccagcccctgggcccccccacccccggcgtgcccgacctggtggacttccagcccccccccgagctggtgctgagagaggccggcgaggaggtgcccgacgccggccccagagagggcgtgagcttcccctggagcagaccccccggccagggcgagttcagagccctgaacgccagactgcccctgaacaccgacgcctacctgagcctgcaggagctgcagggccaggaccccacccacctggtgtag

SEQ ID NO: 16675 - DNA, 441 bp, Artificial Sequence
  derived and/or modified sequence
atggcggctcccgccctatcttggcgcctgccattgctcatcttgcttttacccctggccactagttgggcctctgcagccgtcaatggcacatcccagtttacctgcttttataactctagagccaacatctcctgtgtatggtctcaggatggggctctgcaagacaccagttgtcaggttcacgcgtggcctgatagaaggcggtggaaccagacctgtgaactgttgcccgtgtctcaggcaagctgggcctgcaatttaattctgggagcacctgattcacaaaaacttaccactgttgatatcgtgacactgagagttctttgtagagagggtgtacgctggcgcgtgatggctattcaggatttcaaaccttttgagaatctccgactgatggctcctatttctctgcaggtcgtacacgtggaaacacactag

SEQ ID NO: 16676 - DNA, 267 bp, Artificial Sequence
  derived and/or modified sequence
atggctgcaccagccctgagctggcgtctgcccctgcttatactccttctgccgctggccacctcatgggcttccgccgccgtgaacggtactagtcagttcacttgtttctataattctagagcgaacatatcctgtgtctggagccaggacggtgctctgcaagacacctcttgccaggtgcatgcttggccggacaggagaaggtggaatcagacctgcgagttactgccagttagccaggcctcgtgggcatgcaatctgtag

SEQ ID NO: 16677 - DNA, 567 bp, Artificial Sequence
  derived and/or modified sequence
atggccgcccctgcactaagttggagacttcctctgctgattctcctgctgccactcgcgacctcatgggctagcgccgctgtcaacggcaccagccagtttacctgcttttacaattcgcgggctaacatttcatgtgtttggtcgcaggatggagcgctgcaggacacctcctgtcaggtacacgcatggccagatagaaggcggtggaaccagacctgtgagctcctccctgtttctcaagcgtcttgggcctgtaatctcatcctgggagctcccgactctcagaaattgactactgttgacatcgtcaccttgcgcgttctctgcagagaaggggtcaggtggcgggtgatggcaatccaagatttcaagcccttcgaaaatctgcggctcatggcaccaatcagtctgcaggtcgtgcacgttgagacacacaggtgcaatataagctgggagatttctcaggccagccactacttcgagaggcatctggaattcgaggcacgcacactttccccaggccacacctgggaggaagccccattgctgacactcaagcagtag

SEQ ID NO: 16678 - DNA, 4113 bp, Artificial Sequence
  derived and/or modified sequence
aggccttgcccctctatcctctgcacaggaagtgggctggctctgggcttttagtctttgcggccccagcagccagagctcagcagggccctggagagatggccacggtcccagcaccggggaggactggagagcgcgcgctgccaccgccccatgtctcagccagggcttccttcctcggctccaccctgtggatgtaatggcggcccctgctctgtcctggcgtctgcccctcctcatcctcctcctgcccctggctacctcttgggcatctgcagcggtgaatggcacttcccagttcacatgcttctacaactcgagagccaacatctcctgtgtctggagccaagatggggctctgcaggacacttcctgccaagtccatgcctggccggacagacggcggtggaaccaaacctgtgagctgctccccgtgagtcaagcatcctgggcctgcaacctgatcctcggagccccagattctcagaaactgaccacagttgacatcgtcaccctgagggtgctgtgccgtgagggggtgcgatggagggtgatggccatccaggacttcaagccctttgagaaccttcgcctgatggcccccatctccctccaagttgtccacgtggagacccacagatgcaacataagctgggaaatctcccaagcctcccactactttgaaagacacctggagttcgaggcccggacgctgtccccaggccacacctgggaggaggcccccctgctgactctcaagcagaagcaggaatggatctgcctggagacgctcaccccagacacccagtatgagtttcaggtgcgggtcaagcctctgcaaggcgagttcacgacctggagcccctggagccagcccctggccttcaggacaaagcctgcagcccttgggaaggacaccattccgtggctcggccacctcctcgtgggcctcagcggggcttttggcttcatcatcttagtgtacttgctgatcaactgcaggaacaccgggccatggctgaagaaggtcctgaagtgtaacaccccagacccctcgaagttcttttcccagctgagctcagagcatggaggagacgtccagaagtggctctcttcgcccttcccctcatcgtccttcagccctggcggcctggcacctgagatctcgccactagaagtgctggagagggacaaggtgacgcagctgctcctgcagcaggacaaggtgcctgagcccgcatccttaagcagcaaccactcgctgaccagctgcttcaccaaccagggttacttcttcttccacctcccggatgccttggagatagaggcctgccaggtgtactttacttacgacccctactcagaggaagaccctgatgagggtgtggccggggcacccacagggtcttccccccaacccctgcagcctctgtcaggggaggacgacgcctactgcaccttcccctccagggatgacctgctgctcttctcccccagtctcctcggtggccccagccccccaagcactgcccctgggggcagtggggccggtgaagagaggatgcccccttctttgcaagaaagagtccccagagactgggacccccagcccctggggcctcccaccccaggagtcccagacctggtggattttcagccaccccctgagctggtgctgcgagaggctggggaggaggtccctgacgctggccccagggagggagtcagtttcccctggtccaggcctcctgggcagggggagttcagggcccttaatgctcgcctgcccctgaacactgatgcctacttgtccctccaagaactccagggtcaggacccaactcacttggtgtagacagatggccagggtgggaggcaggcagctgcctgctctgcgccgagcctcagaaggaccctgttgagggtcctcagtccactgctgaggacactcagtgtccagttgcagctggacttctccacccggatggcccccacccagtcctgcacacttggtccatccatttccaaacctccactgctgctcccgggtcctgctgcccgagccaggaactgtgtgtgttgcaggggggcagtaactccccaactccctcgttaatcacaggatcccacgaatttaggctcagaagcatcgctcctctccagccctgcagctattcaccaatatcagtcctcgcggctctccagggctccctgccctgacctcttccctgggttttctgccccagcctcctccttccctcccctccccgtccacagggcagcctgagcgtgctttccaaaacccaaatatggccacgctccccctcggttcaaaaccttgcacaggtcccactgccctcagccccacttctcagcctggtacttgtacctccggtgtcgtgtggggacatccccttctgcaatcctccctaccgtcctcctgagccactcagagctccctcacaccccctctgttgcacatgctattccctggggctgctgtgcgctccccctcatctaggtgacaaacttccctgactcttcaagtgccggttttgcttctcctggagggaagcactgcctcccttaatctgccagaaacttctagcgtcagtgctggagggagaagctgtcagggacccagggcgcctggagaaagaggccctgttactattcctttgggatctctgaggcctcagagtgcttggctgctgtatctttaatgctggggcccaagtaagggcacagatccccccacaaagtggatgcctgctgcatcttcccacagtggcttcacagacccacaagagaagctgatggggagtaaaccctggagtccgaggcccaggcagcagccccgcctagtggtgggccctgatgctgccaggcctgggacctcccactgccccctccactggaggggtctcctctgcagctcagggactggcacactggcctccagaagggcagctccacagggcagggcctcattatttttcactgccccagacacagtgcccaacaccccgtcgtataccctggatgaacgaattaattacctggcaccacctcgtctgggctccctgcgcctgacattcacacagagaggcagagtcccgtgcccattaggtctggcatgccccctcctgcaaggggctcaaccccctaccccgacccctccacgtatctttcctaggcagatcacgttgcaatggctcaaacaacattccaccccagcaggacagtgaccccagtcccagctaactctgacctgggagccctcaggcacctgcacttacaggccttgctcacagctgattgggcacctgaccacacgcccccacaggctctgaccagcagcctatgagggggtttggcaccaagctctgtccaatcaggtaggctgggcctgaactagccaatcagatcaactctgtcttgggcgtttgaactcagggagggaggcccttgggagcaggtgcttgtggacaaggctccacaagcgttgagccttggaaaggtagacaagcgttgagccactaagcagaggaccttgggttcccaatacaaaaatacctactgctgagagggctgctgaccatttggtcaggattcctgttgcctttatatccaaaataaactcccctttcttgaggttgtctgagtcttgggtctatgccttgaaaaaagctgaattattggacagtctcacctcctgccatagggtcctgaatgtttcagaccacaaggggctccacacctttgctgtgtgttctggggcaacctactaatcctctctgcaagtcggtctccttatccccccaaatggaaattgtatttgccttctccactttgggaggctcccacttcttgggagggttacattttttaagtcttaatcatttgtgacatatgtatctatacatccgtatcttttaatgatccgtgtgtaccatctttgtgattatttccttaatattttttctttaagtcagttcattttcgttgaaatacatttatttaaagaaaaatctttgttactctgtaaatgaaaaaacccattttcgctataaataaaaggtaactgtacaaaataagtacaatgcaacaaaa

SEQ ID NO: 16679 - DNA, 569 bp, Artificial Sequence
  derived and/or modified sequence
acttcgctctcctgccagcatgtgaaggtgccttgcttccccttcgccttccaccacgattgtaagtttcctgaggcctccccagccatgtggaaccggcttccttcctcggctccaccctgtggatgtaatggcggcccctgctctgtcctggcgtctgcccctcctcatcctcctcctgcccctggctacctcttgggcatctgcagcggtgaatggcacttcccagttcacatgcttctacaactcgagagccaacatctcctgtgtctggagccaagatggggctctgcaggacacttcctgccaagtccatgcctggccggacagacggcggtggaaccaaacctgtgagctgctccccgtgagtcaagcatcctgggcctgcaacctgatcctcggagccccagattctcagaaactgaccacagttgacatcgtcaccctgagggtgctgtgccgtgagggggtgcgatggagggtgatggccatccaggacttcaagccctttgagaaccttcgcctgatggcccccatctccctccaagttgtccacgtggagacccaca

SEQ ID NO: 16680 - DNA, 587 bp, Artificial Sequence
  derived and/or modified sequence
acttcgctctcctgccagcatgtgaaggtgccttgcttccccttcgccttccaccacgattgtaagtttcctgaggcctccccagccatgtggaaccgacccgcaaatcaggcttggagaagcttggagaagcttggagaggcttggagaattgctgcatcctggacacgatgttccgacaccaccctcgccagcctccaggtcttggagttgaggcttctgattggggaagcctaatcacacgcacacacttcaggactgaggtctggagctgaggcttctgattggggcttccttcctcggctccaccctgtggatgtaatggcggcccctgctctgtcctggcgtctgcccctcctcatcctcctcctgcccctggctacctcttgggcatctgcagcggtgaatggcacttcccagttcacatgcttctacaactcgagagccaacatctcctgtgtctggagccaagatggggctctgcaggacacttcctgccaagtccatgcctggccggacagacggcggtggaaccaaacctgtgagctgctccccgtgagtcaagcatcctgggcctgcaacctgat

SEQ ID NO: 16681 - DNA, 660 bp, Artificial Sequence
  derived and/or modified sequence
acttcgctctcctgccagcatgtgaaggtgccttgcttccccttcgccttccaccacgattggcttccttcctcggctccaccctgtggatgtaatggcggcccctgctctgtcctggcgtctgcccctcctcatcctcctcctgcccctggctacctcttgggcatctgcagcggtgaatggcacttcccagttcacatgcttctacaactcgagagccaacatctcctgtgtctggagccaagatggggctctgcaggacacttcctgccaagtccatgcctggccggacagacggcggtggaaccaaacctgtgagctgctccccgtgagtcaagcatcctgggcctgcaacctgatcctcggagccccagattctcagaaactgaccacagttgacatcgtcaccctgagggtgctgtgccgtgagggggtgcgatggagggtgatggccatccaggacttcaagccctttgagaaccttcgcctgatggcccccatctccctccaagttgtccacgtggagacccacagatgcaacataagctgggaaatctcccaagcctcccactactttgaaagacacctggagttcgaggcccggacgctgtccccaggccacacctgggaggaggcccccctgctgactctcaagcagaa

SEQ ID NO: 16682 - DNA, 441 bp, Artificial Sequence
  derived and/or modified sequence
atggccgccccagccctgtcctggaggctgcccctgctgatcctgctgctgcccctggccacctcctgggccagcgctgctgtgaatggcaccagccagttcacctgcttctacaacagccgggccaacatcagctgtgtgtggagccaggatggagccctgcaggacaccagctgccaggtgcacgcctggccagacagaagacgctggaaccagacctgtgagctgctgcctgtgtcccaggcctcctgggcctgcaacctgatcctgggcgccccagacagccagaagctgaccaccgtggacatcgtgaccctgcgggtgctgtgccgggagggcgtgcgctggagggtgatggccatccaggacttcaagccctttgagaacctgcggctgatggcccccatcagcctgcaggtggtgcacgtggagacccactag

SEQ ID NO: 16683 - DNA, 267 bp, Artificial Sequence
  derived and/or modified sequence
atggccgccccagccctgtcctggaggctgcccctgctgatcctgctgctgcccctggccacctcctgggccagcgctgctgtgaatggcaccagccagttcacctgcttctacaacagccgggccaacatcagctgtgtgtggagccaggatggagccctgcaggacaccagctgccaggtgcacgcctggccagacagaagacgctggaaccagacctgtgagctgctgcctgtgtcccaggcctcctgggcctgcaacctgtag

SEQ ID NO: 16684 - DNA, 567 bp, Artificial Sequence
  derived and/or modified sequence
atggccgccccagccctgtcctggaggctgcccctgctgatcctgctgctgcccctggccacctcctgggccagcgctgctgtgaatggcaccagccagttcacctgcttctacaacagccgggccaacatcagctgtgtgtggagccaggatggagccctgcaggacaccagctgccaggtgcacgcctggccagacagaagacgctggaaccagacctgtgagctgctgcctgtgtcccaggcctcctgggcctgcaacctgatcctgggcgccccagacagccagaagctgaccaccgtggacatcgtgaccctgcgggtgctgtgccgggagggcgtgcgctggagggtgatggccatccaggacttcaagccctttgagaacctgcggctgatggcccccatcagcctgcaggtggtgcacgtggagacccaccgctgcaacatctcctgggagatcagccaggccagccactactttgagcggcacctggagtttgaggcccggaccctgagccctggccacacctgggaggaggcccccctgctgaccctgaagcagtag

SEQ ID NO: 16685 - DNA, 441 bp, Artificial Sequence
  derived and/or modified sequence
atggccgcccccgccctgagctggcggctgcccctgctgatcctgctcctgcctctggcgaccagctgggctagtgcagctgtcaacggcaccagccagtttacctgcttttacaacagccgggccaatatcagttgtgtgtggtcccaagatggcgcactgcaagatactagctgtcaggtgcacgcttggcccgaccgtagacgttggaaccagacatgtgagctgctccctgtgtctcaagcttcatgggcctgcaacttgatcctgggggcccccgacagccagaaactaacgactgtggatattgtaacgctacgggttctgtgccgcgagggcgtaagatggcgggtgatggccatccaggattttaaacccttcgagaacctaaggctgatggcccctatttccctacaggttgttcatgtcgaaacgcattag

SEQ ID NO: 16686 - DNA, 267 bp, Artificial Sequence
  derived and/or modified sequence
atggccgcccccgccctgagctggcggctgcccctgctgatcctgcttctgccactggccaccagctgggcatccgcagctgtgaacgggacgagccagtttacgtgtttctacaacagcagagccaatatatcctgcgtttggagccaagacggtgcgctacaagacaccagctgtcaggtccatgcttggcccgaccggcgccgatggaaccagacgtgtgagctgctccctgttagtcaggcctcttgggcttgtaatctgtag

SEQ ID NO: 16687 - DNA, 567 bp, Artificial Sequence
  derived and/or modified sequence
atggccgcccccgccctgagctggcggctgcccctgctgatcctgttgctgcctctggctacgagctgggcttctgccgcagtgaacggcacatcccagtttacgtgcttctataactcgagagccaacattagctgcgtgtggagccaggatggggctctgcaagacaccagctgccaggtgcacgcttggccagatcggcggcggtggaatcagacatgtgagctcctgccagttagccaggccagctgggcctgtaacctcatactgggagccccagactctcagaagctgactaccgtcgacatcgtcacacttcgtgtgttgtgtagggaaggagtcagatggcgcgtgatggcaattcaggacttcaaaccttttgagaatctgagactgatggctccgattagtctccaggtggtccacgtcgaaacacatagatgcaacatttcctgggagatctcccaggcctcccattatttcgagcgccatctggaattcgaagcaaggacgctgagcccaggacacacttgggaggaggcccccttgttgaccctgaagcagtag

SEQ ID NO: 16688 - DNA, 441 bp, Artificial Sequence
  derived and/or modified sequence
atggcagcccctgctctatcctggagattgccattactgatcctgctgctgcctctggccaccagctgggcatctgccgcagtgaacgggacaagccagtttacatgtttctataactcccgagctaacatcagttgtgtgtggtcacaggatggggctctgcaggatacctcctgccaagttcacgcctggccggataggagacggtggaatcaaacgtgcgagctcttacctgtttcacaagccagttgggcatgcaacctgattctaggagcacccgatagccagaagcttactacagtcgacatcgtgacgttgagggtcctgtgtcgagagggagtgcgatggcgggtaatggccattcaggattttaagccattcgagaatttgcgcctcatggcccctatatctctccaagtggtccacgtcgagacccattag

SEQ ID NO: 16689 - DNA, 267 bp, Artificial Sequence
  derived and/or modified sequence
atggccgcacccgctctcagttggagactgccactgctgatattgttactgccattagccacatcatgggccagcgcggctgtgaatgggaccagtcagtttacctgtttctataattcacgagcaaacatctcttgcgtatggagtcaggatggcgcactgcaagacacatcctgtcaggtccacgcttggcccgaccgcaggaggtggaaccagacgtgcgaactcttgcccgtttctcaggcctcttgggcttgtaacctctag

SEQ ID NO: 16690 - DNA, 567 bp, Artificial Sequence
  derived and/or modified sequence
atggcggctcccgctttgtcttggcgcctaccccttctgatcctgctcctcccattggccacatcctgggccagtgcagccgttaacgggacctcacaattcacatgcttctacaactcgagggctaatattagttgtgtttggagtcaggacggcgcactgcaggacacctcatgtcaggtgcatgcatggcctgatcgcaggcggtggaaccaaacatgcgaattactgcccgttagccaggctagctgggcctgcaacctgatactgggggcacccgattcccaaaagctgacaaccgtcgacatcgtaaccctgcgcgtgctatgtagggaaggagtgaggtggagagtcatggcgattcaggacttcaaacccttcgaaaacctaagactcatggcacccataagcctacaagtagtccatgtggagacacacaggtgtaatatcagctgggaaatcagccaggccagccactacttcgagagacatctggaatttgaagcacgaactctcagtcccggtcacacatgggaagaagcccctctcctgactttgaagcagtag

SEQ ID NO: 16691 - DNA, 441 bp, Artificial Sequence
  derived and/or modified sequence
atggccgcccccgccctgagctggagactgcccctgctgatcctgctgctgcccctggccaccagctgggccagcgccgccgtgaacggcaccagccagttcacctgcttctacaacagcagagccaacatcagctgcgtgtggagccaggacggcgccctgcaggacaccagctgccaggtgcacgcctggcccgacagaagaagatggaaccagacctgcgagctgctgcccgtgagccaggccagctgggcctgcaacctgatcctgggcgcccccgacagccagaagctgaccaccgtggacatcgtgaccctgagagtgctgtgcagagagggcgtgagatggagagtgatggccatccaggacttcaagcccttcgagaacctgagactgatggcccccatcagcctgcaggtggtgcacgtggagacccactag

SEQ ID NO: 16692 - DNA, 267 bp, Artificial Sequence
  derived and/or modified sequence
atggccgcccccgccctgagctggagactgcccctgctgatcctgctgctgcccctggccaccagctgggccagcgccgccgtgaacggcaccagccagttcacctgcttctacaacagcagagccaacatcagctgcgtgtggagccaggacggcgccctgcaggacaccagctgccaggtgcacgcctggcccgacagaagaagatggaaccagacctgcgagctgctgcccgtgagccaggccagctgggcctgcaacctgtag

SEQ ID NO: 16693 - DNA, 567 bp, Artificial Sequence
  derived and/or modified sequence
atggccgcccccgccctgagctggagactgcccctgctgatcctgctgctgcccctggccaccagctgggccagcgccgccgtgaacggcaccagccagttcacctgcttctacaacagcagagccaacatcagctgcgtgtggagccaggacggcgccctgcaggacaccagctgccaggtgcacgcctggcccgacagaagaagatggaaccagacctgcgagctgctgcccgtgagccaggccagctgggcctgcaacctgatcctgggcgcccccgacagccagaagctgaccaccgtggacatcgtgaccctgagagtgctgtgcagagagggcgtgagatggagagtgatggccatccaggacttcaagcccttcgagaacctgagactgatggcccccatcagcctgcaggtggtgcacgtggagacccacagatgcaacatcagctgggagatcagccaggccagccactacttcgagagacacctggagttcgaggccagaaccctgagccccggccacacctgggaggaggcccccctgctgaccctgaagcagtag

SEQ ID NO: 16694 - protein, 253 aa, Artificial Sequence
  derived and/or modified sequence
MWPPGSASQPPPSPAAATGLHPAARPVSLQCRLSMCPARSLLLVATLVLLDHLSLARNLPVATPDPGMFPCLHHSQNLLRAVSNMLQKARQTLEFYPCTSEEIDHEDITKDKTSTVEACLPLELTKNESCLNSRETSFITNGSCLASRKTSFMMALCLSSIYEDLKMYQVEFKTMNAKLLMDPKRQIFLDQNMLAVIDELMQALNFNSETVPQKSSLEEPDFYKTKIKLCILLHAFRIRAVTIDRVMSYLNAS

SEQ ID NO: 16695 - protein, 239 aa, Artificial Sequence
  derived and/or modified sequence
MWPPGSASQPPPSPAAATGLHPAARPVSLQCRLSMCPARSLLLVATLVLLDHLSLARNLPVATPDPGMFPCLHHSQNLLRAVSNMLQKARQTLEFYPCTSEEIDHEDITKDKTSTVEACLPLELTKNGSCLASRKTSFMMALCLSSIYEDLKMYQVEFKTMNAKLLMDPKRQIFLDQNMLAVIDELMQALNFNSETVPQKSSLEEPDFYKTKIKLCILLHAFRIRAVTIDRVMSYLNAS

SEQ ID NO: 16696 - protein, 215 aa, Artificial Sequence
  derived and/or modified sequence
MWPPGSASQPPPSPAAATGLHPAARPVSLQCRLSMCPARSLLLVATLVLLDHLSLARNLPVATPDPGMFPCLHHSQNLLRAVSNMLQKNESCLNSRETSFITNGSCLASRKTSFMMALCLSSIYEDLKMYQVEFKTMNAKLLMDPKRQIFLDQNMLAVIDELMQALNFNSETVPQKSSLEEPDFYKTKIKLCILLHAFRIRAVTIDRVMSYLNAS

SEQ ID NO: 16697 - protein, 219 aa, Artificial Sequence
  derived and/or modified sequence
MCPARSLLLVATLVLLDHLSLARNLPVATPDPGMFPCLHHSQNLLRAVSNMLQKARQTLEFYPCTSEEIDHEDITKDKTSTVEACLPLELTKNESCLNSRETSFITNGSCLASRKTSFMMALCLSSIYEDLKMYQVEFKTMNAKLLMDPKRQIFLDQNMLAVIDELMQALNFNSETVPQKSSLEEPDFYKTKIKLCILLHAFRIRAVTIDRVMSYLNAS

SEQ ID NO: 16698 - protein, 455 aa, Artificial Sequence
  derived and/or modified sequence
MCPARSLLLVATLVLLDHLSLARNLPVATPDPGMFPCLHHSQNLLRAVSNMLQKARQTLEFYPCTSEEIDHEDITKDKTSTVEACLPLELTKNESCLNSRETSFITNGSCLASRKTSFMMALCLSSIYEDLKMYQVEFKTMNAKLLMDPKRQIFLDQNMLAVIDELMQALNFNSETVPQKSSLEEPDFYKTKIKLCILLHAFRIRAVTIDRVMSYLNASGSGATNFSLLKQAGDVEEPGPRKGPPAALTLPRVQCRASRYPIAVDCSWTLPPAPNSTSPVSFIATYRLGMAARGHSWPCLQQTPTSTSCTITDVQLFSMAPYVLNVTAVHPWGSSSSFVPFITEHIIKPDPPEGVRLSPLAERQLQVQWEPPGSWPFPEIFSLKYWIRYKRQGAARFHRVGPIEATSFILRAVRPRARYYVQVAAQDLTDYGELSDWSLPATATMSLGKHHHHHH

SEQ ID NO: 16699 - protein, 452 aa, Artificial Sequence
  derived and/or modified sequence
MCPARSLLLVATLVLLDHLSLARNLPVATPDPGMFPCLHHSQNLLRAVSNMLQKARQTLEFYPCTSEEIDHEDITKDKTSTVEACLPLELTKNESCLNSRETSFITNGSCLASRKTSFMMALCLSSIYEDLKMYQVEFKTMNAKLLMDPKRQIFLDQNMLAVIDELMQALNFNSETVPQKSSLEEPDFYKTKIKLCILLHAFRIRAVTIDRVMSYLNASGGGSGGGSGGGSGGGSRKGPPAALTLPRVQCRASRYPIAVDCSWTLPPAPNSTSPVSFIATYRLGMAARGHSWPCLQQTPTSTSCTITDVQLFSMAPYVLNVTAVHPWGSSSSFVPFITEHIIKPDPPEGVRLSPLAERQLQVQWEPPGSWPFPEIFSLKYWIRYKRQGAARFHRVGPIEATSFILRAVRPRARYYVQVAAQDLTDYGELSDWSLPATATMSLGKDYKDDDDK

SEQ ID NO: 16700 - DNA, 762 bp, Artificial Sequence
  derived and/or modified sequence
atgtggccccccggcagcgccagccagcccccccccagccccgccgccgccaccggcctgcaccccgccgccagacccgtgagcctgcagtgcagactgagcatgtgccccgccagaagcctgctgctggtggccaccctggtgctgctggaccacctgagcctggccagaaacctgcccgtggccacccccgaccccggcatgttcccctgcctgcaccacagccagaacctgctgagagccgtgagcaacatgctgcagaaggccagacagaccctggagttctacccctgcaccagcgaggagatcgaccacgaggacatcaccaaggacaagaccagcaccgtggaggcctgcctgcccctggagctgaccaagaacgagagctgcctgaacagcagagagaccagcttcatcaccaacggcagctgcctggccagcagaaagaccagcttcatgatggccctgtgcctgagcagcatctacgaggacctgaagatgtaccaggtggagttcaagaccatgaacgccaagctgctgatggaccccaagagacagatcttcctggaccagaacatgctggccgtgatcgacgagctgatgcaggccctgaacttcaacagcgagaccgtgccccagaagagcagcctggaggagcccgacttctacaagaccaagatcaagctgtgcatcctgctgcacgccttcagaatcagagccgtgaccatcgacagagtgatgagctacctgaacgccagctag

SEQ ID NO: 16701 - DNA, 720 bp, Artificial Sequence
  derived and/or modified sequence
atgtggccccccggcagcgccagccagcccccccccagccccgccgccgccaccggcctgcaccccgccgccagacccgtgagcctgcagtgcagactgagcatgtgccccgccagaagcctgctgctggtggccaccctggtgctgctggaccacctgagcctggccagaaacctgcccgtggccacccccgaccccggcatgttcccctgcctgcaccacagccagaacctgctgagagccgtgagcaacatgctgcagaaggccagacagaccctggagttctacccctgcaccagcgaggagatcgaccacgaggacatcaccaaggacaagaccagcaccgtggaggcctgcctgcccctggagctgaccaagaacggcagctgcctggccagcagaaagaccagcttcatgatggccctgtgcctgagcagcatctacgaggacctgaagatgtaccaggtggagttcaagaccatgaacgccaagctgctgatggaccccaagagacagatcttcctggaccagaacatgctggccgtgatcgacgagctgatgcaggccctgaacttcaacagcgagaccgtgccccagaagagcagcctggaggagcccgacttctacaagaccaagatcaagctgtgcatcctgctgcacgccttcagaatcagagccgtgaccatcgacagagtgatgagctacctgaacgccagctag

SEQ ID NO: 16702 - DNA, 648 bp, Artificial Sequence
  derived and/or modified sequence
atgtggccccccggcagcgccagccagcccccccccagccccgccgccgccaccggcctgcaccccgccgccagacccgtgagcctgcagtgcagactgagcatgtgccccgccagaagcctgctgctggtggccaccctggtgctgctggaccacctgagcctggccagaaacctgcccgtggccacccccgaccccggcatgttcccctgcctgcaccacagccagaacctgctgagagccgtgagcaacatgctgcagaagaacgagagctgcctgaacagcagagagaccagcttcatcaccaacggcagctgcctggccagcagaaagaccagcttcatgatggccctgtgcctgagcagcatctacgaggacctgaagatgtaccaggtggagttcaagaccatgaacgccaagctgctgatggaccccaagagacagatcttcctggaccagaacatgctggccgtgatcgacgagctgatgcaggccctgaacttcaacagcgagaccgtgccccagaagagcagcctggaggagcccgacttctacaagaccaagatcaagctgtgcatcctgctgcacgccttcagaatcagagccgtgaccatcgacagagtgatgagctacctgaacgccagctag

SEQ ID NO: 16703 - DNA, 762 bp, Artificial Sequence
  derived and/or modified sequence
atgtggcccccaggcagcgccagccagccccccccctcccctgccgccgcgactggtcttcaccctgctgcccgtccagtcagtctgcagtgtaggctttcaatgtgccccgctcgcagcctcctgttggtggctaccctggtgctgctagaccatctgtccctggcccggaacctgcccgttgctacaccagaccccgggatgttcccctgcctgcaccattcccaaaacctgctgcgcgcggtcagcaacatgctccagaaggctcggcagactctcgaattctacccgtgtaccagtgaggagattgaccacgaggacataactaaagacaagacttccaccgttgaggcctgcctccccttagaactgactaaaaacgagtcatgtctcaattccagagaaacttcatttataacgaacggctcatgtctggccagcagaaagacaagctttatgatggccttgtgtctttcctctatttatgaggatctgaagatgtaccaagtggagttcaagacaatgaacgccaagttgcttatggatcctaagagacaaatcttcctcgatcagaacatgctggctgttatcgacgagctgatgcaggcactaaattttaattccgagacggtgccccagaaatcgtccctggaggagccagatttttacaagaccaagattaaactctgtatactgctacacgcatttcgaattagagccgtgactattgatagagttatgagctacctgaacgcttcctag

SEQ ID NO: 16704 - DNA, 720 bp, Artificial Sequence
  derived and/or modified sequence
atgtggcctccaggatcagcaagtcaaccgccccctagccctgccgccgcgaccggcttgcaccccgcggcaagacctgttagtctccagtgcaggctgagtatgtgtccggcccggtccttgcttctagttgctacactggtgttgttggatcacctcagcttagcacgcaatctaccagtggctacaccagaccccggtatgttcccgtgcctgcatcattcacaaaacctcctgagggccgtgagcaacatgctgcaaaaggcacgccagacactggaattctacccctgcacttcagaggaaatcgaccacgaggatattaccaaggacaagacgtccaccgtcgaggcctgcctgccccttgaactaactaagaatggcagctgcctggccagtcgcaagacatctttcatgatggccttatgtctctcctccatatatgaggatcttaagatgtaccaggtggaattcaaaacaatgaacgctaaattattgatggaccctaaacggcagatctttttagatcagaatatgcttgccgtgatcgacgagctgatgcaggcattaaactttaacagcgagacagtgccccagaagagttccctggaggaacctgacttctataagacaaaaatcaagttgtgtatactgctgcacgcctttcgtatacgagctgttaccatcgaccgggtgatgagctacttaaacgcatcctag

SEQ ID NO: 16705 - DNA, 648 bp, Artificial Sequence
  derived and/or modified sequence
atgtggcctccagggtcagcctcgcaaccgcctccctctcccgccgccgccacaggccttcaccccgccgccaggcccgtgagtttacagtgcagactgtcaatgtgccccgctcggtcactgctcctggtggctaccctggtactcttggaccatttgagtcttgctcgcaacctcccggtggctactcccgaccctggcatgttcccatgcttacatcactcccagaacttactgcgggctgtatcaaacatgctgcagaaaaacgagtcttgtctgaacagtcgcgaaacttctttcataaccaacggcagctgtcttgcatcacgcaagacgtccttcatgatggccctgtgcctgagttccatatacgaagatcttaagatgtatcaagtggagtttaaaactatgaatgccaaactgcttatggacccaaagcgccaaattttcctcgatcagaatatgttagcagtaatagacgaacttatgcaggcgctgaacttcaattctgagactgtgccacagaagtcctccctggaggaaccagacttttacaagacgaagattaagctctgtatacttctgcatgcattcagaattagagccgtgacaatagatagggttatgtcctacctaaacgcatcctag

SEQ ID NO: 16706 - DNA, 762 bp, Artificial Sequence
  derived and/or modified sequence
atgtggcccccaggcagcgccagccagcccccacccagccctgctgctgccaccggcctgcaccctgctgcccggcctgtgtccctgcagtgccgcctgtccatgtgcccagcccggagcctgctgctggtggccaccctggtgctgctggaccacctgagcctggccaggaacctgcctgtggccaccccagaccccggcatgttcccctgcctgcaccacagccagaacctgctgcgggctgtgagcaacatgctgcagaaggcccggcagaccctggagttctacccctgcaccagcgaggagattgaccacgaggacatcaccaaggacaagaccagcacagtggaggcctgcctgcccctggagctgaccaagaatgaaagctgcctgaacagccgggagaccagcttcatcaccaacggcagctgcctggccagcaggaagaccagcttcatgatggccctgtgcctgagcagcatctatgaggacctgaagatgtaccaggtggagttcaagaccatgaatgccaagctgctgatggaccccaagaggcagatcttcctggaccagaacatgctggccgtgattgatgagctgatgcaggccctgaacttcaacagcgagaccgtgccccagaagagcagcctggaggagccagacttctacaagaccaagatcaagctgtgcatcctgctgcacgccttccgcatccgggctgtgaccatcgacagagtgatgagctacctgaatgccagctag

SEQ ID NO: 16707 - DNA, 720 bp, Artificial Sequence
  derived and/or modified sequence
atgtggcccccaggcagcgccagccagcccccacccagccctgctgctgccaccggcctgcaccctgctgcccggcctgtgtccctgcagtgccgcctgtccatgtgcccagcccggagcctgctgctggtggccaccctggtgctgctggaccacctgagcctggccaggaacctgcctgtggccaccccagaccccggcatgttcccctgcctgcaccacagccagaacctgctgcgggctgtgagcaacatgctgcagaaggcccggcagaccctggagttctacccctgcaccagcgaggagattgaccacgaggacatcaccaaggacaagaccagcacagtggaggcctgcctgcccctggagctgaccaagaatggcagctgcctggccagcaggaagaccagcttcatgatggccctgtgcctgagcagcatctatgaggacctgaagatgtaccaggtggagttcaagaccatgaatgccaagctgctgatggaccccaagaggcagatcttcctggaccagaacatgctggccgtgattgatgagctgatgcaggccctgaacttcaacagcgagaccgtgccccagaagagcagcctggaggagccagacttctacaagaccaagatcaagctgtgcatcctgctgcacgccttccgcatccgggctgtgaccatcgacagagtgatgagctacctgaatgccagctag

SEQ ID NO: 16708 - DNA, 648 bp, Artificial Sequence
  derived and/or modified sequence
atgtggcccccaggcagcgccagccagcccccacccagccctgctgctgccaccggcctgcaccctgctgcccggcctgtgtccctgcagtgccgcctgtccatgtgcccagcccggagcctgctgctggtggccaccctggtgctgctggaccacctgagcctggccaggaacctgcctgtggccaccccagaccccggcatgttcccctgcctgcaccacagccagaacctgctgcgggctgtgagcaacatgctgcagaagaatgaaagctgcctgaacagccgggagaccagcttcatcaccaacggcagctgcctggccagcaggaagaccagcttcatgatggccctgtgcctgagcagcatctatgaggacctgaagatgtaccaggtggagttcaagaccatgaatgccaagctgctgatggaccccaagaggcagatcttcctggaccagaacatgctggccgtgattgatgagctgatgcaggccctgaacttcaacagcgagaccgtgccccagaagagcagcctggaggagccagacttctacaagaccaagatcaagctgtgcatcctgctgcacgccttccgcatccgggctgtgaccatcgacagagtgatgagctacctgaatgccagctag

SEQ ID NO: 16709 - DNA, 1522 bp, Artificial Sequence
  derived and/or modified sequence
acggggcgtccggctaaggccggggacccagggtggtgggcggggtgtcccgcccgcctgtggaccccgcgcagtaactgcgaacatttcgctttcattttgggccgagctggaggcggcggggccgtcccggaacggctgcggccgggcaccccgggagttaatccgaaagcgccgcaagccccgcgggccggccgcaccgcacgtgtcaccgagaagctgatgtagagagagacacagaaggagacagaaagcaagagaccagagtcccgggaaagtcctgccgcgcctcgggacaattataaaaatgtggccccctgggtcagcctcccagccaccgccctcacctgccgcggccacaggtctgcatccagcggctcgccctgtgtccctgcagtgccggctcagcatgtgtccagcgcgcagcctcctccttgtggctaccctggtcctcctggaccacctcagtttggccagaaacctccccgtggccactccagacccaggaatgttcccatgccttcaccactcccaaaacctgctgagggccgtcagcaacatgctccagaaggccagacaaactctagaattttacccttgcacttctgaagagattgatcatgaagatatcacaaaagataaaaccagcacagtggaggcctgtttaccattggaattaaccaagaatgagagttgcctaaattccagagagacctctttcataactaatgggagttgcctggcctccagaaagacctcttttatgatggccctgtgccttagtagtatttatgaagacttgaagatgtaccaggtggagttcaagaccatgaatgcaaagcttctgatggatcctaagaggcagatctttctagatcaaaacatgctggcagttattgatgagctgatgcaggccctgaatttcaacagtgagactgtgccacaaaaatcctcccttgaagaaccggatttttataaaactaaaatcaagctctgcatacttcttcatgctttcagaattcgggcagtgactattgatagagtgatgagctatctgaatgcttcctaaaaagcgaggtccctccaaaccgttgtcatttttataaaactttgaaatgaggaaactttgataggatgtggattaagaactagggagggggaaagaaggatgggactattacatccacatgatacctctgatcaagtatttttgacatttactgtggataaattgtttttaagttttcatgaatgaattgctaagaagggaaaatatccatcctgaaggtgtttttcattcactttaatagaagggcaaatatttataagctatttctgtaccaaagtgtttgtggaaacaaacatgtaagcataacttattttaaaatatttatttatataacttggtaatcatgaaagcatctgagctaacttatatttatttatgttatatttattaaattatttatcaagtgtatttgaaaaatatttttaagtgttctaaaaataaaagtattgaatt

SEQ ID NO: 16710 - DNA, 1283 bp, Artificial Sequence
  derived and/or modified sequence
cgtgtcaccgagaagctgatgtagagagagacacagaaggagacagaaagcaagagaccagagtcccgggaaagtcctgccgcgcctcgggacaattataaaaatgtggccccctgggtcagcctcccagccaccgccctcacctgccgcggccacaggtctgcatccagcggctcgccctgtgtccctgcagtgccggctcagcatgtgtccagcgcgcagcctcctccttgtggctaccctggtcctcctggaccacctcagtttggccagaaacctccccgtggccactccagacccaggaatgttcccatgccttcaccactcccaaaacctgctgagggccgtcagcaacatgctccagaaggccagacaaactctagaattttacccttgcacttctgaagagattgatcatgaagatatcacaaaagataaaaccagcacagtggaggcctgtttaccattggaattaaccaagaatgggagttgcctggcctccagaaagacctcttttatgatggccctgtgccttagtagtatttatgaagacttgaagatgtaccaggtggagttcaagaccatgaatgcaaagcttctgatggatcctaagaggcagatctttctagatcaaaacatgctggcagttattgatgagctgatgcaggccctgaatttcaacagtgagactgtgccacaaaaatcctcccttgaagaaccggatttttataaaactaaaatcaagctctgcatacttcttcatgctttcagaattcgggcagtgactattgatagagtgatgagctatctgaatgcttcctaaaaagcgaggtccctccaaaccgttgtcatttttataaaactttgaaatgaggaaactttgataggatgtggattaagaactagggagggggaaagaaggatgggactattacatccacatgatacctctgatcaagtatttttgacatttactgtggataaattgtttttaagttttcatgaatgaattgctaagaagggaaaatatccatcctgaaggtgtttttcattcactttaatagaagggcaaatatttataagctatttctgtaccaaagtgtttgtggaaacaaacatgtaagcataacttattttaaaatatttatttatataacttggtaatcatgaaagcatctgagctaacttatatttatttatgttatatttattaaattatttatcaagtgtatttgaaaaatatttttaagtgttctaaaaataaaagtattgaattaaagtga

SEQ ID NO: 16711 - DNA, 863 bp, Artificial Sequence
  derived and/or modified sequence
cgtgtcaccgagaagctgatgtagagagagacacagaaggagacagaaagcaagagaccagagtcccgggaaagtcctgccgcgcctcgggacaattataaaaatgtggccccctgggtcagcctcccagccaccgccctcacctgccgcggccacaggtctgcatccagcggctcgccctgtgtccctgcagtgccggctcagcatgtgtccagcgcgcagcctcctccttgtggctaccctggtcctcctggaccacctcagtttggccagaaacctccccgtggccactccagacccaggaatgttcccatgccttcaccactcccaaaacctgctgagggccgtcagcaacatgctccagaagaatgagagttgcctaaattccagagagacctctttcataactaatgggagttgcctggcctccagaaagacctcttttatgatggccctgtgccttagtagtatttatgaagacttgaagatgtaccaggtggagttcaagaccatgaatgcaaagcttctgatggatcctaagaggcagatctttctagatcaaaacatgctggcagttattgatgagctgatgcaggccctgaatttcaacagtgagactgtgccacaaaaatcctcccttgaagaaccggatttttataaaactaaaatcaagctctgcatacttcttcatgctttcagaattcgggcagtgactattgatagagtgatgagctatctgaatgcttcctaaaaagcgaggtccctccaaaccgttgtcatttttataaaactttgaaatgaggaaactttgataggatgtggattaagaactagggagggggaaagaaggatgggactattac

SEQ ID NO: 16712 - DNA, 762 bp, Artificial Sequence
  derived and/or modified sequence
atgtggccccccggcagcgccagccagcccccccccagccccgccgcggctacaggccttcacccagctgccagacccgtgagccttcagtgccgcctgagtatgtgcccagccaggtcactcttgttagttgcaactttggtgctgttagaccatctgagtctggcacgcaacctgccagtggctactcccgatcccggcatgtttccctgcctgcatcacagccaaaatctgcttcgtgctgttagcaacatgctgcagaaggcacgccagaccttggaattctacccatgcacttcagaggagatcgatcacgaggacatcacaaaagataagactagtactgtcgaggcttgtctgcccttggaactcaccaagaacgagtcctgcctgaatagccgtgagactagcttcattactaatggttcctgtctggccagccgcaaaacatccttcatgatggcactttgcctctcaagtatctacgaggacctgaaaatgtatcaggttgagtttaagacgatgaacgccaaattattgatggaccccaagagacagattttcttagatcagaatatgttggcggtgatcgacgaactgatgcaagcgctgaacttcaactccgaaaccgtgccacaaaagtctagcctagaggaacccgatttctacaagactaaaatcaagttgtgcatcctgttacatgctttccgaattagagccgtgactatcgatagggtcatgtcttacctgaacgctagttag

SEQ ID NO: 16713 - DNA, 720 bp, Artificial Sequence
  derived and/or modified sequence
atgtggccccccggcagcgccagccagcccccccccagccccgccgcagccactggtctgcatcccgccgctcggccggtgagcctgcagtgtcggctctctatgtgtcctgcaagaagtctattgttggtcgcaaccctggtcttactggatcacctttcccttgctcgtaacctaccagtggccacccccgacccgggaatgttcccctgcctccaccactctcaaaatcttctgagggccgtctcaaacatgcttcaaaaggcgaggcagaccctggagttctacccctgcacttctgaggaaattgaccatgaggatatcacaaaagacaaaacatccactgtcgaagcttgccttccgctcgagctcaccaagaatggatcctgtctggcttcaaggaagacctcgttcatgatggctttatgcctgagttcaatatacgaggatctcaagatgtatcaagtagaatttaagacaatgaacgcaaaattactgatggatccaaaacgacagatcttcttagatcaaaacatgctggcagttattgatgaactcatgcaggctcttaatttcaattctgagaccgtgccccagaagagtagtttagaggagccagacttttataagaccaagatcaagctgtgtatcctgttacacgcattccggattcgggcagttacgatcgacagagtgatgtcctatttgaacgcctcctag

SEQ ID NO: 16714 - DNA, 648 bp, Artificial Sequence
  derived and/or modified sequence
atgtggccccccggcagcgccagccagcccccccccagccccgccgccgccaccggtctccacccggctgctcgacccgtctctcttcagtgcagactgtcaatgtgcccagccagaagcctgctgttggttgccaccctagtgctcttggatcaccttagtcttgcgaggaatctacccgttgccactcccgaccccggtatgttcccgtgccttcaccactcccagaatttattacgggcagtaagcaacatgctgcagaagaacgagagttgtctgaattcccgggagacctccttcattacgaacggctcttgcttggccagccgcaaaacatcatttatgatggcattatgccttagttctatttatgaagacctaaagatgtaccaggtggaatttaaaacaatgaatgctaagctgctcatggacccaaagcgccaaattttcctggaccagaatatgctcgccgtgatcgatgaattgatgcaagctctgaacttcaattcagaaactgtccctcagaagagctcactggaggaacccgacttctacaaaactaagattaagctctgcattctgcttcatgcctttcgtatccgggctgtgacaatagatagggtcatgagctacctgaacgcctcttag

SEQ ID NO: 16715 - DNA, 762 bp, Artificial Sequence
  derived and/or modified sequence
atgtggccacccggaagtgcctcacagcccccaccctcgccagcagccgcaaccggcctccatcctgccgcaagacccgtctccttacagtgtagattgtccatgtgtcctgccaggtcgctgctgctagttgccacactggtactattagaccacctgtcactggcccgaaatctcccagtagccacgccagaccctggcatgtttccttgtttacatcacagccagaatctgcttcgcgcagtatccaatatgctacagaaggctaggcagacactagaattctacccatgcactagtgaggaaatcgaccatgaagacattaccaaggacaaaacctcaacagtcgaagcgtgtctgcctttagaactgacaaaaaatgaatcctgcctcaactcaagagaaacctcatttatcaccaatggaagttgtcttgccagcaggaaaacttccttcatgatggccttgtgtctttctagtatctatgaagacttgaagatgtaccaggtggagttcaaaacaatgaacgcaaaactgttgatggacccaaagcgccagatatttctggaccagaacatgctcgccgttatcgatgaactgatgcaggccttaaactttaatagcgagaccgtgcctcagaagtcatccctagaggagcctgacttttataagactaaaattaagttatgcatcctcctgcatgccttccgcatcagggcagtgacgattgaccgcgtcatgagttacttgaacgcctcgtag

SEQ ID NO: 16716 - DNA, 720 bp, Artificial Sequence
  derived and/or modified sequence
atgtggccccctggttccgcttcccaaccacccccatctcctgcagccgctactggtctacaccccgctgcccgaccggtgagcttacagtgccggctgagcatgtgcccagccaggtctctcctactggtggccacactcgtgctgctggaccatttatccctggcgaggaacttaccagtggcaacacctgatcctggcatgtttccctgcctgcaccactcccagaacttgctaagagccgtttcgaatatgctgcagaaagccagacaaaccctcgagttttacccatgcacaagcgaggagatcgatcacgaagatatcaccaaggacaaaacttcaaccgtagaagcctgtctccctctggaacttaccaaaaacggctcctgcctcgcgagccgtaaaacttcctttatgatggccctatgcctcagtagtatttacgaggatcttaagatgtatcaggtggagttcaagactatgaacgctaaacttctcatggatccgaaaagacagattttccttgaccagaacatgctcgcagtgattgacgagctcatgcaggccttaaactttaactccgaaactgttccgcagaaatcctcactcgaggaaccagatttctataaaacaaaaattaagctttgcattctgctgcacgcatttcggatccgtgccgtgactatcgaccgagtgatgtcctacctcaacgcctcatag

SEQ ID NO: 16717 - DNA, 648 bp, Artificial Sequence
  derived and/or modified sequence
atgtggccacctggatccgccagccagccacctccttcacccgctgccgctactggcctccatccggcagccagaccagtgtccctgcagtgtcggctttcaatgtgtccagccagaagtctgctcctcgtcgctacgctcgtcctgctcgatcatctgtccttggcacggaatttgccagtggctacacctgatcctgggatgttcccatgtctgcatcacagccagaacctgttgcgagctgtttccaacatgttgcagaaaaatgaatcatgcctcaactcacgagaaacgagcttcataacaaacggaagttgcctggcgtcaaggaagacatctttcatgatggccttgtgcctgtctagtatttacgaggacctgaaaatgtaccaggtggaattcaaaacaatgaacgcaaagttactgatggaccctaagagacagatcttcctcgaccagaacatgcttgcagtgatcgatgagttaatgcaggctctgaatttcaattctgagaccgtgccccaaaaatcatccctggaggagcctgacttttataagaccaagatcaaactttgtatattgcttcacgcattccggatccgcgcagtgaccattgatcgcgtgatgtcttacctgaatgcctcatag

SEQ ID NO: 16718 - DNA, 762 bp, Artificial Sequence
  derived and/or modified sequence
atgtggcccccaggaagtgcttctcaacctccaccaagccccgcggccgctactggactgcatcctgccgcccgccccgtctctctccaatgtcgtctgtcaatgtgcccggctaggtccttactgctcgtggccactctagtgctgctggaccaccttagcctggcccgcaatctgccagtggccaccccggatcccggcatgtttccctgtctccaccattctcagaaccttttgcgggcggtgtctaacatgctgcaaaaagcaaggcaaacactggagttttacccatgcacctctgaagaaatcgaccacgaggacataactaaagataaaacaagtacggtggaagcttgcttacctcttgagctgaccaagaatgagtcctgcttgaacagccgcgagacgtcttttattacaaacggctcatgcttagcgtcacgaaaaactagcttcatgatggctctgtgcctgtcatcaatttatgaggatctcaaaatgtaccaggtggaatttaaaacgatgaatgcgaaactgttaatggacccaaagcgccagattttccttgatcagaatatgctggcagtgatcgacgaactgatgcaggcacttaatttcaatagcgagacggtcccgcagaaatcatccctcgaggaacccgacttctataagactaaaattaaactgtgtatactcttacacgcctttagaatacgggctgtgactattgatagggtgatgagctacctcaatgcatcttag

SEQ ID NO: 16719 - DNA, 720 bp, Artificial Sequence
  derived and/or modified sequence
atgtggccaccaggaagcgcatcccagccacccccatctcccgccgctgccacgggcctccatcccgctgcacgtccggtctcattgcagtgcagattaagcatgtgccccgccagatctttattactggtagccaccctggttttactagatcacctctcactagctcgcaatctaccggttgctacccccgacccgggcatgtttccctgcttacaccactcccagaacttgctgcgggcagtgtccaatatgctccaaaaggctcggcaaacattggagttttacccatgcacatcagaggagatcgaccatgaggatattactaaggacaaaacatccaccgtcgaggcctgtctgcctctggagctgactaaaaatgggagctgtttagcgtctaggaagacatctttcatgatggcattatgtctgtccagcatttatgaggatcttaagatgtatcaagtggaatttaaaaccatgaacgccaaactcctgatggatcctaagcgtcaaattttcctggatcaaaatatgcttgcggtgatcgatgagcttatgcaagccttaaactttaattccgagacagtcccacaaaagtcgagtctcgaggagcccgatttttataagactaagataaagctgtgtatcttacttcacgcctttcgaatccgagcagtcaccatcgatagagttatgtcatacctgaatgcctcttag

SEQ ID NO: 16720 - DNA, 648 bp, Artificial Sequence
  derived and/or modified sequence
atgtggccccccgggtctgccagccaaccgcccccaagtcccgccgcagccactgggcttcacccagctgcccgtcccgtctcgctgcagtgcaggctgtccatgtgtcctgcccgttcgctgttactggtcgccacgctagtgctcctggatcacctttccctagctagaaatcttcctgttgcaacccccgacccaggaatgtttccatgcctacaccactcacaaaacctattgcgtgctgtgtccaatatgctacaaaagaatgagtcttgcctgaatagtcgagaaacctcattcattaccaatggctcctgtctcgccagcagaaagactagctttatgatggcactgtgcttatcatcgatttacgaggatttaaaaatgtaccaggttgagtttaagacaatgaatgccaagctcctgatggaccccaagagacagatctttctcgaccagaacatgctggccgtaatcgacgagctgatgcaggctctgaacttcaactccgagaccgtgccgcagaagtcatctttggaggagcccgatttttacaaaacaaaaattaaactgtgcatcctgctccatgccttccgcatccgggctgtcacgatcgaccgggttatgagttatctgaatgcatcgtag

SEQ ID NO: 16721 - DNA, 762 bp, Artificial Sequence
  derived and/or modified sequence
atgtggcctcctggaagcgcgtcccaaccacctccttcccccgcagccgctaccggactgcaccccgcggctcgaccagtgtccctgcaatgtcgccttagcatgtgccctgctcgatccctcctcctcgttgcaacattggtactgttggaccacctgtccctggcccgaaatttgcctgttgcgactcccgatcctggtatgttcccatgtcttcaccacagtcagaacctgctgcgcgctgtctcgaacatgctccaaaaagccaggcaaactctcgaattttatccctgtacaagcgaagaaatcgaccacgaggacataactaaagataaaacaagtacggtggaagcttgcttacctcttgagctgaccaagaatgagtcctgcttgaacagccgcgagacgtcttttattacaaacggctcatgcttagcgtcacgaaaaactagcttcatgatggctctgtgcctgtcatcaatttatgaggatctcaaaatgtaccaggtggaatttaaaacgatgaatgcgaaactgttaatggacccaaagcgccagattttccttgatcagaatatgctggcagtgatcgacgaactgatgcaggcgcttaatttcaacagcgaaaccgtcccgcagaaatcatccctagaagagccagatttttacaaaactaaaattaagctgtgtatcctcctccacgcctttcggatacgggccgtaactattgatcgagttatgtcatacctcaacgcgagctag

SEQ ID NO: 16722 - DNA, 720 bp, Artificial Sequence
  derived and/or modified sequence
atgtggccccctggaagcgcttcccagccaccaccatctccggctgccgccactggattgcaccctgccgctcgaccagtttcgctccaatgtcgcctgtccatgtgtcctgctcgaagcctcctgctagtggcaactctggtgctgctcgatcacctgtctcttgcccgtaatctgccagtggctactcctgatcccggcatgtttccctgcctccaccatagccaaaacttgcttcgcgcagtgtccaatatgctccagaaggctcgacagaccctcgagttctatccctgtacttccgaagaaatcgatcatgaagacatcaccaaggacaaaaccagtaccgtagaagcctgcttaccattagaattaacaaagaatgggtcatgtctcgcctccagaaagacttcattcatgatggcactttgcctgtccagcatctatgaggatctgaagatgtaccaggtggaattcaagactatgaacgcaaagttgctgatggatcctaaaagacagatcttcttggaccagaacatgctcgcagtgatagatgaactgatgcaagccctgaactttaactccgaaaccgtgcctcagaagtcttcccttgaagagccagatttctataagaccaagattaaactatgtatcctgctgcacgccttccggattagagccgtcactattgaccgcgtgatgagctaccttaacgcctcctag

SEQ ID NO: 16723 - DNA, 648 bp, Artificial Sequence
  derived and/or modified sequence
atgtggccacccgggagcgcgagtcagccacccccctccccagcagctgcaactggcctccaccccgctgcccgcccagtgtccctgcagtgcagactttcaatgtgtcctgcccgatccctcttgctggtcgctaccctggtactgcttgatcatctgtccctagcccgtaatcttcctgtcgccacaccggatcccggaatgtttccttgcctgcatcacagtcagaaccttctgcgtgccgtaagcaatatgttgcagaaaaacgagtcttgtcttaacagtagagagacttcttttataacgaacggtagctgcctcgcctctcgcaagacatcattcatgatggccctgtgccttagttcaatctacgaggaccttaagatgtatcaggtagaatttaaaacgatgaacgccaaactgttaatggatccgaagcgtcagatttttctggaccagaacatgttagcggttattgatgagctcatgcaagccctaaatttcaacagcgaaacagtgcctcaaaaaagcagcctagaggagccagatttctataaaacaaaaatcaaattatgcatcctgctacacgctttcagaatcagagctgtaaccatcgatagagtcatgagttatctgaacgcgtcctag

SEQ ID NO: 16724 - RNA, 762 nt, Artificial Sequence
  derived and/or modified sequence
auguggcccccaggaagugcuucucaaccuccaccaagccccgcggccgcuacuggacugcauccugccgcccgccccgucucucuccaaugucgucugucaaugugcccggcuagguccuuacugcucguggccacucuagugcugcuggaccaccuuagccuggcccgcaaucugccaguggccaccccggaucccggcauguuucccugucuccaccauucucagaaccuuuugcgggcggugucuaacaugcugcaaaaagcaaggcaaacacuggaguuuuacccaugcaccucugaagaaaucgaccacgaggacauaacuaaagauaaaacaaguacgguggaagcuugcuuaccucuugagcugaccaagaaugaguccugcuugaacagccgcgagacgucuuuuauuacaaacggcucaugcuuagcgucacgaaaaacuagcuucaugauggcucugugccugucaucaauuuaugaggaucucaaaauguaccagguggaauuuaaaacgaugaaugcgaaacuguuaauggacccaaagcgccagauuuuccuugaucagaauaugcuggcagugaucgacgaacugaugcaggcacuuaauuucaauagcgagacggucccgcagaaaucaucccucgaggaacccgacuucuauaagacuaaaauuaaacuguguauacucuuacacgccuuuagaauacgggcugugacuauugauagggugaugagcuaccucaaugcaucuuag

SEQ ID NO: 16725 - RNA, 720 nt, Artificial Sequence
  derived and/or modified sequence
auguggccaccaggaagcgcaucccagccacccccaucucccgccgcugccacgggccuccaucccgcugcacguccggucucauugcagugcagauuaagcaugugccccgccagaucuuuauuacugguagccacccugguuuuacuagaucaccucucacuagcucgcaaucuaccgguugcuacccccgacccgggcauguuucccugcuuacaccacucccagaacuugcugcgggcaguguccaauaugcuccaaaaggcucggcaaacauuggaguuuuacccaugcacaucagaggagaucgaccaugaggauauuacuaaggacaaaacauccaccgucgaggccugucugccucuggagcugacuaaaaaugggagcuguuuagcgucuaggaagacaucuuucaugauggcauuaugucuguccagcauuuaugaggaucuuaagauguaucaaguggaauuuaaaaccaugaacgccaaacuccugauggauccuaagcgucaaauuuuccuggaucaaaauaugcuugcggugaucgaugagcuuaugcaagccuuaaacuuuaauuccgagacagucccacaaaagucgagucucgaggagcccgauuuuuauaagacuaagauaaagcuguguaucuuacuucacgccuuucgaauccgagcagucaccaucgauagaguuaugucauaccugaaugccucuuag

SEQ ID NO: 16726 - RNA, 648 nt, Artificial Sequence
  derived and/or modified sequence
auguggccccccgggucugccagccaaccgcccccaagucccgccgcagccacugggcuucacccagcugcccgucccgucucgcugcagugcaggcuguccauguguccugcccguucgcuguuacuggucgccacgcuagugcuccuggaucaccuuucccuagcuagaaaucuuccuguugcaacccccgacccaggaauguuuccaugccuacaccacucacaaaaccuauugcgugcuguguccaauaugcuacaaaagaaugagucuugccugaauagucgagaaaccucauucauuaccaauggcuccugucucgccagcagaaagacuagcuuuaugauggcacugugcuuaucaucgauuuacgaggauuuaaaaauguaccagguugaguuuaagacaaugaaugccaagcuccugauggaccccaagagacagaucuuucucgaccagaacaugcuggccguaaucgacgagcugaugcaggcucugaacuucaacuccgagaccgugccgcagaagucaucuuuggaggagcccgauuuuuacaaaacaaaaauuaaacugugcauccugcuccaugccuuccgcauccgggcugucacgaucgaccggguuaugaguuaucugaaugcaucguag

SEQ ID NO: 16727 - RNA, 762 nt, Artificial Sequence
  derived and/or modified sequence
auguggccuccuggaagcgcgucccaaccaccuccuucccccgcagccgcuaccggacugcaccccgcggcucgaccagugucccugcaaugucgccuuagcaugugcccugcucgaucccuccuccucguugcaacauugguacuguuggaccaccugucccuggcccgaaauuugccuguugcgacucccgauccugguauguucccaugucuucaccacagucagaaccugcugcgcgcugucucgaacaugcuccaaaaagccaggcaaacucucgaauuuuaucccuguacaagcgaagaaaucgaccacgaggacauaacuaaagauaaaacaaguacgguggaagcuugcuuaccucuugagcugaccaagaaugaguccugcuugaacagccgcgagacgucuuuuauuacaaacggcucaugcuuagcgucacgaaaaacuagcuucaugauggcucugugccugucaucaauuuaugaggaucucaaaauguaccagguggaauuuaaaacgaugaaugcgaaacuguuaauggacccaaagcgccagauuuuccuugaucagaauaugcuggcagugaucgacgaacugaugcaggcgcuuaauuucaacagcgaaaccgucccgcagaaaucaucccuagaagagccagauuuuuacaaaacuaaaauuaagcuguguauccuccuccacgccuuucggauacgggccguaacuauugaucgaguuaugucauaccucaacgcgagcuag

SEQ ID NO: 16728 - RNA, 720 nt, Artificial Sequence
  derived and/or modified sequence
auguggcccccuggaagcgcuucccagccaccaccaucuccggcugccgccacuggauugcacccugccgcucgaccaguuucgcuccaaugucgccuguccauguguccugcucgaagccuccugcuaguggcaacucuggugcugcucgaucaccugucucuugcccguaaucugccaguggcuacuccugaucccggcauguuucccugccuccaccauagccaaaacuugcuucgcgcaguguccaauaugcuccagaaggcucgacagacccucgaguucuaucccuguacuuccgaagaaaucgaucaugaagacaucaccaaggacaaaaccaguaccguagaagccugcuuaccauuagaauuaacaaagaaugggucaugucucgccuccagaaagacuucauucaugauggcacuuugccuguccagcaucuaugaggaucugaagauguaccagguggaauucaagacuaugaacgcaaaguugcugauggauccuaaaagacagaucuucuuggaccagaacaugcucgcagugauagaugaacugaugcaagcccugaacuuuaacuccgaaaccgugccucagaagucuucccuugaagagccagauuucuauaagaccaagauuaaacuauguauccugcugcacgccuuccggauuagagccgucacuauugaccgcgugaugagcuaccuuaacgccuccuag

SEQ ID NO: 16729 - RNA, 648 nt, Artificial Sequence
  derived and/or modified sequence
auguggccacccgggagcgcgagucagccaccccccuccccagcagcugcaacuggccuccaccccgcugcccgcccagugucccugcagugcagacuuucaauguguccugcccgaucccucuugcuggucgcuacccugguacugcuugaucaucugucccuagcccguaaucuuccugucgccacaccggaucccggaauguuuccuugccugcaucacagucagaaccuucugcgugccguaagcaauauguugcagaaaaacgagucuugucuuaacaguagagagacuucuuuuauaacgaacgguagcugccucgccucucgcaagacaucauucaugauggcccugugccuuaguucaaucuacgaggaccuuaagauguaucagguagaauuuaaaacgaugaacgccaaacuguuaauggauccgaagcgucagauuuuucuggaccagaacauguuagcgguuauugaugagcucaugcaagcccuaaauuucaacagcgaaacagugccucaaaaaagcagccuagaggagccagauuucuauaaaacaaaaaucaaauuaugcauccugcuacacgcuuucagaaucagagcuguaaccaucgauagagucaugaguuaucugaacgcguccuag

SEQ ID NO: 16730 - protein, 599 aa, Artificial Sequence
  derived and/or modified sequence
MEGPLTPPPLQGGGAAAVPEPGARQHPGHETAAQRYSARLLQAGYEPESPRLDLATHPTTPRSELSSVVLLAGVGVQMDRLRRASMADYLISGGTGYVPEDGLTAQQLFASADGLTYNDFLILPGFIDFIADEVDLTSALTRKITLKTPLISSPMDTVTEADMAIAMALMGGIGFIHHNCTPEFQANEVRKVKKFEQGFITDPVVLSPSHTVGDVLEAKMRHGFSGIPITETGTMGSKLVGIVTSRDIDFLAEKDHTTLLSEVMTPRIELVVAPAGVTLKEANEILQRSKKGKLPIVNDCDELVAIIARTDLKKNRDYPLASKDSQKQLLCGAAVGTREDDKYRLDLLTQAGVDVIVLDSSQGNSVYQIAMVHYIKQKYPHLQVIGGNVVTAAQAKNLIDAGVDGLRVGMGCGSICITQEVMACGRPQGTAVYKVAEYARRFGVPIIADGGIQTVGHVVKALALGASTVMMGSLLAATTEAPGEYFFSDGVRLKKYRGMGSLDAMEKSSSSQKRYFSEGDKVKIAQGVSGSIQDKGSIQKFVPYLIAGIQHGCQDIGARSLSVLRSMMYSGELKFEKRTMSAQIEGGVHGLHSYEKRLY

SEQ ID NO: 16731 - DNA, 1800 bp, Artificial Sequence
  derived and/or modified sequence
atggagggtccactcacccccccccccttacaggggggtggcgccgcagcggtgcccgagccaggagcaagacaacatcctgggcacgagacagctgcgcagcgatactctgccaggctgctccaagccgggtacgaacctgaaagccccagactagacctagccacccaccctaccacccctcgctcggaattatcctccgtggtgctgttggccggcgttggagtgcagatggaccgcctaagacgcgcgtctatggcggactatctgatttccggtgggaccgggtatgtgcccgaagacggcctcacggcccagcaactctttgcttccgcggacggtttaacatacaacgactttctcatcctaccagggtttattgacttcattgccgatgaagtagatctcacctctgctctaactcgcaagataactctcaaaacacccctcattagttcccccatggataccgtaacagaggccgatatggcaatcgccatggcgctcatggggggaattggatttattcaccataactgtacccctgaatttcaagccaacgaggttagaaaggttaagaagtttgaacagggcttcataaccgacccagtggttttgtcgccctcccacactgtcggtgacgttctcgaggccaagatgcgccatggcttctccgggattccgatcaccgagacagggactatgggctcaaaactggttggcatcgtgaccagccgcgatatagatttcctggccgaaaaagaccatacaacactgttgtctgaagtgatgactcctaggatcgaactggtggtagctcctgccggcgtcacccttaaggaggctaacgagatcctgcagaggtcaaaaaaagggaaacttcccattgtgaatgactgtgacgaacttgtggcaattatcgcgagaaccgatcttaagaagaatcgggactacccactggccagtaaggactcacagaaacagttactgtgcggagccgctgtcgggactagggaggacgacaaatataggttagatctcctcacacaagccggtgtagacgttattgtgcttgacagcagccaggggaatagcgtgtatcagatagccatggtccattacattaagcaaaagtacccgcacctccaggtgattgggggaaatgttgtaaccgcagcccaggccaaaaacctcatcgatgcaggagtagacggactccgcgtggggatggggtgtggctctatatgcattactcaggaggtgatggcgtgcggacgcccgcagggcaccgcagtttataaagtagccgagtatgcaaggcggtttggtgtcccgatcatcgcagacggggggatacaaacagtcgggcacgttgtgaaagcactggcgctgggggcatccactgtgatgatgggctccctccttgccgcaacgacagaggcccccggcgaatacttcttctctgacggtgtccgtctgaagaaatatcgaggcatgggttccctggatgctatggaaaaatcttcaagcagtcagaaacgctacttttccgagggcgacaaggttaagattgcccagggggtctctggtagcattcaagacaagggatcaatacagaagttcgtgccttacctgatagcaggcattcagcacgggtgccaagacatcggagccagatcgctgtccgttctccgctctatgatgtacagcggggaactgaagtttgaaaagcgcactatgagtgctcagattgagggtggggtgcacggtctccacagttacgaaaaaagactttattag

SEQ ID NO: 16732 - DNA, 2881 bp, Artificial Sequence
  derived and/or modified sequence
tcggaaggggccaggagacactggaaggtccggacggcagggaaggggacggggttctttccagtcccacccgtgtagggacacctctccccctcatcccccgatgtaccctcgctgaatctgggatgggagagacgaaccgagtctaggcatctgcgtagcagcgccggggagagcggggagcccagggcggagcccagtcgactcccggattcccctgccccgcccccggcacgaggccccgccccggcggccccgcccctcctcgggactcgaccgggctgcgctcactgcccagccggggccccgggagcctccaggctcccgcccgccctgagctgcggcctccgcatggaggggccactcactccaccaccgctgcagggaggcggagccgccgctgttccggagcccggagcccggcaacacccgggacacgagacggcggcgcagcggtacagcgcccgactgctgcaggccggctacgagcccgagagccctagattggacctcgctacacacccgacgacaccccgttcagaactatcttcagtggtcttactggcaggtgttggtgtccagatggatcgccttcgcagggctagcatggcggactacctgatcagcggcggcaccggctacgtgcccgaggatgggctcaccgcgcagcagctcttcgccagcgccgacggcctcacctacaacgacttcctgattctcccaggattcatagacttcatagctgatgaggtggacctgacctcagccctgacccggaagatcacgctgaagacgccactgatctcctcccccatggacactgtgacagaggctgacatggccattgccatggctctgatgggaggtattggtttcattcaccacaactgcaccccagagttccaggccaacgaggtgcggaaggtcaagaagtttgaacagggcttcatcacggaccctgtggtgctgagcccctcgcacactgtgggcgatgtgctggaggccaagatgcggcatggcttctctggcatccccatcactgagacgggcaccatgggcagcaagctggtgggcatcgtcacctcccgagacatcgactttcttgctgagaaggaccacaccaccctcctcagtgaggtgatgacgccaaggattgaactggtggtggctccagcaggtgtgacgttgaaagaggcaaatgagatcctgcagcgtagcaagaaagggaagctgcctatcgtcaatgattgcgatgagctggtggccatcatcgcccgcaccgacctgaagaagaaccgagactaccctctggcctccaaggattcccagaagcagctgctctgtggggcagctgtgggcacccgtgaggatgacaaataccgtctggacctgctcacccaggcgggcgtcgacgtcatagtcttggactcgtcccaagggaattcggtgtatcagatcgccatggtgcattacatcaaacagaagtacccccacctccaggtgattggggggaacgtggtgacagcagcccaggccaagaacctgattgatgctggtgtggacgggctgcgcgtgggcatgggctgcggctccatctgcatcacccaggaagtgatggcctgtggtcggccccagggcactgctgtgtacaaggtggctgagtatgcccggcgctttggtgtgcccatcatagccgatggcggcatccagaccgtgggacacgtggtcaaggccctggcccttggagcctccacagtgatgatgggctccctgctggccgccactacggaggcccctggcgagtacttcttctcagacggggtgcggctcaagaagtaccggggcatgggctcactggatgccatggagaagagcagcagcagccagaaacgatacttcagcgagggggataaagtgaagatcgcgcagggtgtctcgggctccatccaggacaaaggatccattcagaagttcgtgccctacctcatagcaggcatccaacacggctgccaggatatcggggcccgcagcctgtctgtccttcggtccatgatgtactcaggagagctcaagtttgagaagcggaccatgtcggcccagattgagggtggtgtccatggcctgcactcttacgaaaagcggctgtactgaggacagcggtggaggccgaggtggtggaggggatgcaccccagtgtccacttttgggcacagcctccctccataactgagtggtccacagatttgcactacgggttctccagctcctttccaggcagagaggaggggaggtcctgaggggactgctgcccctcactcggcatcccctgcagagtcaggactgctcccggggccaggctgccctgggagcccccctccgagcccagccagccaggctctcaggccctgcgcctgcctcaggtctttcttgctgcagcctgctccagcctggcccccaccccaggggcaggcggcccctcctggcttctcctgtagggcacctccctgcccctagcctcccaggaaatggtgctctcctggccctgcctctggcccttcccgggccgctgcccctcagccatgtggcacttctgagctcctgacctaggccaaggggaggtctctgcccccttccccggccctgggctacccttgggtcctgctcctcaggccgctcccctgtccctggccatgggtaggagactgccctggtcatggccgcctgcctgtcattcctgactcaccaccgtccccaggtgaaccattcctcccttctcctcagctgcagtcgaaggctttaactttgcacacttgggatcacagttgcgtcattgtgtattaaatacttggaataaatcaagcaggtctcaacgcctccacta

SEQ ID NO: 16733 - DNA, 1800 bp, Artificial Sequence
  derived and/or modified sequence
atggagggccccctgaccccaccacccctgcagggcggcggcgctgctgctgtgcctgagcccggggcccggcagcaccctggccatgaaacagctgcccagcgctacagcgcccggctgctgcaggccggctatgagcctgagagcccccggctggacctggccacccaccccaccacccccaggtctgagctgagctctgtggtgctgctggccggcgtgggcgtgcagatggaccggctgcggcgggcctccatggctgactacctgatcagcggcggcaccggctacgtgcctgaagatggcctgacagcccagcagctgtttgccagcgcagatggcctgacctacaatgacttcctgatcctgcccggcttcatcgacttcatcgcagatgaggtggacctgaccagcgccctgaccaggaagatcaccctgaagacccccctcatcagcagccccatggacacagtgacagaagctgacatggccatcgccatggccctgatgggcggcatcggcttcatccaccacaactgcaccccagagttccaggccaatgaggtgaggaaggtgaagaagtttgagcagggcttcatcacagatcctgtggtgctgagccccagccacacagtgggagatgtgctggaggccaagatgagacatggcttcagcggcatccccatcacagagaccggcaccatgggcagcaagctggtgggcatcgtgaccagccgggacatcgacttcctggccgagaaggaccacaccaccctgctgtctgaggtgatgaccccccgcatcgagctggtggtggccccagctggggtgaccctgaaggaggccaatgagatcctgcagaggagcaagaagggcaagctgcccatcgtgaatgactgtgatgagctggtggccatcatcgccaggacagacctgaagaagaacagagactaccccctggccagcaaggacagccagaagcagctgctgtgtggggctgctgtgggcaccagagaagatgacaagtaccgcctggacctgctgacccaggccggcgtggatgtgattgtgctggacagcagccagggcaacagcgtgtaccagatcgccatggtgcactacatcaagcagaagtacccccacctgcaggtgattggaggaaatgtggtgacagctgcccaggccaagaacctgattgatgctggggtggatggcctgcgggtgggcatgggctgcggcagcatctgcatcacccaggaggtgatggcctgtggccggccccagggcacagctgtgtacaaggtggccgagtatgcccggcgcttcggcgtgcccatcatcgcagatggcggcatccagacagtgggccacgtggtgaaggccctggccctgggcgccagcacagtgatgatgggcagcctgctggccgccaccacagaggcccctggagagtacttcttcagtgatggagtgcggctgaagaagtaccggggcatgggcagcctggatgccatggagaagagcagcagcagccagaagcgctacttcagcgagggggacaaggtgaagatcgcccagggcgtgtctggcagcatccaggacaagggcagcatccagaagtttgtgccctacctgattgctggcatccagcacggctgccaggacatcggggcccggagcctgtctgtgctgcgctccatgatgtacagcggggagctgaagtttgagaagaggaccatgtctgcccagatcgagggcggcgtgcacggcctgcacagctatgagaagaggctgtactag

SEQ ID NO: 16734 - DNA, 1800 bp, Artificial Sequence
  derived and/or modified sequence
atggagggccccctgacccccccccccctgcagggcggcggcgccgcagcagttccagagcctggggctaggcagcacccagggcacgagactgcggctcaacgatacagtgcccgccttttgcaggctggttacgagcctgagtccccacgcctcgatttagccacccatcctactactccgaggagtgagctgagctccgtcgtcctgctcgccggagttggggtgcagatggaccgtctgcgtcgggcatccatggccgactacttgatttcagggggcaccggatatgtccccgaagacggcctgactgcccagcaacttttcgctagtgctgacggcctcacatataatgatttcctgatccttccggggttcatcgacttcatcgcagatgaggttgatctgaccagtgcactgactcgcaaaatcactctgaaaacccccctgatttcgtcaccgatggataccgtgacggaggccgacatggccatcgctatggctcttatgggaggcatcggctttattcatcacaactgcacccctgagttccaggctaatgaagtgcgtaaggtgaagaaattcgaacaaggttttataaccgatcccgtcgtgctgagcccttcgcatactgttggtgatgtgttagaggccaagatgagacatggctttagcgggatcccaattactgaaactggtactatgggcagcaaactggtgggcatcgtcacgagcagggacattgatttcctggctgaaaaagatcataccaccctattgagtgaggttatgacaccaagaatcgagttagtggtggctccagctggggtgacgcttaaagaggctaacgagatcctgcagcgctcaaaaaaaggcaagctgcccattgtcaacgattgcgatgagctggtggcgatcatcgctcgcaccgacctcaaaaagaatcgggattatccgcttgctagcaaagacagccagaagcaattactgtgcggcgcagccgttggtactcgtgaggacgataaatacagactggacctactgacacaggccggagtagacgttatagtgttggactcctcccaggggaatagtgtgtatcaaatagcgatggtgcactacatcaaacaaaagtatccccatctgcaggtgattggcggaaacgtggtcaccgctgcccaagcaaagaatctgatcgatgcgggtgtcgacgggctcagggtcggaatggggtgcggttccatttgtatcacacaagaagtcatggcatgtggacggcctcagggaaccgctgtgtacaaggttgctgagtacgcaagacggtttggagtcccgatcatagctgacggtgggattcagactgttggacacgtagtcaaggcgctcgccctgggagcgtctactgtgatgatgggatccctgctcgcagctaccacagaagctcccggagaatacttttttagcgacggggtaaggcttaagaagtatcggggcatgggttccttggatgcgatggagaagtcatcatcgtcccagaaacgttacttctcagaaggtgacaaagtcaagatcgcgcagggcgtaagtgggagtatccaggataaagggagcattcagaaattcgtaccctacctaattgccggcatccaacatgggtgtcaggacataggagctagatccctaagtgtccttaggagcatgatgtactcgggggaactcaaatttgaaaaacgaaccatgagtgcacagattgaagggggagtgcatggcctgcactcttatgagaagagactctattag

SEQ ID NO: 16735 - DNA, 1800 bp, Artificial Sequence
  derived and/or modified sequence
atggaggggcctctgacgcctccgccactccagggtggtggcgcagctgccgtccccgaacccggtgccaggcaacacccaggtcatgaaactgcagcccagcgctatagcgcgaggcttctccaggccggatatgagccagaatcccccagactcgaccttgcaacccacccgaccactccaaggtctgaactgagctctgtggttctgctggctggcgtgggcgtacagatggacaggctgcgtcgcgcttccatggctgattatctgattagcggcggtaccggatacgtgccagaggatggcctgaccgcccagcagctgtttgcctctgcagatggcttaacctataatgattttctgatcctgcctgggtttattgattttatcgcggatgaggtcgatctaacaagtgctctgacaaggaagattactctgaaaaccccattgatctcctcccccatggacaccgtgactgaagccgacatggcaatcgccatggctctgatgggagggatcggttttatccaccataattgtacccctgagtttcaagctaacgaagtgcggaaggttaagaagtttgagcaggggttcataactgatcctgtggtactgtctccatcgcacaccgtgggtgacgttcttgaggccaaaatgagacacggcttttcagggattccaatcacagagacaggaactatgggctcaaagttagtgggcatcgtgacctctagagacattgactttctcgctgagaaggatcacactacactgctgagcgaggtgatgacacctagaattgaacttgtggtggccccagccggagtcaccctgaaagaggcgaatgaaattttacagcggtcgaagaaaggcaaactgcccattgtgaatgattgtgatgaactagtggccattattgcccgaactgacctaaaaaaaaatcgggactatccactggcctccaaggattcacagaaacagctgttatgcggcgcagctgtgggtaccagggaagatgacaaataccggctcgacctcttaacgcaagccggagtagacgtgattgtcctcgatagttcacagggaaatagtgtgtaccagattgccatggtgcactacatcaagcagaaatacccccatctccaggtgatcgggggaaacgtggtcaccgccgcacaggcaaagaatctgatagatgctggggtggatggactcagggtcggaatgggatgcggatccatctgtatcacccaagaggtgatggcatgtggccgtccgcaaggcaccgccgtgtacaaagtcgccgagtacgcaagaaggtttggcgtcccaataatagccgatggcggtatacagaccgtgggtcacgttgtgaaagctctagcccttggagcctctacagtaatgatgggatctctgcttgcagccaccactgaggcacccggagaatatttctttagtgatggggtgagactgaagaagtaccgcggtatgggcagtctggacgcgatggaaaagtctagcagctcccagaaaaggtatttctcagagggggataaggttaagatcgcccagggcgtctccggaagtatccaggacaagggatcgatccagaagttcgtcccttacctgattgcaggcattcaacatggttgtcaggacattggcgctcgctccctgagcgtcttgcgttcaatgatgtacagcggagagctgaaatttgagaagaggactatgtctgctcaaatcgaggggggagtgcacggcctgcattcttatgaaaaacggctatactag

SEQ ID NO: 16736 - DNA, 1800 bp, Artificial Sequence
  derived and/or modified sequence
atggagggccccctgacccccccccccctgcagggcggcggcgccgccgccgtgcccgagcccggcgccagacagcaccccggccacgagaccgccgcccagagatacagcgccagactgctgcaggccggctacgagcccgagagccccagactggacctggccacccaccccaccacccccagaagcgagctgagcagcgtggtgctgctggccggcgtgggcgtgcagatggacagactgagaagagccagcatggccgactacctgatcagcggcggcaccggctacgtgcccgaggacggcctgaccgcccagcagctgttcgccagcgccgacggcctgacctacaacgacttcctgatcctgcccggcttcatcgacttcatcgccgacgaggtggacctgaccagcgccctgaccagaaagatcaccctgaagacccccctgatcagcagccccatggacaccgtgaccgaggccgacatggccatcgccatggccctgatgggcggcatcggcttcatccaccacaactgcacccccgagttccaggccaacgaggtgagaaaggtgaagaagttcgagcagggcttcatcaccgaccccgtggtgctgagccccagccacaccgtgggcgacgtgctggaggccaagatgagacacggcttcagcggcatccccatcaccgagaccggcaccatgggcagcaagctggtgggcatcgtgaccagcagagacatcgacttcctggccgagaaggaccacaccaccctgctgagcgaggtgatgacccccagaatcgagctggtggtggcccccgccggcgtgaccctgaaggaggccaacgagatcctgcagagaagcaagaagggcaagctgcccatcgtgaacgactgcgacgagctggtggccatcatcgccagaaccgacctgaagaagaacagagactaccccctggccagcaaggacagccagaagcagctgctgtgcggcgccgccgtgggcaccagagaggacgacaagtacagactggacctgctgacccaggccggcgtggacgtgatcgtgctggacagcagccagggcaacagcgtgtaccagatcgccatggtgcactacatcaagcagaagtacccccacctgcaggtgatcggcggcaacgtggtgaccgccgcccaggccaagaacctgatcgacgccggcgtggacggcctgagagtgggcatgggctgcggcagcatctgcatcacccaggaggtgatggcctgcggcagaccccagggcaccgccgtgtacaaggtggccgagtacgccagaagattcggcgtgcccatcatcgccgacggcggcatccagaccgtgggccacgtggtgaaggccctggccctgggcgccagcaccgtgatgatgggcagcctgctggccgccaccaccgaggcccccggcgagtacttcttcagcgacggcgtgagactgaagaagtacagaggcatgggcagcctggacgccatggagaagagcagcagcagccagaagagatacttcagcgagggcgacaaggtgaagatcgcccagggcgtgagcggcagcatccaggacaagggcagcatccagaagttcgtgccctacctgatcgccggcatccagcacggctgccaggacatcggcgccagaagcctgagcgtgctgagaagcatgatgtacagcggcgagctgaagttcgagaagagaaccatgagcgcccagatcgagggcggcgtgcacggcctgcacagctacgagaagagactgtactag

SEQ ID NO: 16737 - protein, 514 aa, Artificial Sequence
  derived and/or modified sequence
MADYLISGGTSYVPDDGLTAQQLFNCGDGLTYNDFLILPGYIDFTADQVDLTSALTKKITLKTPLVSSPMDTVTEAGMAIAMALTGGIGFIHHNCTPEFQANEVRKVKKYEQGFITDPVVLSPKDRVRDVFEAKARHGFCGIPITDTGRMGSRLVGIISSRDIDFLKEEEHDCFLEEIMTKREDLVVAPAGITLKEANEILQRSKKGKLPIVNEDDELVAIIARTDLKKNRDYPLASKDAKKQLLCGAAIGTHEDDKYRLDLLAQAGVDVVVLDSSQGNSIFQINMIKYIKDKYPNLQVIGGNVVTAAQAKNLIDAGVDALRVGMGSGSICITQEVLACGRPQATAVYKVSEYARRFGVPVIADGGIQNVGHIAKALALGASTVMMGSLLAATTEAPGEYFFSDGIRLKKYRGMGSLDAMDKHLSSQNRYFSEADKIKVAQGVSGAVQDKGSIHKFVPYLIAGIQHSCQDIGAKSLTQVRAMMYSGELKFEKRTSSAQVEGGVHSLHSYEKRLF

SEQ ID NO: 16738 - protein, 357 aa, Artificial Sequence
  derived and/or modified sequence
MADYLISGGTSYVPDDGLTAQQLFNCGDGLTYNDFLILPGYIDFTADQVDLTSALTKKITLKTPLVSSPMDTVTEAGMAIAMALTGGIGFIHHNCTPEFQANEVRKVKKYEQGFITDPVVLSPKDRVRDVFEAKARHGFCGIPITDTGRMGSRLVGIISSRDIDFLKEEEHDCFLEEIMTKREDLVVAPAGITLKEANEILQRSKKGKLPIVNEDDELVAIIARTDLKKNRDYPLASKDAKKQLLCGAAIGTHEDDKYRLDLLAQAGVDVVVLDSSQGNSIFQINMIKYIKDKYPNLQVIGGNVVTAAQAKNLIDAGVDALRVGMGSGSICITQEVLACGRPQATAVCTQKQHPHFQ

SEQ ID NO: 16739 - DNA, 1545 bp, Artificial Sequence
  derived and/or modified sequence
atggccgactacctcatctctggcggaacctcctacgtacctgacgatggactgaccgctcagcaactgttcaactgtggagacggtcttacatacaatgatttcttgatcttacctggatacatagacttcacagccgaccaggtcgacctaacttctgcacttactaagaaaatcacactgaagacccctctcgtctcaagccctatggacacagtcaccgaggcaggtatggcgattgcgatggctctgaccggcggtatcggattcatccaccacaactgcactcccgagttccaggcaaacgaggtgcgcaaagtgaaaaaatacgagcaaggattcattactgatcccgtggtgctctctcccaaagatcgggtgcgggatgttttcgaagccaaagcccgtcacggattctgtggaattcccatcaccgatacaggcaggatgggatccaggttggtgggtatcattagcagccgcgacatcgatttcctgaaggaagaagagcacgactgctttcttgaggaaatcatgactaagagggaggatctggtagttgcaccagctggcatcacactgaaggaggctaatgaaattcttcagaggtcgaagaagggcaaactcccaattgtgaatgaggacgatgagctggtggccatcattgccagaaccgatctcaagaaaaaccgggattatcccctcgctagtaaggatgccaagaagcagctactctgcggcgccgctatcggaactcacgaagacgataagtaccggctcgatctcctagcacaggccggtgtcgacgtggtggtgctggacagctcacagggaaatagcatcttccaaatcaacatgatcaaatacatcaaagacaagtaccccaatctacaggtgataggcggcaatgtggtgacggctgcgcaggccaagaatctcattgacgcgggcgtcgatgctctcagggtgggaatgggctcaggtagcatctgcatcacacaagaggtgctagcatgcgggcgaccccaggccacagccgtgtacaaggtgtccgaatacgccagacgctttggcgtccccgtgatcgctgacggcggcatacagaacgtgggccacatagccaaggccttggcacttggagcatcgacagtcatgatgggaagcctgctggctgcaaccaccgaggccccaggggaatactttttctcagatggaattcgactgaagaaatacagaggcatgggatctttggatgcaatggacaaacacctgtcatcgcagaataggtacttctctgaggcagacaagattaaagtggctcaaggggtgagcggtgcagtccaggacaagggctcaatccacaaatttgtcccatacctgatcgctggtatacagcacagttgccaagatataggcgctaagtcactcactcaggtccgcgcaatgatgtactcgggtgagcttaagttcgaaaaacgcacctcgagcgcccaggttgaaggcggagtgcattcactgcacagctatgagaagaggctcttttag

SEQ ID NO: 16740 - DNA, 1074 bp, Artificial Sequence
  derived and/or modified sequence
atggccgactatctaatatccggcggcacttcctacgtgccagatgatggtttaacagctcagcagctctttaattgcggagacgggctgacctacaacgatttcctgattctcccaggttatatagatttcacagctgatcaggtggacttgaccagcgccctgacaaaaaagatcaccctgaagacacctctcgtatcctcacctatggacacggtaactgaagcgggtatggcaattgctatggcactcacaggagggatcgggttcatacaccacaattgtacgcccgaatttcaggccaacgaggttcggaaagttaagaaatacgagcaaggcttcattacagatccggtagtactgtctcccaaagacagggtgcgcgacgtctttgaggctaaagcaaggcatgggttctgcgggataccaattaccgacacggggaggatgggtagccggctggtcggcataatctcttcccgcgacatagacttccttaaagaagaagagcatgactgtttccttgaagagatcatgacaaaacgcgaggacctggtggtggcccccgcaggaattacccttaaggaggcaaacgaaattctacagagatccaagaaagggaagttgcctatcgtgaatgaggacgatgaactggtggccattatcgcacggactgacctgaaaaaaaatcgcgactacccgctggcatccaaggatgccaagaagcagctgctctgtggggccgctattggcacccatgaggacgataaataccgcctcgacttgctggcacaggccggagtggacgtggtcgtactggatagttctcagggcaacagcattttccagatcaatatgatcaaatacatcaaggacaagtaccccaatctccaggtgatcggagggaacgtggtgaccgccgctcaggcaaagaaccttatcgacgcaggcgtggatgcactccgggtcggcatgggatccgggtcaatttgtatcacacaggaggtgttggcatgtgggaggccccaagcaactgccgtgtgtacacagaagcagcacccacatttccagtag

SEQ ID NO: 16741 - DNA, 1545 bp, Artificial Sequence
  derived and/or modified sequence
atggctgactacctgatcagcggcggcaccagctatgtgcctgatgatggcctgacagcccagcagctgttcaactgtggagatggcctgacctacaatgacttcctgatcctgcccggctacatcgacttcaccgctgaccaggtggacctgaccagcgccctgaccaagaagatcaccctgaagacccccctggtgagcagccccatggacacagtgacagaggccggcatggccatcgccatggccctgactggaggcatcggcttcatccaccacaactgcaccccagagttccaggccaatgaggtgaggaaggtgaagaagtatgagcagggcttcatcacagatcctgtggtgctgagccccaaggacagagtgagagatgtgtttgaggccaaggcccggcacggcttctgtggcatccccatcacagacaccggccgcatgggcagccggctggtgggcatcatcagcagccgggacatcgacttcctgaaggaggaggagcatgactgcttcctggaggagatcatgaccaagcgggaggacctggtggtggccccagctggcatcaccctgaaggaggccaatgagatcctgcagaggagcaagaagggcaagctgcccatcgtgaatgaagatgatgagctggtggccatcatcgccaggacagacctgaagaagaacagagactaccccctggccagcaaggatgccaagaagcagctgctgtgtggggccgccatcggcacccatgaagatgacaagtaccgcctggacctgctggcccaggccggcgtggatgtggtggtgctggacagcagccagggcaacagcatcttccagatcaacatgatcaagtacatcaaggacaagtaccccaacctgcaggtgattggaggaaatgtggtgacagctgcccaggccaagaacctgattgatgctggggtggatgccctgcgggtgggcatgggcagcggcagcatctgcatcacccaggaggtgctggcctgtggccggccccaggccacagctgtgtacaaggtgtctgaatatgccaggagatttggagtgcctgtgattgctgatggcggcatccagaatgtgggccacatcgccaaggccctggccctgggcgccagcacagtgatgatgggcagcctgctggccgccaccacagaggcccctggagagtacttcttcagtgatggcatccggctgaagaagtaccggggcatgggcagcctggatgccatggacaagcacctgagcagccagaaccgctacttcagcgaggccgacaagatcaaggtggcccagggcgtgtctggagctgtgcaggacaagggcagcatccacaagtttgtgccctacctgattgctggcatccagcacagctgccaggacattggagccaagagcctgacccaggtgcgggccatgatgtacagcggggagctgaagtttgagaagaggaccagcagcgcccaggtggagggcggcgtgcacagcctgcacagctatgagaagaggctcttctag

SEQ ID NO: 16742 - DNA, 1074 bp, Artificial Sequence
  derived and/or modified sequence
atggctgactacctgatcagcggcggcaccagctatgtgcctgatgatggcctgacagcccagcagctgttcaactgtggagatggcctgacctacaatgacttcctgatcctgcccggctacatcgacttcaccgctgaccaggtggacctgaccagcgccctgaccaagaagatcaccctgaagacccccctggtgagcagccccatggacacagtgacagaggccggcatggccatcgccatggccctgactggaggcatcggcttcatccaccacaactgcaccccagagttccaggccaatgaggtgaggaaggtgaagaagtatgagcagggcttcatcacagatcctgtggtgctgagccccaaggacagagtgagagatgtgtttgaggccaaggcccggcacggcttctgtggcatccccatcacagacaccggccgcatgggcagccggctggtgggcatcatcagcagccgggacatcgacttcctgaaggaggaggagcatgactgcttcctggaggagatcatgaccaagcgggaggacctggtggtggccccagctggcatcaccctgaaggaggccaatgagatcctgcagaggagcaagaagggcaagctgcccatcgtgaatgaagatgatgagctggtggccatcatcgccaggacagacctgaagaagaacagagactaccccctggccagcaaggatgccaagaagcagctgctgtgtggggccgccatcggcacccatgaagatgacaagtaccgcctggacctgctggcccaggccggcgtggatgtggtggtgctggacagcagccagggcaacagcatcttccagatcaacatgatcaagtacatcaaggacaagtaccccaacctgcaggtgattggaggaaatgtggtgacagctgcccaggccaagaacctgattgatgctggggtggatgccctgcgggtgggcatgggcagcggcagcatctgcatcacccaggaggtgctggcctgtggccggccccaggccacagctgtgtgcacccagaagcagcacccccacttccagtag

SEQ ID NO: 16743 - DNA, 1545 bp, Artificial Sequence
  derived and/or modified sequence
atggccgactacctgatcagcggcggcaccagctacgtgcccgacgacggcttaacagcccagcagctgttcaactgtggcgatggactgacctacaatgacttcttgattctgccggggtatatcgactttactgctgaccaggtggatctgacatctgcattgacgaagaagatcactctaaaaacacctctcgtcagctcaccaatggacacggtgactgaagctggcatggctattgcgatggctcttacgggggggattggattcattcatcacaactgtacaccagagtttcaggcgaacgaagtaagaaaagtgaagaaatatgagcagggctttattaccgatccagttgtactttctccaaaggatcgggtgagggatgtatttgaggccaaagcgagacacggattttgcggcatccccattaccgacaccggtcgtatggggagccgcttggtgggcattatctcaagcagggatattgattttctgaaagaagaggaacacgactgcttcctcgaggaaatcatgacaaagcgcgaggatctggtagtggcgcccgccgggattacgctcaaggaggcaaacgaaatcctgcagaggtccaagaagggaaaactacccatagtgaacgaggatgatgagcttgtagctatcattgccagaacagatcttaagaaaaatcgcgattatcctctggctagcaaagatgcgaaaaagcagctgctgtgcggcgccgccatcggcacgcacgaagacgacaaatatcgattagacctcctggcccaggctggggtggatgttgtcgtcctagactcaagccagggcaattccattttccagattaacatgatcaaatatattaaggataagtaccccaaccttcaggtaattgggggaaatgttgtcaccgccgcccaagctaagaatttgatagatgccggtgtggatgccctccgagttggcatgggatccgggagtatttgtattactcaggaggtgcttgcatgcgggcgccctcaagccacagccgtgtataaggtctcagaatacgctagaaggtttggagttcccgtgattgcagacggcggtattcagaacgtgggacacatcgcgaaggccctagctctgggggctagcacagtgatgatgggatcattgttggctgccaccacagaggcacctggcgagtatttcttttctgacggcattcggctcaagaaatatcggggcatgggaagtctggacgctatggacaaacatctgagtagccagaaccgctatttctctgaagccgacaaaatcaaggttgctcagggtgtttccggggcagtacaggacaagggaagtattcataagttcgtgccttatctgattgcagggatccagcacagctgtcaggatatcggagctaagagcctcacacaggtgagagccatgatgtatagcggggagctcaagtttgaaaagagaactagctctgcccaggtggaaggcggagtccattcgctgcatagctacgagaagcggctcttttag

SEQ ID NO: 16744 - DNA, 1074 bp, Artificial Sequence
  derived and/or modified sequence
atggccgactacctgatcagcggcggcaccagctacgtgcccgacgacggcctgaccgcccagcagctgttcaactgcggcgacggactcacctacaatgattttctgatcctgccaggatatattgactttaccgccgatcaggttgacctcacgtctgctctgaccaaaaaaattacgttaaagacccctctggtttcctcgcctatggatacagtaactgaagcagggatggccattgccatggcccttaccggcggcatagggttcatccaccacaactgcacacccgagttccaggccaatgaagtcaggaaggtaaagaaatacgaacaggggttcatcacagatcccgttgtgctcagccccaaggacagagtacgggacgtatttgaagcgaaagcgcggcatggattctgcggcattcccatcactgacacaggtcgaatggggtctagactggtcggtattataagcagtcgcgatatcgattttctcaaagaggaggaacacgattgcttcctcgaagaaatcatgaccaaacgagaggacctggtggtcgcacccgcaggcatcacgctgaaggaagcaaacgagattttgcagcgctccaaaaaggggaaactccccattgtgaatgaggatgacgagctggtggccatcatcgcacgtactgatttgaagaaaaacagagattatcctctggcgtcaaaagacgcgaagaaacagctgctgtgtggtgccgccatcggcacacatgaggacgacaagtaccggttggacctgctcgcacaagcaggagtagacgtcgtggtgctggacagctcacagggtaactctatatttcagatcaacatgattaagtatataaaggacaaatacccaaatctccaggtcattggaggcaatgtcgtgactgctgcccaagcaaaaaacttgatcgacgcgggcgtggatgctctccgtgttggaatgggatctggctctatttgcattacccaggaggtcctggcgtgtgggaggccacaagccaccgctgtttgtacccagaagcagcaccctcacttccagtag

SEQ ID NO: 16745 - DNA, 1545 bp, Artificial Sequence
  derived and/or modified sequence
atggccgattatctaatctctggaggaacctcctacgttcccgacgacggactcacggcacagcagctgttcaactgcggagacggcctcacgtataatgacttcctgattctgcctggatacattgactttaccgcagatcaagtggaccttaccagcgcgcttaccaaaaagattactctgaaaacgcctctggtcagtagccccatggacactgttactgaggctggcatggcgattgcgatggccctgaccggaggcatcggatttattcaccataactgcacgcccgagttccaagccaacgaagtccggaaggtaaaaaagtacgaacagggcttcatcacagatcccgtggtgctcagccctaaggaccgcgtgcgggatgtgttcgaagccaaggctcggcatggattctgtggtattcccattaccgataccgggcgtatgggctctcggctcgtgggtattatctcatcccgggatatcgactttctcaaggaggaggagcatgattgcttccttgaggagataatgaccaagagggaggatctagtggttgcacctgctggtatcacactcaaggaggcaaatgaaattctgcagcgaagcaagaaaggaaaacttccgattgttaatgaggatgacgagcttgtggccatcattgccaggaccgatctgaaaaaaaaccgcgactacccacttgcatctaaggacgctaaaaaacagctgctctgtggcgcagcgattggtacccacgaggatgacaaatacagactcgatctgctggctcaggccggagtggatgtcgtggttctagacagctcccaggggaattcgatatttcagattaatatgataaagtatatcaaggacaaatatcccaatctccaggtgatcggaggtaatgttgtaaccgcagcacaggctaagaatctgattgatgcgggagtcgacgcgctgagggtgggcatgggatccgggtcaatttgcatcacacaggaggttctcgcatgtggccgtccacaggctactgccgtctataaagtgtcagagtacgcaagaaggtttggggtccccgtaatcgcagacggcggaatacagaacgttggccacattgctaaagcgctagctctcggggcttccaccgtaatgatgggaagtctcctggctgctacgaccgaagcccctggggagtactttttctccgatggcattagactgaagaaatatagaggaatgggctccctggatgcgatggacaagcatctgtccagtcagaatcgctacttctctgaagccgacaaaattaaagtagctcagggcgtttccggtgccgtgcaggacaaaggttcaatccacaagtttgtgccatatctcatagcaggcatacagcattcttgccaggacatcggcgcaaagagtctcactcaagttcgtgccatgatgtactctggcgagctgaaatttgagaaaagaacttcctccgctcaggtggagggaggcgtgcatagccttcactcttacgagaaacgcctgttttag

SEQ ID NO: 16746 - DNA, 1074 bp, Artificial Sequence
  derived and/or modified sequence
atggctgattatttaatttctgggggaaccagctacgtgccggacgatggtctgacagcacaacagttgttcaactgcggcgatgggctgacatacaacgacttccttattctaccgggatacatcgattttaccgccgatcaggtggacctaacctctgctctgacaaaaaaaatcacattgaagactcccctggtttcgagccccatggacactgtgaccgaggccggtatggccattgctatggcactgacaggaggcattggattcattcaccacaattgcactccggagttccaagctaacgaagtgcgaaaggtcaaaaaatacgaacaggggttcattaccgaccctgtggtgctctcaccaaaggatagggttcgagatgtttttgaagccaaagctcggcatggcttttgcggcatcccaattactgatacaggacgcatgggaagtagattagtggggatcatttcttctagagacatagattttctgaaggaagaagaacacgattgcttccttgaagagattatgactaaacgcgaggacctcgtggtagcaccggcaggaatcacactgaaggaggcgaacgaaatccttcagcggtcgaagaagggcaagcttcccatcgtgaatgaagacgatgagctggtggctattatcgctcggactgacttgaagaaaaacagagactaccccctggcctctaaggatgctaaaaaacagttgctgtgtggtgccgctatcgggacgcatgaggacgacaaatatcgactggatctactcgctcaagccggagtagatgtagtcgtgctggactcatctcaagggaattctatatttcagatcaacatgattaagtacattaaggataaataccccaatctgcaagtaattgggggaaacgtcgtgaccgctgcccaagcgaaaaacctgattgacgctggtgtcgatgcactgcgggtcggcatgggcagcggttctatttgcatcactcaggaagtgctggcctgtggccgtccacaggccacagctgtttgtactcagaagcaacacccacactttcagtag

SEQ ID NO: 16747 - DNA, 1545 bp, Artificial Sequence
  derived and/or modified sequence
atggccgactacctgatcagcggcggcaccagctacgtgcccgacgacggcctgaccgcccagcagctgttcaactgcggcgacggcctgacctacaacgacttcctgatcctgcccggctacatcgacttcaccgccgaccaggtggacctgaccagcgccctgaccaagaagatcaccctgaagacccccctggtgagcagccccatggacaccgtgaccgaggccggcatggccatcgccatggccctgaccggcggcatcggcttcatccaccacaactgcacccccgagttccaggccaacgaggtgagaaaggtgaagaagtacgagcagggcttcatcaccgaccccgtggtgctgagccccaaggacagagtgagagacgtgttcgaggccaaggccagacacggcttctgcggcatccccatcaccgacaccggcagaatgggcagcagactggtgggcatcatcagcagcagagacatcgacttcctgaaggaggaggagcacgactgcttcctggaggagatcatgaccaagagagaggacctggtggtggcccccgccggcatcaccctgaaggaggccaacgagatcctgcagagaagcaagaagggcaagctgcccatcgtgaacgaggacgacgagctggtggccatcatcgccagaaccgacctgaagaagaacagagactaccccctggccagcaaggacgccaagaagcagctgctgtgcggcgccgccatcggcacccacgaggacgacaagtacagactggacctgctggcccaggccggcgtggacgtggtggtgctggacagcagccagggcaacagcatcttccagatcaacatgatcaagtacatcaaggacaagtaccccaacctgcaggtgatcggcggcaacgtggtgaccgccgcccaggccaagaacctgatcgacgccggcgtggacgccctgagagtgggcatgggcagcggcagcatctgcatcacccaggaggtgctggcctgcggcagaccccaggccaccgccgtgtacaaggtgagcgagtacgccagaagattcggcgtgcccgtgatcgccgacggcggcatccagaacgtgggccacatcgccaaggccctggccctgggcgccagcaccgtgatgatgggcagcctgctggccgccaccaccgaggcccccggcgagtacttcttcagcgacggcatcagactgaagaagtacagaggcatgggcagcctggacgccatggacaagcacctgagcagccagaacagatacttcagcgaggccgacaagatcaaggtggcccagggcgtgagcggcgccgtgcaggacaagggcagcatccacaagttcgtgccctacctgatcgccggcatccagcacagctgccaggacatcggcgccaagagcctgacccaggtgagagccatgatgtacagcggcgagctgaagttcgagaagagaaccagcagcgcccaggtggagggcggcgtgcacagcctgcacagctacgagaagagactgttctag

SEQ ID NO: 16748 - DNA, 1074 bp, Artificial Sequence
  derived and/or modified sequence
atggccgactacctgatcagcggcggcaccagctacgtgcccgacgacggcctgaccgcccagcagctgttcaactgcggcgacggcctgacctacaacgacttcctgatcctgcccggctacatcgacttcaccgccgaccaggtggacctgaccagcgccctgaccaagaagatcaccctgaagacccccctggtgagcagccccatggacaccgtgaccgaggccggcatggccatcgccatggccctgaccggcggcatcggcttcatccaccacaactgcacccccgagttccaggccaacgaggtgagaaaggtgaagaagtacgagcagggcttcatcaccgaccccgtggtgctgagccccaaggacagagtgagagacgtgttcgaggccaaggccagacacggcttctgcggcatccccatcaccgacaccggcagaatgggcagcagactggtgggcatcatcagcagcagagacatcgacttcctgaaggaggaggagcacgactgcttcctggaggagatcatgaccaagagagaggacctggtggtggcccccgccggcatcaccctgaaggaggccaacgagatcctgcagagaagcaagaagggcaagctgcccatcgtgaacgaggacgacgagctggtggccatcatcgccagaaccgacctgaagaagaacagagactaccccctggccagcaaggacgccaagaagcagctgctgtgcggcgccgccatcggcacccacgaggacgacaagtacagactggacctgctggcccaggccggcgtggacgtggtggtgctggacagcagccagggcaacagcatcttccagatcaacatgatcaagtacatcaaggacaagtaccccaacctgcaggtgatcggcggcaacgtggtgaccgccgcccaggccaagaacctgatcgacgccggcgtggacgccctgagagtgggcatgggcagcggcagcatctgcatcacccaggaggtgctggcctgcggcagaccccaggccaccgccgtgtgcacccagaagcagcacccccacttccagtag

SEQ ID NO: 16749 - protein, 1032 aa, Artificial Sequence [sequence omitted]

SEQ ID NO: 16750 - protein, 617 aa, Artificial Sequence
  derived and/or modified sequence
MAWEARREPGPRRAAVRETVMLLLCLGVPTGRPYNVDTESALLYQGPHNTLFGYSVVLHSHGANRWLLVGAPTANWLANASVINPGAIYRCRIGKNPGQTCEQLQLGSPNGEPCGKTCLEERDNQWLGVTLSRQPGENGSIVTCGHRWKNIFYIKNENKLPTGGCYGVPPDLRTELSKRIAPCYQDYVKKFGENFASCQAGISSFYTKDLIVMGAPGSSYWTGSLFVYNITTNKYKAFLDKQNQVKFGSYLGYSVGAGHFRSQHTTEVVGGAPQHEQIGKAYIFSIDEKELNILHEMKGKKLGSYFGASVCAVDLNADGFSDLLVGAPMQSTIREEGRVFVYINSGSGAVMNAMETNLVGSDKYAARFGESIVNLGDIDNDGFEDVAIGAPQEDDLQGAIYIYNGRADGISSTFSQRIEGLQISKSLSMFGQSISGQIDADNNGYVDVAVGAFRSDSAVLLRTRPVVIVDASLSHPESVNRTKFDCVENGWPSVCIDLTLCFSYKGKEVPGYIVLFYNMSLDVNRKAESPPRFYFSSNGTSDVITGSIQVSSREANCRTHQAFMRKDVRDILTPIQIEAAYHLGPHVISKRSTEEFPPLQPILQQKKEKDIMKKTKK

SEQ ID NO: 16751 - DNA, 3099 bp, Artificial Sequence
  derived and/or modified sequence
atggcctgggaggccagaagagagcccggccccagaagagccgccgtgagagagaccgtgatgctgctgctgtgcctgggcgtgcccaccggcagaccctacaacgtggacaccgagagcgccctgctgtaccagggcccccacaacaccctgttcggctacagcgtggtgctgcacagccacggcgccaacagatggctgctggtgggcgcccccaccgccaactggctggccaacgccagcgtgatcaaccccggcgccatctacagatgcagaatcggcaagaaccccggccagacctgcgagcagctgcagctgggcagccccaacggcgagccctgcggcaagacctgcctggaggagagagacaaccagtggctgggcgtgaccctgagcagacagcccggcgagaacggcagcatcgtgacctgcggccacagatggaagaacatcttctacatcaagaacgagaacaagctgcccaccggcggctgctacggcgtgccccccgacctgagaaccgagctgagcaagagaatcgccccctgctaccaggactacgtgaagaagttcggcgagaacttcgccagctgccaggccggcatcagcagcttctacaccaaggacctgatcgtgatgggcgcccccggcagcagctactggaccggcagcctgttcgtgtacaacatcaccaccaacaagtacaaggccttcctggacaagcagaaccaggtgaagttcggcagctacctgggctacagcgtgggcgccggccacttcagaagccagcacaccaccgaggtggtgggcggcgccccccagcacgagcagatcggcaaggcctacatcttcagcatcgacgagaaggagctgaacatcctgcacgagatgaagggcaagaagctgggcagctacttcggcgccagcgtgtgcgccgtggacctgaacgccgacggcttcagcgacctgctggtgggcgcccccatgcagagcaccatcagagaggagggcagagtgttcgtgtacatcaacagcggcagcggcgccgtgatgaacgccatggagaccaacctggtgggcagcgacaagtacgccgccagattcggcgagagcatcgtgaacctgggcgacatcgacaacgacggcttcgaggacgtggccatcggcgccccccaggaggacgacctgcagggcgccatctacatctacaacggcagagccgacggcatcagcagcaccttcagccagagaatcgagggcctgcagatcagcaagagcctgagcatgttcggccagagcatcagcggccagatcgacgccgacaacaacggctacgtggacgtggccgtgggcgccttcagaagcgacagcgccgtgctgctgagaaccagacccgtggtgatcgtggacgccagcctgagccaccccgagagcgtgaacagaaccaagttcgactgcgtggagaacggctggcccagcgtgtgcatcgacctgaccctgtgcttcagctacaagggcaaggaggtgcccggctacatcgtgctgttctacaacatgagcctggacgtgaacagaaaggccgagagcccccccagattctacttcagcagcaacggcaccagcgacgtgatcaccggcagcatccaggtgagcagcagagaggccaactgcagaacccaccaggccttcatgagaaaggacgtgagagacatcctgacccccatccagatcgaggccgcctaccacctgggcccccacgtgatcagcaagagaagcaccgaggagttcccccccctgcagcccatcctgcagcagaagaaggagaaggacatcatgaagaagaccatcaacttcgccagattctgcgcccacgagaactgcagcgccgacctgcaggtgagcgccaagatcggcttcctgaagccccacgagaacaagacctacctggccgtgggcagcatgaagaccctgatgctgaacgtgagcctgttcaacgccggcgacgacgcctacgagaccaccctgcacgtgaagctgcccgtgggcctgtacttcatcaagatcctggagctggaggagaagcagatcaactgcgaggtgaccgacaacagcggcgtggtgcagctggactgcagcatcggctacatctacgtggaccacctgagcagaatcgacatcagcttcctgctggacgtgagcagcctgagcagagccgaggaggacctgagcatcaccgtgcacgccacctgcgagaacgaggaggagatggacaacctgaagcacagcagagtgaccgtggccatccccctgaagtacgaggtgaagctgaccgtgcacggcttcgtgaaccccaccagcttcgtgtacggcagcaacgacgagaacgagcccgagacctgcatggtggagaagatgaacctgaccttccacgtgatcaacaccggcaacagcatggcccccaacgtgagcgtggagatcatggtgcccaacagcttcagcccccagaccgacaagctgttcaacatcctggacgtgcagaccaccaccggcgagtgccacttcgagaactaccagagagtgtgcgccctggagcagcagaagagcgccatgcagaccctgaagggcatcgtgagattcctgagcaagaccgacaagagactgctgtactgcatcaaggccgacccccactgcctgaacttcctgtgcaacttcggcaagatggagagcggcaaggaggccagcgtgcacatccagctggagggcagacccagcatcctggagatggacgagaccagcgccctgaagttcgagatcagagccaccggcttccccgagcccaaccccagagtgatcgagctgaacaaggacgagaacgtggcccacgtgctgctggagggcctgcaccaccagagacccaagagatacttcaccatcgtgatcatcagcagcagcctgctgctgggcctgatcgtgctgctgctgatcagctacgtgatgtggaaggccggcttcttcaagagacagtacaagagcatcctgcaggaggagaacagaagagacagctggagctacatcaacagcaagagcaacgacgactag

SEQ ID NO: 16752 - DNA, 1854 bp, Artificial Sequence
  derived and/or modified sequence
atggcctgggaggccagaagagagcccggccccagaagagccgccgtgagagagaccgtgatgctgctgctgtgcctgggcgtgcccaccggcagaccctacaacgtggacaccgagagcgccctgctgtaccagggcccccacaacaccctgttcggctacagcgtggtgctgcacagccacggcgccaacagatggctgctggtgggcgcccccaccgccaactggctggccaacgccagcgtgatcaaccccggcgccatctacagatgcagaatcggcaagaaccccggccagacctgcgagcagctgcagctgggcagccccaacggcgagccctgcggcaagacctgcctggaggagagagacaaccagtggctgggcgtgaccctgagcagacagcccggcgagaacggcagcatcgtgacctgcggccacagatggaagaacatcttctacatcaagaacgagaacaagctgcccaccggcggctgctacggcgtgccccccgacctgagaaccgagctgagcaagagaatcgccccctgctaccaggactacgtgaagaagttcggcgagaacttcgccagctgccaggccggcatcagcagcttctacaccaaggacctgatcgtgatgggcgcccccggcagcagctactggaccggcagcctgttcgtgtacaacatcaccaccaacaagtacaaggccttcctggacaagcagaaccaggtgaagttcggcagctacctgggctacagcgtgggcgccggccacttcagaagccagcacaccaccgaggtggtgggcggcgccccccagcacgagcagatcggcaaggcctacatcttcagcatcgacgagaaggagctgaacatcctgcacgagatgaagggcaagaagctgggcagctacttcggcgccagcgtgtgcgccgtggacctgaacgccgacggcttcagcgacctgctggtgggcgcccccatgcagagcaccatcagagaggagggcagagtgttcgtgtacatcaacagcggcagcggcgccgtgatgaacgccatggagaccaacctggtgggcagcgacaagtacgccgccagattcggcgagagcatcgtgaacctgggcgacatcgacaacgacggcttcgaggacgtggccatcggcgccccccaggaggacgacctgcagggcgccatctacatctacaacggcagagccgacggcatcagcagcaccttcagccagagaatcgagggcctgcagatcagcaagagcctgagcatgttcggccagagcatcagcggccagatcgacgccgacaacaacggctacgtggacgtggccgtgggcgccttcagaagcgacagcgccgtgctgctgagaaccagacccgtggtgatcgtggacgccagcctgagccaccccgagagcgtgaacagaaccaagttcgactgcgtggagaacggctggcccagcgtgtgcatcgacctgaccctgtgcttcagctacaagggcaaggaggtgcccggctacatcgtgctgttctacaacatgagcctggacgtgaacagaaaggccgagagcccccccagattctacttcagcagcaacggcaccagcgacgtgatcaccggcagcatccaggtgagcagcagagaggccaactgcagaacccaccaggccttcatgagaaaggacgtgagagacatcctgacccccatccagatcgaggccgcctaccacctgggcccccacgtgatcagcaagagaagcaccgaggagttcccccccctgcagcccatcctgcagcagaagaaggagaaggacatcatgaagaagaccaagaagtag

SEQ ID NO: 16753 - DNA, 3099 bp, Artificial Sequence
  derived and/or modified sequence
atggcctgggaggccagacgggagcctgggccccggagggcagcagtgagggaaacagtgatgcttctgctgtgcctgggcgtccctaccggccgaccctataatgttgacacggaaagcgctctgctctaccagggtccccataatactctgttcggctattcagttgtcttgcattcccacggtgcaaatcggtggttgctcgtgggcgccccgacagccaattggctagcgaacgcatccgtgatcaacccaggagctatctaccgatgtcgcattggaaagaatcctggacagacatgcgaacagctgcaactcggctctcctaacggcgagccctgtgggaagacatgcttagaggaaagggacaaccagtggctcggggtgacacttagccgccagcccggagaaaacggatccattgtgacttgcggacaccggtggaaaaacatattttacatcaagaacgagaataagctgcctacagggggatgctacggtgtgccaccggacctgaggactgaactgtctaagcgcatcgcgccctgctaccaggactatgtcaagaagtttggagagaacttcgcctcgtgccaagctggcatctcctcattctataccaaggatctcatagtgatgggcgcccccggtagcagctattggactgggtcactttttgtctataatatcacaacaaataaatataaagctttcttggacaagcagaatcaggtgaagttcggatcatacctcggatactccgtgggagccggtcacttccggagtcagcacactactgaggttgttggaggagccccccagcacgagcagatagggaaggcctacattttctccatcgacgagaaggagctcaacattctccacgagatgaaagggaagaagctcgggtcgtatttcggggcctctgtctgtgccgtagacctgaacgcggacgggttttccgatcttctggtcggcgcccccatgcagtcaaccattcgggaggaagggagggtttttgtgtacattaatagcggaagtggcgctgtgatgaacgcaatggaaactaacctcgttgggagcgacaaatatgctgcgagattcggtgagtccattgtgaatctgggagatatcgacaacgacgggttcgaggatgtggccattggggcccctcaagaggatgatttgcaaggtgccatctacatctataacggtcgggcggacggaatcagtagcaccttcagtcagagaattgagggcctccagatttcgaaaagcctgagcatgtttgggcagagcatctcagggcagatcgacgcggataacaatggctacgtcgatgtggccgtaggagcttttcggtcagatagcgccgttctgttacgcactcggccggtcgtgattgttgatgcctcattgtctcaccccgaatcggtgaatcgcactaaatttgactgcgtggagaacgggtggccctccgtgtgcatcgacttgaccctgtgtttctcttacaagggcaaggaggtcccagggtatatcgtcttattttacaatatgagcctcgacgttaaccgtaaggcagaatcaccaccccgattttacttttcatccaatggtacttctgatgtgatcacagggagcattcaagtctcaagcagagaggcgaactgcaggacacatcaggcattcatgcgcaaagacgtccgcgacattctgactccaattcagattgaggctgcctatcacttgggccctcatgtgatatcaaaaagaagcactgaggaattcccacctctgcagcccatcctccagcagaagaaagagaaagacatcatgaaaaaaaccattaactttgctcgcttctgtgcccatgaaaactgctcagctgatttacaggtatctgctaaaatcgggtttctgaagccccatgagaataaaacctatctcgccgtgggcagcatgaaaacactcatgttgaatgtgagcctgtttaatgcgggagatgacgcatacgaaaccacattgcacgttaagttacctgtgggtctttatttcattaaaattctggagctggaggagaagcagattaactgtgaagtcaccgataacagtggtgtggtgcagctcgactgcagcatcgggtacatttatgttgaccacctgagcaggatcgacatttcatttctgcttgacgtctcgagtctatcacgggctgaggaagatctgtctattaccgttcacgccacatgtgagaatgaggaagagatggataacctgaaacactctcgcgtgactgtcgcaatccctctgaagtacgaagtgaagttaacggtccacgggttcgtcaacccaacatcatttgtgtatgggtctaatgacgaaaacgagccggaaacttgtatggtggagaaaatgaacctgactttccacgtgattaatactggcaactccatggctccgaacgtcagcgttgaaattatggtacctaactcgttttctccccaaacggataaactcttcaacatattggatgtacagacaacgacaggagaatgtcacttcgagaactatcaaagagtgtgcgcccttgagcagcagaaaagcgccatgcagacgctgaaaggaatcgtgagattcctgtcaaaaaccgataaaagactgctctattgtatcaaggctgacccgcactgtttgaatttcttgtgtaattttggaaagatggagtctggcaaggaggcgtccgttcatatccagctggaaggcaggcccagcatactggaaatggacgagacgagtgctctgaaattcgagattcgggcgaccggcttccccgaacctaacccaagagttatcgaactgaacaaggatgaaaacgtcgctcacgtgctcctcgaaggcctgcaccatcagagacccaaacggtattttacgatagtgattatttcctcatcgctgctgcttggcctcatagtgctcctgttgatttcctatgttatgtggaaagccgggtttttcaaacgacagtacaagagtatcctgcaggaggaaaatagacgcgacagttggtcctatatcaatagcaaatcaaatgatgactag

SEQ ID NO: 16754 - DNA, 1854 bp, Artificial Sequence
  derived and/or modified sequence
atggcttgggaagcaaggcgagaacccggtccaagacgcgctgcagtcagggaaacagtcatgctccttctgtgtctcggagtaccaactggccggccctacaacgtggacaccgagtcagcactgctgtatcagggcccccacaacactctttttggctattctgtggtgctacactcccacggagccaataggtggctgctcgttggagcacctacggctaactggcttgctaatgcttcggtgattaatccaggtgctatttacaggtgccgaatcggtaagaaccctgggcagacgtgcgaacagctccagctcggatctccgaacggagaaccatgtggcaagacatgtctggaggaacgcgacaaccagtggttgggggtaactctctccagacagcccggtgaaaacggttccatcgtgacttgcggacataggtggaaaaatattttctatatcaaaaatgaaaacaaacttcccactggcggatgttatggcgtccctcccgaccttaggacagaactgagtaagagaatcgctccatgttaccaggattatgtcaaaaagtttggagagaattttgcaagttgccaggccggcatcagttctttttacaccaaagatctaatagtgatgggagccccgggttccagttattggacgggttccctttttgtatataacatcacaactaataaatataaggcctttctggacaaacagaaccaggtcaagtttggaagctacctcggatactccgtgggagcggggcacttccgtagccagcatacaaccgaggtagtgggtggtgccccacagcatgagcagatcggaaaagcttacatttttagtatagatgagaaggagctcaacattttacatgaaatgaagggaaaaaaattgggaagctatttcggagcatctgtctgtgcagtggatttgaatgcggatgggttcagcgaccttttggtcggagcccccatgcagtccaccatccgcgaggaagggagagtattcgtttatattaatagtggttcaggggcagtgatgaatgcaatggagacaaacctggtcggttcagacaaatatgcggccaggttcggggaaagtatagtcaatttgggggacatagacaacgatgggttcgaggacgtggcaatcggggctccccaagaagacgacctccaaggagcgatctacatctacaacgggcgtgcagacgggatttccagcacattttcccaaagaatcgagggcttacaaatcagtaagtccttgtcaatgttcgggcagtccatcagcgggcagatcgacgctgataataatggctacgtggacgttgcagttggtgctttcaggtccgactctgctgtgctgttaaggacccggcccgtggtgattgtagatgcctccctgagccatcctgaatccgtcaaccgaactaagttcgattgcgtggaaaatggctggccctcagtctgcattgatcttaccctttgtttctcatacaagggaaaggaggtccctgggtacatcgtgctgttctacaatatgtccctagatgtcaacaggaaggcagagtcccctccaaggttttactttagtagtaatggcacatccgatgtgatcactggatccattcaggtatcaagtagggaggccaactgtagaacacaccaggcgttcatgcgaaaggacgtgagagacatcctgaccccgatccagatcgaagccgcataccacctcggcccccatgtcatcagtaagcgttccaccgaggagttcccgccgctgcaaccaatcctgcagcaaaaaaaggaaaaggatataatgaaaaagacgaagaagtag

SEQ ID NO: 16755 - DNA, 3099 bp, Artificial Sequence
  derived and/or modified sequence
atggcctgggaggcccggcgggagcccggcccccggcgggctgctgtgcgggagaccgtgatgctgctgctgtgcctgggcgtgcccaccggccggccctacaacgtggacacagagagcgccctgctgtaccagggcccccacaacaccctgtttggctacagcgtggtgctgcacagccatggagccaaccgctggctgctggtgggcgcccccacagccaactggctggccaatgccagcgtcatcaaccctggggccatctaccgctgcagaattggcaagaaccctggccagacctgtgagcagctgcagctgggcagccccaacggggagccctgtgggaagacctgcctggaggagcgggacaaccagtggctgggcgtgaccctgagccggcagcctggagaaaatggcagcatcgtgacctgtggccaccgctggaagaacatcttctacatcaagaatgaaaacaagctgcccaccggcggctgctacggcgtgcccccagacctgaggacagagctgagcaagagaattgccccctgctaccaggactatgtgaagaagtttggagaaaattttgccagctgccaggccggcatcagcagcttctacaccaaggacctgattgtgatgggcgcccctggcagcagctactggacaggcagcctgtttgtgtacaacatcaccaccaacaagtacaaggccttcctggacaagcagaaccaggtgaagtttggcagctacctgggctacagcgtgggcgccggccacttccgcagccagcacaccacagaggtggtgggcggggccccccagcacgagcagatcggcaaggcctacatcttcagcattgatgagaaggagctgaacatcctgcacgagatgaagggcaagaagctgggcagctactttggagcctctgtgtgtgctgtggacctgaatgctgatggcttcagtgacctgctggtgggcgcccccatgcagagcaccatccgggaggagggccgggtgtttgtgtacatcaacagcggcagcggggctgtgatgaatgccatggagaccaacctggtgggcagtgacaagtatgctgccaggtttggagagagcatcgtgaacctgggggacatcgacaatgatggctttgaagatgtggccatcggggccccccaggaggatgacctgcagggcgccatctacatctacaacggccgggcagatggcatcagcagcaccttcagccagagaattgagggcctgcagatcagcaagagcctgtccatgtttggccagagcatcagcggccagattgatgctgacaacaacggctacgtggatgtggccgtgggcgccttcagaagtgacagcgctgtgctgctgcggaccaggcctgtggtgattgtggatgccagcctgagccaccctgagagcgtgaacagaaccaagtttgactgtgtggagaatggctggcccagcgtgtgcatcgacctgaccctgtgcttctcctacaagggcaaggaggtgcccggctacatcgtgctcttctacaacatgagcctggatgtgaacaggaaggccgagagccccccacgcttctacttcagcagcaatggcaccagtgatgtgatcaccggcagcatccaggtgagcagccgggaggccaactgcaggacccaccaggccttcatgaggaaggatgtgcgggacatcctgacccccatccagattgaagctgcctaccacctgggcccccacgtgatcagcaagaggagcacagaggagttcccccccctgcagcccatcctgcagcagaagaaggagaaggacatcatgaagaagaccatcaactttgcccgcttctgtgcccacgagaactgcagcgctgacctgcaggtgtctgccaagattggcttcctgaagccccatgagaacaagacctacctggccgtgggctccatgaagaccctgatgctgaatgtgtccctcttcaatgctggagatgatgcctatgagaccaccctgcacgtgaagctgcctgtgggcctgtacttcatcaagatcctggagctggaggagaagcagatcaactgtgaggtgacagacaacagcggcgtggtgcagctggactgcagcatcggctacatctacgtggaccacctgagcagaattgacatctccttcctgctggatgtgagcagcctgagcagagctgaggaggacctgagcatcaccgtgcacgccacctgtgaaaatgaggaggagatggacaacctgaagcacagccgggtgacagtggccatccccctgaagtatgaggtgaagctgactgtgcacggctttgtgaaccccaccagctttgtgtatggcagcaatgatgaaaatgaacctgagacctgcatggtggagaagatgaacctgaccttccacgtgatcaacacaggcaacagcatggccccaaatgtgtctgtggagatcatggtgcccaacagcttcagcccccagacagacaagctgttcaacatcctggatgtgcagaccaccactggagagtgccactttgagaactaccagagggtgtgtgccctggagcagcagaagagcgccatgcagaccctgaagggcatcgtgcgcttcctgagcaagacagacaagaggctgctgtactgcatcaaggctgacccccactgcctgaacttcctgtgcaactttgggaagatggagagcggcaaggaggcctctgtgcacatccagctggagggccggcccagcatcctggagatggatgagaccagcgccctgaagtttgagatccgggccaccggcttccctgagcccaacccccgggtgattgagctgaacaaggatgaaaatgtggcccacgtgctgctggagggcctgcaccaccagaggcccaagcgctacttcaccatcgtcatcatcagcagcagcctgctgctgggcctcatcgtgctgctgctgatctcctatgtgatgtggaaggccggcttcttcaagaggcagtacaagagcatcctgcaggaggagaacagaagagacagctggagctacatcaacagcaagagcaatgatgactag

SEQ ID NO: 16756 - DNA, 1854 bp, Artificial Sequence
  derived and/or modified sequence
atggcctgggaggcccggcgggagcccggcccccggcgggctgctgtgcgggagaccgtgatgctgctgctgtgcctgggcgtgcccaccggccggccctacaacgtggacacagagagcgccctgctgtaccagggcccccacaacaccctgtttggctacagcgtggtgctgcacagccatggagccaaccgctggctgctggtgggcgcccccacagccaactggctggccaatgccagcgtcatcaaccctggggccatctaccgctgcagaattggcaagaaccctggccagacctgtgagcagctgcagctgggcagccccaacggggagccctgtgggaagacctgcctggaggagcgggacaaccagtggctgggcgtgaccctgagccggcagcctggagaaaatggcagcatcgtgacctgtggccaccgctggaagaacatcttctacatcaagaatgaaaacaagctgcccaccggcggctgctacggcgtgcccccagacctgaggacagagctgagcaagagaattgccccctgctaccaggactatgtgaagaagtttggagaaaattttgccagctgccaggccggcatcagcagcttctacaccaaggacctgattgtgatgggcgcccctggcagcagctactggacaggcagcctgtttgtgtacaacatcaccaccaacaagtacaaggccttcctggacaagcagaaccaggtgaagtttggcagctacctgggctacagcgtgggcgccggccacttccgcagccagcacaccacagaggtggtgggcggggccccccagcacgagcagatcggcaaggcctacatcttcagcattgatgagaaggagctgaacatcctgcacgagatgaagggcaagaagctgggcagctactttggagcctctgtgtgtgctgtggacctgaatgctgatggcttcagtgacctgctggtgggcgcccccatgcagagcaccatccgggaggagggccgggtgtttgtgtacatcaacagcggcagcggggctgtgatgaatgccatggagaccaacctggtgggcagtgacaagtatgctgccaggtttggagagagcatcgtgaacctgggggacatcgacaatgatggctttgaagatgtggccatcggggccccccaggaggatgacctgcagggcgccatctacatctacaacggccgggcagatggcatcagcagcaccttcagccagagaattgagggcctgcagatcagcaagagcctgtccatgtttggccagagcatcagcggccagattgatgctgacaacaacggctacgtggatgtggccgtgggcgccttcagaagtgacagcgctgtgctgctgcggaccaggcctgtggtgattgtggatgccagcctgagccaccctgagagcgtgaacagaaccaagtttgactgtgtggagaatggctggcccagcgtgtgcatcgacctgaccctgtgcttctcctacaagggcaaggaggtgcccggctacatcgtgctcttctacaacatgagcctggatgtgaacaggaaggccgagagccccccacgcttctacttcagcagcaatggcaccagtgatgtgatcaccggcagcatccaggtgagcagccgggaggccaactgcaggacccaccaggccttcatgaggaaggatgtgcgggacatcctgacccccatccagattgaagctgcctaccacctgggcccccacgtgatcagcaagaggagcacagaggagttcccccccctgcagcccatcctgcagcagaagaaggagaaggacatcatgaagaagaccaagaagtag

SEQ ID NO: 16757 - DNA, 4189 bp, Artificial Sequence
  derived and/or modified sequence
gccatcccgcgctctgcgggctgggaggcccgggccaggacgcgagtcctgcgcagccgaggttccccagcgccccctgcagccgcgcgtaggcagagacggagcccggccctgcgcctccgcaccacgcccgggaccccacccagcggcccgtacccggagaagcagcgcgagcacccgaagctcccggctggcggcagaaaccgggagtggggccgggcgagtgcgcggcatcccaggccggcccgaacgctccgcccgcggtgggccgacttcccctcctcttccctctctccttcctttagcccgctggcgccggacacgctgcgcctcatctcttggggcgttcttccccgttggccaaccgtcgcatcccgtgcaactttggggtagtggccgtttagtgttgaatgttccccaccgagagcgcatggcttgggaagcgaggcgcgaacccggcccccgaagggccgccgtccgggagacggtgatgctgttgctgtgcctgggggtcccgaccggccgcccctacaacgtggacactgagagcgcgctgctttaccagggcccccacaacacgctgttcggctactcggtcgtgctgcacagccacggggcgaaccgatggctcctagtgggtgcgcccactgccaactggctcgccaacgcttcagtgatcaatcccggggcgatttacagatgcaggatcggaaagaatcccggccagacgtgcgaacagctccagctgggtagccctaatggagaaccttgtggaaagacttgtttggaagagagagacaatcagtggttgggggtcacactttccagacagccaggagaaaatggatccatcgtgacttgtgggcatagatggaaaaatatattttacataaagaatgaaaataagctccccactggtggttgctatggagtgccccctgatttacgaacagaactgagtaaaagaatagctccgtgttatcaagattatgtgaaaaaatttggagaaaattttgcatcatgtcaagctggaatatccagtttttacacaaaggatttaattgtgatgggggccccaggatcatcttactggactggctctctttttgtctacaatataactacaaataaatacaaggcttttttagacaaacaaaatcaagtaaaatttggaagttatttaggatattcagtcggagctggtcattttcggagccagcatactaccgaagtagtcggaggagctcctcaacatgagcagattggtaaggcatatatattcagcattgatgaaaaagaactaaatatcttacatgaaatgaaaggtaaaaagcttggatcgtactttggagcttctgtctgtgctgtggacctcaatgcagatggcttctcagatctgctcgtgggagcacccatgcagagcaccatcagagaggaaggaagagtgtttgtgtacatcaactctggctcgggagcagtaatgaatgcaatggaaacaaacctcgttggaagtgacaaatatgctgcaagatttggggaatctatagttaatcttggcgacattgacaatgatggctttgaagatgttgctatcggagctccacaagaagatgacttgcaaggtgctatttatatttacaatggccgtgcagatgggatctcgtcaaccttctcacagagaattgaaggacttcagatcagcaaatcgttaagtatgtttggacagtctatatcaggacaaattgatgcagataataatggctatgtagatgtagcagttggtgcttttcggtctgattctgctgtcttgctaaggacaagacctgtagtaattgttgacgcttctttaagccaccctgagtcagtaaatagaacgaaatttgactgtgttgaaaatggatggccttctgtgtgcatagatctaacactttgtttctcatataagggcaaggaagttccaggttacattgttttgttttataacatgagtttggatgtgaacagaaaggcagagtctccaccaagattctatttctcttctaatggaacttctgacgtgattacaggaagcatacaggtgtccagcagagaagctaactgtagaacacatcaagcatttatgcggaaagatgtgcgggacatcctcaccccaattcagattgaagctgcttaccaccttggtcctcatgtcatcagtaaacgaagtacagaggaattcccaccacttcagccaattcttcagcagaagaaagaaaaagacataatgaaaaaaacaataaactttgcaaggttttgtgcccatgaaaattgttctgctgatttacaggtttctgcaaagattgggtttttgaagccccatgaaaataaaacatatcttgctgttgggagtatgaagacattgatgttgaatgtgtccttgtttaatgctggagatgatgcatatgaaacgactctacatgtcaaactacccgtgggtctttatttcattaagattttagagctggaagagaagcaaataaactgtgaagtcacagataactctggcgtggtacaacttgactgcagtattggctatatatatgtagatcatctctcaaggatagatattagctttctcctggatgtgagctcactcagcagagcggaagaggacctcagtatcacagtgcatgctacctgtgaaaatgaagaggaaatggacaatctaaagcacagcagagtgactgtagcaatacctttaaaatatgaggttaagctgactgttcatgggtttgtaaacccaacttcatttgtgtatggatcaaatgatgaaaatgagcctgaaacgtgcatggtggagaaaatgaacttaactttccatgttatcaacactggcaatagtatggctcccaatgttagtgtggaaataatggtaccaaattcttttagcccccaaactgataagctgttcaacattttggatgtccagactactactggagaatgccactttgaaaattatcaaagagtgtgtgcattagagcagcaaaagagtgcaatgcagaccttgaaaggcatagtccggttcttgtccaagactgataagaggctattgtactgcataaaagctgatccacattgtttaaatttcttgtgtaattttgggaaaatggaaagtggaaaagaagccagtgttcatatccaactggaaggccggccatccattttagaaatggatgagacttcagcactcaagtttgaaataagagcaacaggttttccagagccaaatccaagagtaattgaactaaacaaggatgagaatgttgcgcatgttctactggaaggactacatcatcaaagacccaaacgttatttcaccatagtgattatttcaagtagcttgctacttggacttattgtacttctattgatctcatatgttatgtggaaggctggcttctttaaaagacaatacaaatctatcctacaagaagaaaacagaagagacagttggagttatatcaacagtaaaagcaatgatgattaaggacttctttcaaattgagagaatggaaaacagactcaggttgtagtaaagaaatttaaaagacactgtttacaagaaaaaatgaattttgtttggacttcttttactcatgatcttgtgacatattatgtcttcatgcaaggggaaaatctcagcaatgattactctttgagatagaagaactgcaaaggtaataatacagccaaagataatctctcagcttttaaatgggtagagaaacactaaagcattcaatttattcaagaaaagtaagcccttgaagatatcttgaaatgaaagtataactgagttaaattatactggagaagtcttagacttgaaatactacttaccatatgtgcttgcctcagtaaaatgaaccccactgggtgggcagaggttcatttcaaatacatctttgatacttgttcaaaatatgttctttaaaaatataattttttagagagctgttcccaaattttctaacgagtggaccattatcactttaaagccctttatttataatacatttcctacgggctgtgttccaacaaccattttttttcagcagactatgaatattatagtattataggccaaactggcaaacttcagactgaacatgtacactggtttgagcttagtgaaattacttctgga

SEQ ID NO: 16758 - DNA, 2617 bp, Artificial Sequence
  derived and/or modified sequence
ataacgtctttgtcactaaaatgttccccaggggccttcggcgagtctttttgtttggttttttgtttttaatctgtggctcttgataatttatctagtggttgcctacacctgaaaaacaagacacagtgtttaactatcaacgaaagaactggacggctccccgccgcagtcccactccccgagtttgtggctggcatttgggccacgccgggctgggcggtcacagcgaggggcgcgcagtttggggtcacacagctccgcttctaggccccaaccaccgttaaaaggggaagcccgtgccccatcaggtccgctcttgctgagcccagagccatcccgcgctctgcgggctgggaggcccgggccaggacgcgagtcctgcgcagccgaggttccccagcgccccctgcagccgcgcgtaggcagagacggagcccggccctgcgcctccgcaccacgcccgggaccccacccagcggcccgtacccggagaagcagcgcgagcacccgaagctcccggctggcggcagaaaccgggagtggggccgggcgagtgcgcggcatcccaggccggcccgaacgctccgcccgcggtgggccgacttcccctcctcttccctctctccttcctttagcccgctggcgccggacacgctgcgcctcatctcttggggcgttcttccccgttggccaaccgtcgcatcccgtgcaactttggggtagtggccgtttagtgttgaatgttccccaccgagagcgcatggcttgggaagcgaggcgcgaacccggcccccgaagggccgccgtccgggagacggtgatgctgttgctgtgcctgggggtcccgaccggccgcccctacaacgtggacactgagagcgcgctgctttaccagggcccccacaacacgctgttcggctactcggtcgtgctgcacagccacggggcgaaccgatggctcctagtgggtgcgcccactgccaactggctcgccaacgcttcagtgatcaatcccggggcgatttacagatgcaggatcggaaagaatcccggccagacgtgcgaacagctccagctgggtagccctaatggagaaccttgtggaaagacttgtttggaagagagagacaatcagtggttgggggtcacactttccagacagccaggagaaaatggatccatcgtgacttgtgggcatagatggaaaaatatattttacataaagaatgaaaataagctccccactggtggttgctatggagtgccccctgatttacgaacagaactgagtaaaagaatagctccgtgttatcaagattatgtgaaaaaatttggagaaaattttgcatcatgtcaagctggaatatccagtttttacacaaaggatttaattgtgatgggggccccaggatcatcttactggactggctctctttttgtctacaatataactacaaataaatacaaggcttttttagacaaacaaaatcaagtaaaatttggaagttatttaggatattcagtcggagctggtcattttcggagccagcatactaccgaagtagtcggaggagctcctcaacatgagcagattggtaaggcatatatattcagcattgatgaaaaagaactaaatatcttacatgaaatgaaaggtaaaaagcttggatcgtactttggagcttctgtctgtgctgtggacctcaatgcagatggcttctcagatctgctcgtgggagcacccatgcagagcaccatcagagaggaaggaagagtgtttgtgtacatcaactctggctcgggagcagtaatgaatgcaatggaaacaaacctcgttggaagtgacaaatatgctgcaagatttggggaatctatagttaatcttggcgacattgacaatgatggctttgaagatgttgctatcggagctccacaagaagatgacttgcaaggtgctatttatatttacaatggccgtgcagatgggatctcgtcaaccttctcacagagaattgaaggacttcagatcagcaaatcgttaagtatgtttggacagtctatatcaggacaaattgatgcagataataatggctatgtagatgtagcagttggtgcttttcggtctgattctgctgtcttgctaaggacaagacctgtagtaattgttgacgcttctttaagccaccctgagtcagtaaatagaacgaaatttgactgtgttgaaaatggatggccttctgtgtgcatagatctaacactttgtttctcatataagggcaaggaagttccaggttacattgttttgttttataacatgagtttggatgtgaacagaaaggcagagtctccaccaagattctatttctcttctaatggaacttctgacgtgattacaggaagcatacaggtgtccagcagagaagctaactgtagaacacatcaagcatttatgcggaaagatgtgcgggacatcctcaccccaattcagattgaagctgcttaccaccttggtcctcatgtcatcagtaaacgaagtacagaggaattcccaccacttcagccaattcttcagcagaagaaagaaaaagacataatgaaaaaaacaaagaagtga

SEQ ID NO: 16759 - DNA, 3099 bp, Artificial Sequence
  derived and/or modified sequence
atggcctgggaggcccggcgggagcccggcccccggcgggccgccgtccgagaaacagtgatgctgctgctgtgccttggggtgcctaccggccggccctataacgtggacacagaatccgcgttgctgtatcagggtcctcacaataccctgttcggatactcagtggtccttcattctcatggcgccaatcggtggctgctggttggcgctcctaccgcaaactggctggcaaacgcatccgtgatcaatcctggagcaatttacaggtgtcgcatcggcaaaaacccaggacagacctgcgagcagctgcagcttggaagccccaatggagagccgtgtgggaagacctgtctggaggaaagggacaaccagtggctcggtgtgacgctttctcgccaacctggagaaaacggctcaatcgttacttgcggccaccgctggaaaaacatcttctacattaagaacgagaacaagcttcccaccggcggttgctacggggtgccaccagatctcagaaccgaactaagtaagcgtattgccccttgttatcaagactatgtcaaaaaatttggggaaaactttgcaagttgtcaggcgggtattagctctttctataccaaggatttgatcgtcatgggcgcaccaggctcttcatactggactggatcgctcttcgtctacaatataaccacgaataaatacaaagcattcctcgataaacaaaaccaggtcaaattcggatcctaccttggctactccgtgggggccgggcacttccgctcccagcatactactgaggtggtaggtggagccccgcagcacgagcagattggtaaagcgtatatcttctctattgatgagaaagaactgaatatcctgcacgagatgaagggtaagaaactggggtcctatttcggagcaagtgtctgcgccgtagatctaaatgctgacggattctccgacctgctagtcggggcaccaatgcagtccaccatcagggaggaagggcgagttttcgtgtatatcaacagcggctccggagccgtcatgaatgctatggagacaaacctggtgggaagcgataaatatgccgctcgctttggcgagtcaatagtcaacctgggcgacatagataacgatggctttgaggacgtcgcaatcggggcgcctcaggaggatgatctgcaaggagccatttacatatataatggaagggccgacggaatctcatctaccttttcgcagcggatcgagggcttacagatctccaagagcctcagcatgtttggtcagtccatcagcgggcagatagacgctgataacaatgggtacgtggatgtggcagtgggcgctttcagaagtgatagtgcagtcctccttaggacaaggcctgtagtcatcgtagacgcatccctttcacacccagagtccgtgaataggacgaaatttgactgcgtggaaaatggttggccaagtgtttgcattgatctgacattgtgctttagctacaagggtaaagaagtgccgggctacatcgttctgttctataacatgtcgttggacgtaaaccggaaggcagagtcaccacctcgattctacttcagctcaaatggcacgagcgatgtgattacaggctccattcaggtctccagtagagaggccaactgtcgcactcaccaggcattcatgcggaaggatgtgcgggacattctgactccaatccaaatcgaggctgcataccatctgggcccacacgttatttcaaaaaggagcactgaggagttcccaccattgcagcccattctccagcaaaagaaggagaaggacataatgaaaaaaaccataaatttcgccaggttttgcgcacacgagaactgcagtgccgatctgcaggtgagcgctaaaatcgggttcctgaagccccatgaaaacaagacttatctcgcggtgggatctatgaagacccttatgttaaacgtttccctcttcaacgctggtgacgatgcgtacgagaccaccctgcatgtgaagcttcccgtaggactctacttcattaaaatactcgagctcgaggagaaacagattaactgcgaggtcacagacaattccggggtcgtgcagcttgattgtagtatcggatatatttacgtagaccatctctctcgaatagacatttcttttctcttggacgtgtcaagtctttcccgggcagaagaagatttatcaattactgtgcatgcaacgtgcgagaacgaagaggaaatggataacttgaagcactctcgcgtaactgttgctatacccttgaagtatgaggtcaagcttactgtacatgggtttgtcaaccccacctccttcgtgtacggatcaaatgatgaaaacgaacccgaaacatgcatggtggagaagatgaacctgactttccatgtgattaatacggggaattctatggctccgaacgtgtccgtggaaattatggtgcccaacagcttcagcccacaaacagacaagttgtttaatatcttggacgtccagaccaccaccggcgagtgtcactttgaaaattaccagcgtgtatgcgccctggaacagcagaaatctgccatgcagacccttaagggcatcgtccggtttttgtccaagacagataagaggctgctgtattgtattaaagcagatcctcactgcctcaatttcctgtgcaattttggcaaaatggagagtggtaaggaagccagtgtccatatccaattggaaggacgcccaagtatactggaaatggacgagacaagcgcactgaaatttgagattcgcgcgactggcttcccagaaccaaatccccgggttattgaactcaataaggatgaaaatgtggctcacgtgctgctggaggggctccaccaccaacggccaaagcgttatttcaccatcgtcatcatatcctcttcactcttgctaggtctgatcgtgctgttacttattagctacgtgatgtggaaggcaggcttttttaaacggcagtacaagagtatactgcaggaggagaataggcgcgattcctggtcgtacatcaattccaagtccaacgatgattag

SEQ ID NO: 16760 - DNA, 1854 bp, Artificial Sequence
  derived and/or modified sequence
atggcctgggaggcccggcgggagcccggcccccggcgggccgccgtgcgggagactgttatgctgctgttgtgcctcggggtccccactggacgcccctacaacgtggacaccgagtccgccctgctgtaccaagggccgcacaatactcttttcggctatagcgttgtcctacattctcatggggcaaatagatggttactggtaggcgctcccacagctaactggctggccaatgcgagcgttattaacccaggggccatctaccgatgtagaattggcaagaaccctgggcagacatgcgagcagctgcagctggggtcaccaaatggcgagccctgcgggaagacttgcctggaggagcgcgataatcagtggcttggcgtgactttgagtcggcagcccggggaaaacggaagcatcgtcacctgcggacatcggtggaaaaacatcttttatattaaaaatgaaaacaagctccccacaggcggctgctatggggtgcctccagacctacgtaccgagctttcaaaaaggatcgcaccctgttaccaggactacgtcaagaaattcggagagaactttgctagctgtcaggcaggtatcagcagtttctacacaaaggacctcattgtgatgggtgctcctggaagctcctactggaccggtagtctgtttgtatataacatcactacaaataagtataaggcattcttggacaaacagaatcaagtcaagtttggcagctacttaggatatagcgtgggcgccggacactttcgatcacagcacacgaccgaagttgtgggtggcgctcctcagcacgagcaaattgggaaggcctatattttcagcatcgatgaaaaggagctcaacatcctccacgaaatgaaggggaagaaactggggagctatttcggcgccagcgtatgtgctgtggatcttaacgccgatggtttttcggacctgctggtgggcgcccccatgcagagtacaatccgggaagagggaagggtgtttgtgtatattaacagcggttctggcgccgtgatgaacgccatggagacgaaccttgtggggagtgacaagtatgctgcccggtttggggagagtatcgtgaatctgggtgatattgacaacgatggcttcgaagatgtcgctattggcgccccccaggaagatgatttgcagggggccatctacatctataatgggcgtgcagacggtatcagtagcacgttctcccagagaattgaaggactgcagatatcaaagtccctctccatgttcgggcaatccatcagcggacaaatcgatgcagacaacaatggctatgtcgacgtcgcagtgggggcctttcggtcagactcagccgtcctgctccgaacccgcccggtggtgatcgtggacgccagtctgagccaccccgaatcggttaatcgtacaaagtttgattgtgtggagaacgggtggccgagcgtgtgtatagacttaaccctatgcttctcctacaagggtaaggaagtgcctggttacatcgtgttgttctataacatgtcactagatgtcaaccgcaaagctgagtcccccccaagattctattttagcagcaacggcacctcagatgttatcaccggcagcatccaggtgagctccagggaagccaactgtcggacccaccaggccttcatgcgcaaagacgtgagggacattctgacacccatccagattgaagctgcctatcatcttggcccccatgtgatctcaaaacgcagcaccgaagagtttcctcccctgcagccaattctgcaacagaagaaggaaaaggatattatgaagaaaaccaaaaagtag

SEQ ID NO: 16761 - DNA, 3099 bp, Artificial Sequence
  derived and/or modified sequence
atggcgtgggaagccagaagagagcccggacccagacgagctgcagtgcgcgaaacagtcatgctcctcctgtgcctgggggttccgactggcaggccatataacgtggatactgagtcagccctgctttatcagggcccacacaatacgctgttcggttactcagttgttctgcattctcatggggctaataggtggctgctggtgggggcacccacggccaactggctggcaaatgcaagtgtcatcaacccgggtgctatttaccgatgccgaataggcaaaaacccagggcagacctgcgagcaactgcaacttggatctccaaatggagaaccctgtggtaagacttgcctggaagagagagacaaccagtggcttggcgttaccctttcacggcagccaggcgaaaatgggtcaatagtgacctgtggccacagatggaaaaacattttttatataaagaatgaaaataagcttcccaccggtgggtgctatggcgtgcccccagatctcagaacggagctgagcaaaagaatagcaccctgctaccaggattatgtgaaaaagtttggggaaaactttgccagctgccaggctggaattagtagtttttacaccaaagacctgatcgtaatgggcgcaccaggtagtagctactggaccggcagcttgtttgtctacaacatcactacgaacaaatacaaggctttccttgataagcagaatcaggtgaaattcggaagctaccttggctatagcgtcggcgcaggccatttcagatcccagcataccacggaagtcgttggcggagcacctcagcacgagcagatcgggaaggcctatattttctccatagacgaaaaggaactgaacattttgcacgaaatgaaaggtaaaaagctgggcagctacttcggcgcaagcgtgtgtgctgttgacctaaatgccgacggtttctcggatttgctggtaggcgctcccatgcagtctacaattcgtgaggaagggagggtgtttgtatatatcaattctggttctggggctgttatgaatgctatggaaactaacctcgtgggctctgataaatacgccgctcggttcggcgaatcaattgttaatctcggtgacattgacaacgatggcttcgaggacgttgccattggcgctcctcaggaagacgatctgcagggggctatctatatctacaacggacgcgcagacggaatttccagtacattcagccagcgcatcgagggattacagatatccaaatccctgtctatgtttggccagagcatctcgggacagatcgacgctgacaacaacgggtatgtggatgttgcagtgggggcttttaggtctgacagtgccgtgttactcagaacaagaccagtggtcatcgtggatgcatctctttcccaccctgagagtgtcaacaggacaaagttcgactgtgtggagaatgggtggccgtcagtatgtattgatcttacattgtgtttctcatacaaaggaaaagaggtgcccggatatattgtgcttttctataatatgtctcttgacgtcaataggaaggcagagtctcctcctagattctatttctcttccaacggtacctctgacgtgatcacaggttctatccaggtctcatctagggaggctaactgtcggacacaccaggcttttatgcgcaaggacgtgagggacatcctcacaccaatccagatcgaggccgcttaccacttaggccctcacgtgatttccaagaggagcacagaggagttccctcctttgcagcccatactacaacagaagaaagagaaggatataatgaaaaagactattaacttcgctaggttttgcgctcacgagaactgtagcgctgacctgcaggtgagtgcgaaaattggttttttgaagccacatgagaataagacttacctcgccgtgggcagtatgaagacactgatgttgaacgtctctttgttcaatgcaggagatgacgcttacgaaacaacgctacatgtgaagttaccagttggattatattttatcaaaatcctcgaactggaggaaaagcagatcaactgcgaggttacggacaatagtggtgtcgtgcagctggactgctctattgggtatatctatgtcgaccacctgtctcgcattgatattagttttctcctggatgtgtcttccctatccagggctgaggaggacctcagcattactgtgcacgccacctgcgaaaatgaggaagagatggataatcttaaacattctcgcgtcacagtggcgataccgcttaagtatgaggtgaagttgaccgtgcatggattcgtcaatcccacctcatttgtgtacggatccaatgacgagaatgagcccgaaacttgcatggtagagaaaatgaacctcaccttccacgtcataaacacaggcaacagtatggcgcctaacgtctctgtggagattatggtcccaaactcattctctccacaaaccgataaactgttcaatattttggacgtccagacgactacgggggaatgccatttcgagaactaccagagggtatgcgctttagagcagcagaaatcggccatgcagaccctgaagggcatcgtgaggtttctgtctaaaacggataaacgcttactctactgtatcaaggcggatccccattgtctcaattttctgtgcaattttggcaaaatggaatctggaaaggaagcgagtgtccacatccaattagaaggcaggccgagtatccttgaaatggacgagacttctgcccttaaattcgagatccgcgcaacaggcttccctgagcctaatcctcgggtgatcgaactgaataaagacgaaaacgtggcgcacgtgctgctcgaaggcttacaccatcaaaggccaaagcggtatttcacgatagtgataatatcctcctctttactccttggactgatcgtactgctgctgatcagttatgttatgtggaaggctgggttcttcaaacggcaatataagagcattctgcaggaagagaatcggcgagattcatggtcatatattaactctaagtcaaacgacgattag

SEQ ID NO: 16762 - DNA, 1854 bp, Artificial Sequence
  derived and/or modified sequence
atggcttgggaggctaggcgggagcccggtcccaggagagccgcagtgcgagagacggtgatgctgctcctgtgtttaggtgtccccactggccgtccctacaatgtggacactgagtccgccctcctgtaccagggacctcataacaccctatttggctactctgtggtgttgcactcccatggtgcaaaccgttggttgctggtgggagcacccaccgctaactggttggctaatgcttccgttatcaatcctggagccatctaccggtgtcggattgggaaaaatcctggacagacctgtgagcagttgcagcttggatcaccaaatggggagccgtgcgggaagacatgcctcgaggaacgagacaaccagtggctcggcgtaacactgtcacgtcagccgggagaaaacggctccatcgttacctgcggccataggtggaagaacattttttacattaagaacgagaataagctgcctactgggggttgctacggagtaccccctgaccttcgcacagaactgtccaagcggatagctccgtgctatcaagactatgtcaagaagtttggcgaaaactttgccagctgccaggccggtatctcatccttctacacaaaagatctgatcgttatgggggcacctgggagcagctactggacaggaagcctcttcgtctataacattaccacaaataagtacaaggcctttctcgataagcaaaaccaggtgaaattcggaagttacctcggctacagtgtgggtgccggacatttcaggtctcaacacacaacagaggtggtaggtggggctccacagcacgaacagatcgggaaggcttatattttctccatcgacgaaaaggaactgaatatcctgcacgagatgaagggtaagaaactggggtcatatttcggtgctagcgtgtgcgctgttgacctcaatgctgatggcttcagcgatctgcttgtgggcgctccaatgcaatctaccatcagggaggagggcagggtgtttgtctatattaactctgggagtggtgcagtgatgaatgctatggagacaaacctggtgggaagtgacaaatacgccgctcgttttggcgaaagtattgtgaatctgggggacatcgataatgatggcttcgaggacgtggccataggcgctccacaggaagacgacctgcaaggtgctatttatatttacaacggcagagcagacggaatctccagcactttttctcagcgtatagaagggctgcagatttccaagtcactctctatgtttggccagtccatctcgggtcagatcgacgccgacaataacggctacgtggacgtagccgtgggtgccttcaggagtgattccgcagttttgctaaggaccaggcccgtggttatcgtggatgcttcactgtcgcaccctgaatccgtaaacagaaccaagttcgattgtgtcgagaatggttggccctcagtttgtattgacctgactttgtgcttcagttacaagggcaaggaagtgcccggatatattgtgctgttttataacatgagtctggatgtgaaccggaaggcagaaagcccccctagattctacttctcgtctaacggtaccagtgacgtgatcacaggaagcatccaggtgtcctccagagaggccaactgtcgcacccatcaagctttcatgaggaaagacgtgcgtgatattttaacgccgatccagatagaggctgcttatcatttgggtccccatgtcatcagcaaaagaagcacagaagaattcccgcctctgcagccaattctgcagcaaaagaaggagaaggatatcatgaaaaaaacaaaaaaatag

SEQ ID NO: 16763 - protein, 1163 aa, Artificial Sequence
  derived and/or modified sequence
MTRTRAALLLFTALATSLGFNLDTEELTAFRVDSAGFGDSVVQYANSWVVVGAPQKITAANQTGGLYQCGYSTGACEPIGLQVPPEAVNMSLGLSLASTTSPSQLLACGPTVHHECGRNMYLTGLCFLLGPTQLTQRLPVSRQECPRQEQDIVFLIDGSGSISSRNFATMMNFVRAVISQFQRPSTQFSLMQFSNKFQTHFTFEEFRRSSNPLSLLASVHQLQGFTYTATAIQNVVHRLFHASYGARRDAAKILIVITDGKKEGDSLDYKDVIPMADAAGIIRYAIGVGLAFQNRNSWKELNDIASKPSQEHIFKVEDFDALKDIQNQLKEKIFAIEGTETTSSSSFELEMAQEGFSAVFTPDGPVLGAVGSFTWSGGAFLYPPNMSPTFINMSQENVDMRDSYLGYSTELALWKGVQSLVLGAPRYQHTGKAVIFTQVSRQWRMKAEVTGTQIGSYFGASLCSVDVDSDGSTDLVLIGAPHYYEQTRGGQVSVCPLPRGWRRWWCDAVLYGEQGHPWGRFGAALTVLGDVNGDKLTDVVIGAPGEEENRGAVYLFHGVLGPSISPSHSQRIAGSQLSSRLQYFGQALSGGQDLTQDGLVDLAVGARGQVLLLRTRPVLWVGVSMQFIPAEIPRSAFECREQVVSEQTLVQSNICLYIDKRSKNLLGSRDLQSSVTLDLALDPGRLSPRATFQETKNRSLSRVRVLGLKAHCENFNLLLPSCVEDSVTPITLRLNFTLVGKPLLAFRNLRPMLAADAQRYFTASLPFEKNCGADHICQDNLGISFSFPGLKSLLVGSNLELNAEVMVWNDGEDSYGTTITFSHPAGLSYRYVAEGQKQGQLRSLHLTCDSAPVGSQGTWSTSCRINHLIFRGGAQITFLATFDVSPKAVLGDRLLLTANVSSENNTPRTSKTTFQLELPVKYAVYTVVSSHEQFTKYLNFSESEEKESHVAMHRYQVNNLGQRDLPVSINFWVPVELNQEAVWMDVEVSHPQNPSLRCSSEKIAPPASDFLAHIQKNPVLDCSIAGCLRFRCDVPSFSVQEELDFTLKGNLSFGWVRQILQKKVSVVSVAEITFDTSVYSQLPGQEAFMRAQTTTVLEKYKVHNPTPLIVGSSIGGLLLLALITAVLYKVGFFKRQYKEMMEEANGQIAPENGTQTPSPPSEK

SEQ ID NO: 16764 - DNA, 3492 bp, Artificial Sequence
  derived and/or modified sequence
atgaccaggacacgcgccgcactcctactgtttacggctcttgctacctccctcggttttaaccttgacacggaagagctcacagcttttcgggtcgactctgcgggctttggtgactcggtcgtccagtacgcgaactcatgggtcgtcgtcggggcaccccagaagatcactgccgccaaccagacaggaggtctgtaccaatgcggatatagtacaggggcgtgtgaacccatcggactccaagtccccccagaggctgttaacatgtcccttggattgtccctggcctctaccacctcccccagccaacttctcgcctgcggcccaaccgtgcaccatgaatgtggaagaaacatgtatctgacagggctttgctttctgttaggacctacacagctcacacagaggctgcctgtcagcagacaagagtgtccacgtcaggaacaggacatcgtttttttaatcgacgggtccggttccatttcaagtaggaatttcgctaccatgatgaattttgttagggcagttattagccaatttcagaggccatccacacagtttagcctgatgcaattttctaataaatttcagacccacttcacctttgaggagttcaggcgttcgtcgaacccactgtccctcctggcgagcgtccaccagcttcagggcttcacctatacagccaccgctattcaaaatgttgtacatcgcttattccacgcaagttacggagctaggagagacgctgcgaaaatcctcatcgtgattactgacggaaagaaagaaggggactccctggattacaaagacgtgattcccatggcggatgcagcagggatcattcggtatgcaattggcgtgggactcgcctttcagaaccgtaacagctggaaggaactgaacgacatcgcctccaagcctagtcaggagcacatttttaaggtggaggacttcgatgccttgaaggatatccaaaatcagttgaaggagaagatcttcgccatagaagggacggaaaccaccagctcatcatccttcgagcttgagatggcccaggaagggttttccgccgtgttcacacctgatggaccggtcctaggcgccgtgggatcttttacgtggtccgggggagcttttctgtatccaccaaatatgagtcccactttcatcaatatgtcccaggaaaacgtcgatatgagagactcatacctcggctattcaacagaacttgccctttggaagggagttcagtccctggtcctgggggcccctcggtaccaacacaccggcaaagccgtcatattcacacaagtctcgagacagtggagaatgaaggcagaagtcaccgggacccagatcggctcatactttggggcctcgctctgcagtgtggatgtggactctgacggctcaacagatctggttctgataggcgcccctcactattatgagcagacacgaggcgggcaggtatccgtgtgcccgttgccacggggctggcgcaggtggtggtgcgatgctgtgctgtatggagaacagggacacccctggggaagatttggcgctgcccttactgtactgggtgatgtgaacggcgacaaacttacagatgtcgtcatcggcgcacccggcgaagaggagaacaggggagctgtgtatctattccacggcgttttgggtccttctatcagcccttcccatagtcagaggatcgcgggtagtcagttatctagcaggctgcagtattttggccaggcccttagtggcggtcaggacctcacccaagacgggctggtggatctggctgtgggggcaaggggacaggtgctattgctgcgtactagacctgtgctatgggtaggggtgtctatgcagtttatcccggcggaaataccccggtcggcatttgaatgtcgagagcaggtcgtgagcgagcagacactcgtgcagagcaatatttgcttatacatcgataagagatctaagaacctgctaggctccagagacttgcaaagttccgtaacgcttgacctggcattggaccctggccgtctgtcgcctagagctactttccaagaaacgaaaaatcgctcactgagtagggtgcgcgtcttgggcctgaaggctcactgtgaaaacttcaacctcctcctaccgtcttgtgtcgaagatagcgtcacccctatcactttgagattaaacttcactttagtgggaaagcccctcctcgcctttaggaacctccgtccaatgctcgcggcagatgcccagagatactttaccgcgtccctgccatttgagaaaaattgcggcgctgatcatatctgccaggacaacttggggataagtttttccttccccgggttgaaaagcctgctggttggctccaatttagaactcaatgccgaggtaatggtgtggaatgacggggaagactcttacggaacaactataacattttcccatcccgcgggtcttagctacaggtacgtagccgaaggccaaaagcagggacaactcaggtcgcttcacctcacctgcgatagtgctcccgtagggagccagggaacatggagcacctcatgtcgaatcaatcacttaatcttccgaggcggtgcacaaatcacattcctggcaacctttgatgtgtcccccaaggctgtgcttggtgataggcttctgttgactgccaacgtaagcagcgaaaacaacactccccgcacctctaagacaacgttccagctggagttgcctgtcaagtatgcggtgtacaccgtggtgtcctcccacgaacagtttacgaagtatctgaatttttccgagtccgaagagaaagagtcacacgtggctatgcacaggtaccaagtgaacaacctgggccagcgcgatcttcccgtgtctatcaatttttgggtccccgtagagttgaatcaggaagccgtctggatggacgtggaggtcagccatccacagaatccctctttgagatgcagcagcgaaaagatagccccgcctgcatctgattttttggctcacattcagaagaacccagtgctcgactgcagcatagccggctgtttgcggttcagatgcgatgtgccctctttctcggtgcaggaagaactggactttacgctgaagggtaacctctcattcggatgggtgcgccagatcctgcagaaaaaagtctcagttgtgagcgtcgccgaaattacatttgatactagcgtatactctcagttaccaggtcaggaggctttcatgcgagcacagactactactgtgcttgaaaagtacaaggttcacaacccaacaccactgatcgtggggtcaagcattggaggcctgctgctcctggccttgattactgccgttctgtacaaagtcgggttctttaagcggcagtataaggaaatgatggaagaagctaatggtcagatcgcccctgagaacggcacccagacaccttcccctccatctgagaagtag

SEQ ID NO: 16765 - DNA, 4649 bp, Artificial Sequence
  derived and/or modified sequence
agtaccttggtccagctcttcctgcaacggcccaggagctcagagctccacatctgaccttctagtcatgaccaggaccagggcagcactcctcctgttcacagccttagcaacttctctaggtttcaacttggacacagaggagctgacagccttccgtgtggacagcgctgggtttggagacagcgtggtccagtatgccaactcctgggtggtggttggagccccccaaaagataacagctgccaaccaaacgggtggcctctaccagtgtggctacagcactggtgcctgtgagcccatcggcctgcaggtgcccccggaggccgtgaacatgtccctgggcctgtccctggcgtctaccaccagcccttcccagctgctggcctgcggccccaccgtgcaccacgagtgcgggaggaacatgtacctcaccggactctgcttcctcctgggccccacccagctcacccagaggctcccggtgtccaggcaggagtgcccaagacaggagcaggacattgtgttcctgatcgatggctcaggcagcatctcctcccgcaactttgccacgatgatgaacttcgtgagagctgtgataagccagttccagagacccagcacccagttttccctgatgcagttctccaacaaattccaaacacacttcactttcgaggaattcaggcgcagctcaaaccccctcagcctgttggcttctgttcaccagctgcaagggtttacatacacggccaccgccatccaaaatgtcgtgcaccgattgttccatgcctcatatggggcccgtagggatgccgccaaaattctcattgtcatcactgatgggaagaaagaaggcgacagcctggattataaggatgtcatccccatggctgatgcagcaggcatcatccgctatgcaattggggttggattagcttttcaaaacagaaattcttggaaagaattaaatgacattgcatcgaagccctcccaggaacacatatttaaagtggaggactttgatgctctgaaagatattcaaaaccaactgaaggagaagatctttgccattgagggtacggagaccacaagcagtagctccttcgaattggagatggcacaggagggcttcagcgctgtgttcacacctgatggccccgttctgggggctgtggggagcttcacctggtctggaggtgccttcctgtaccccccaaatatgagccctaccttcatcaacatgtctcaggagaatgtggacatgagggactcttacctgggttactccaccgagctggccctctggaaaggggtgcagagcctggtcctgggggccccccgctaccagcacaccgggaaggctgtcatcttcacccaggtgtccaggcaatggaggatgaaggccgaagtcacggggactcagatcggctcctacttcggggcctccctctgctccgtggacgtagacagcgacggcagcaccgacctggtcctcatcggggccccccattactacgagcagacccgagggggccaggtgtctgtgtgtcccttgcccagggggtggagaaggtggtggtgtgatgctgttctctacggggagcagggccacccctggggtcgctttggggcggctctgacagtgctgggggatgtgaatggggacaagctgacagacgtggtcatcggggccccaggagaggaggagaaccggggtgctgtctacctgtttcacggagtcttgggacccagcatcagcccctcccacagccagcggatcgcgggctcccagctctcctccaggctgcagtattttgggcaggcactgagcgggggtcaagacctcacccaggatggactggtggacctggctgtgggggcccggggccaggtgctcctgctcaggaccagacctgtgctctgggtgggggtgagcatgcagttcatacctgccgagatccccaggtctgcgtttgagtgtcgggagcaggtggtctctgagcagaccctggtacagtccaacatctgcctttacattgacaaacgttctaagaacctgcttgggagccgtgacctccaaagctctgtgaccttggacctggccctcgaccctggccgcctgagtccccgtgccaccttccaggaaacaaagaaccggagtctgagccgagtccgagtcctcgggctgaaggcacactgtgaaaacttcaacctgctgctcccgagctgcgtggaggactctgtgacccccattaccttgcgtctgaacttcacgctggtgggcaagcccctccttgccttcagaaacctgcggcctatgctggccgccgatgctcagagatacttcacggcctccctaccctttgagaagaactgtggagccgaccatatctgccaggacaatctcggcatctccttcagcttcccaggcttgaagtccctgctggtggggagtaacctggagctgaacgcagaagtgatggtgtggaatgacggggaagactcctacggaaccaccatcaccttctcccaccccgcaggactgtcctaccgctacgtggcagagggccagaaacaagggcagctgcgttccctgcacctgacatgtgacagcgccccagttgggagccagggcacctggagcaccagctgcagaatcaaccacctcatcttccgtggcggcgcccagatcaccttcttggctacctttgacgtctcccccaaggctgtcctgggagaccggctgcttctgacagccaatgtgagcagtgagaacaacactcccaggaccagcaagaccaccttccagctggagctcccggtgaagtatgctgtctacactgtggttagcagccacgaacaattcaccaaatacctcaacttctcagagtctgaggagaaggaaagccatgtggccatgcacagataccaggtcaataacctgggacagagggacctgcctgtcagcatcaacttctgggtgcctgtggagctgaaccaggaggctgtgtggatggatgtggaggtctcccacccccagaacccatcccttcggtgctcctcagagaaaatcgcacccccagcatctgacttcctggcgcacattcagaagaatcccgtgctggactgctccattgctggctgcctgcggttccgctgtgacgtcccctccttcagcgtccaggaggagctggatttcaccctgaagggcaacctcagctttggctgggtccgccagatattgcagaagaaggtgtcggtcgtgagtgtggctgaaattacgttcgacacatccgtgtactcccagcttccaggacaggaggcatttatgagagctcagacgacaacggtgctggagaagtacaaggtccacaaccccacccccctcatcgtaggcagctccattgggggtctgttgctgctggcactcatcacagcggtactgtacaaagttggcttcttcaagcgtcagtacaaggaaatgatggaggaggcaaatggacaaattgccccagaaaacgggacacagacccccagcccgcccagtgagaaatgatcccctctttgccttggacttcttctcccccgcgagttttccccacttacttaccctcacctgtcaggcctgacggggaggaaccactgcaccaccgagagaggctgggatgggcctgcttcctgtctttgggagaaaacgtcttgcttgggaaggggcctttgtcttgtcaaggttccaactggaaacccttaggacagggtccctgctgtgttccccaaaggacttgacttgcaatttctacctagaaatacatggacaatacccccaggcctcagtctcccttctcccatgaggcacgaatgatctttctttcctttctttttttttttttttcttttcttttttttttttttgagacggagtctcgctctgtcacccaggctggagtgcaatggcgtgatctcggctcactgcaacctccgcctcccgggttcaagtaattctgctgtctcagcctcctgagtagctgggactacaggcacacgccacctcgcccggcccgatctttctaaaatacagttctgaatatgctgctcatccccacctgtcttcaacagctccccattaccctcaggacaatgtctgaactctccagcttcgcgtgagaagtccccttccatcccagagggtgggcttcagggcgcacagcatgagaggctctgtgcccccatcaccctcgtttccagtgaattagtgtcatgtcagcatcagctcagggcttcatcgtggggctctcagttccgatttcccaggctgaattgggagtgagatgcctgcatgctgggttctgcacagctggcctcccgcgttgggcaacattgctggctggaagggaggagcgccctctagggagggacatggccccggtgcggctgcagctcacccagccccaggggcagaagagacccaaccacttctattttttgaggctatgaatatagtacctgaaaaaatgccaagacatgattatttttttaaaaagcgtactttaaatgtttgtgttaataaattaaaacatgcacaaaaagatgcatctaccgctcttgggaaatatgtcaaaggtctaaaaataaaaaagccttctgtg

SEQ ID NO: 16766 - DNA, 3492 bp, Artificial Sequence
  derived and/or modified sequence
atgaccaggacccgggccgccctgctgctcttcaccgccctggccaccagcctgggcttcaacctggacacagaggagctgacagccttccgggtggacagcgctggctttggagacagcgtggtgcagtatgccaacagctgggtggtggtgggcgccccccagaagatcacagctgccaaccagacaggaggcctgtaccagtgtggctacagcactggagcctgtgagcccatcggcctgcaggtgcccccagaggccgtgaacatgagcctgggcctgagcctggccagcaccaccagccccagccagctgctggcctgtggccccaccgtgcaccatgaatgtggcaggaacatgtacctgaccggcctgtgcttcctgctgggccccacccagctgacccagaggctgcctgtgtcccggcaggagtgcccccggcaggagcaggacatcgtgttcctgattgatggcagcggcagcatcagcagcaggaactttgccaccatgatgaactttgtgcgggccgtcatcagccagttccagaggcccagcacccagttcagcctgatgcagttcagcaacaagttccagacccacttcacctttgaggagttcagaagaagcagcaaccccctgagcctgctggcctctgtgcaccagctgcagggcttcacctacacagccacagccatccagaatgtggtgcacaggctcttccacgccagctatggagccaggagagatgctgccaagatcctgattgtcatcacagatggcaagaaggagggggacagcctggactacaaggatgtgatccccatggctgatgctgctggcatcatccgctatgccatcggcgtgggcctggccttccagaacagaaattcctggaaggagctgaatgacatcgccagcaagcccagccaggagcacatcttcaaggtggaggactttgatgccctgaaggacatccagaaccagctgaaggagaagatctttgccatcgagggcacagagaccaccagcagcagcagctttgagctggagatggcccaggagggcttctctgctgtgttcaccccagatggccctgtgctgggcgctgtgggcagcttcacctggagcggcggggccttcctgtacccacccaacatgagccccaccttcatcaacatgagccaggagaatgtggacatgagggacagctacctgggctacagcacagagctggccctgtggaagggcgtgcagagcctggtgctgggcgccccccgctaccagcacacaggcaaggctgtgatcttcacccaggtgtcccggcagtggaggatgaaggccgaggtgacaggcacccagatcggcagctactttggagccagcctgtgcagcgtggatgtggacagtgatggcagcacagacctggtgctgattggagccccccactactatgagcagacccggggcggccaggtgtctgtgtgccccctgccccggggctggaggcgctggtggtgtgatgctgtgctgtatggagagcagggccacccctggggccgctttggagctgccctgactgtgctgggagatgtgaatggagacaagctgacagatgtggtgattggagcccctggagaggaggagaacagaggagctgtgtacctgttccatggagtgctgggccccagcatcagccccagccacagccagagaattgctggcagccagctgagcagccggctgcagtacttcggccaggccctgagcggcggccaggacctgacccaggacggcctggtggacctggccgtgggcgcccggggccaggtgctgctgctgcggaccaggcctgtgctgtgggtgggcgtgtccatgcagttcatcccagctgagatccccaggtctgcctttgagtgccgggagcaggtggtgtctgagcagaccctggtgcagagcaacatctgcctgtacatcgacaagaggagcaagaacctgctgggcagccgggacctgcagagctctgtgaccctggacctggccctggaccccggccgcctgagcccccgggccaccttccaggagaccaagaacagaagcctgagccgggtgcgggtgctgggcctgaaggcccactgtgagaacttcaacctgctgctgcccagctgtgtggaggacagcgtgacccccatcaccctgcggctgaacttcaccctggtgggcaagcccctgctggccttcaggaacctgcggcccatgctggccgcagatgcccagcgctacttcaccgccagcctgccctttgagaagaactgtggggctgaccacatctgccaggacaacctgggcatctccttctccttccctggcctgaagagcctgctggtgggcagcaacctggagctgaatgctgaggtgatggtgtggaatgatggagaggacagctatggcaccaccatcaccttcagccaccctgctggcctgagctaccgctacgtggccgagggccagaagcagggccagctgcggagcctgcacctgacctgtgacagcgcccctgtgggcagccagggcacctggagcaccagctgccgcatcaaccacctgatcttccggggcggggcccagatcaccttcctggccacctttgatgtgagccccaaggctgtgctgggggaccggctgctgctgacagccaacgtgtcctctgagaacaacacccccaggaccagcaagaccaccttccagctggagctgcctgtgaagtatgctgtgtacacagtggtgagcagccatgagcagttcaccaagtacctgaacttcagcgagagcgaggagaaggagagccacgtggccatgcaccgctaccaggtgaacaacctgggccagagggacctgcctgtgtccatcaacttctgggtgcctgtggagctgaaccaggaggccgtgtggatggatgtggaggtgagccacccccagaaccccagcctgcgctgcagcagcgagaagatcgcccccccagccagtgacttcctggcccacatccagaagaaccctgtgctggactgcagcattgctggctgcctgcgcttccgctgtgatgtgcccagcttctctgtgcaggaggagctggacttcaccctgaagggcaacctgagctttggctgggtgcggcagatcctgcagaagaaggtgtctgtggtgtctgtggccgagatcacctttgacacctctgtgtacagccagctgcccggccaggaggccttcatgagggcccagaccaccaccgtgctggagaagtacaaggtgcacaaccccacccccctgattgtgggcagcagcatcggcggcctgctgctgctggccctgatcacagctgtgctgtacaaggtgggcttcttcaagaggcagtacaaggagatgatggaggaggccaacggccagatcgccccagaaaatggcacccagacccccagccccccatctgagaagtag

SEQ ID NO: 16767 - DNA, 3492 bp, Artificial Sequence
  derived and/or modified sequence
atgacccggacccgggccgccctgctgctgttcaccgccctggccacttccttggggttcaaccttgacacggaagaacttaccgcttttcgtgtcgatagcgccggctttggtgactccgtagtgcaatatgctaactcatgggttgttgtaggagccccgcagaaaataacagcagccaatcagacaggaggtctgtaccagtgcgggtacagcaccggcgcttgtgagccaataggactgcaggtcccaccggaagccgtcaacatgtctctgggactttctctggccagtacaaccagcccatcccagctgcttgcttgcgggcccactgttcatcatgaatgtggaaggaatatgtaccttaccggactttgctttctgctgggccctacccagcttacacagcgcttgccagtgtcaagacaagaatgtcctaggcaggagcaggacatcgtttttttgattgatgggtccggcagtatctcctccaggaactttgcgaccatgatgaactttgttcgtgctgtgatttcacagttccagcgcccttctactcaattcagcctgatgcagttttccaacaagttccagacacactttacttttgaggaattccgccggagctccaaccctctgtccctgcttgcaagcgtgcaccagttgcagggcttcacttacacagccacagccatccagaacgtcgtacaccgactctttcatgctagttatggcgcccgccgtgacgccgccaaaattcttattgtcataacggacggcaaaaaagaaggcgacagcctcgattataaagacgttattcctatggccgatgctgcaggaattatcagatatgcgatcggagtgggcttggcctttcaaaacaggaatagctggaaagagcttaatgacattgccagcaaacccagtcaggagcacatcttcaaggtcgaggattttgatgctctgaaggacattcagaatcaactcaaagagaaaatctttgccatcgagggcacagagaccacctctagcagttccttcgagctggagatggcccaggaaggattctccgccgtttttactcctgacggcccagtactgggagcagttggaagttttacctggagtggtggtgccttcctttaccctccaaatatgagcccgacgtttataaatatgtcccaagagaacgttgacatgcgcgacagctatttggggtactcaactgagctcgcgctctggaagggtgtacagagtcttgtgctcggggcccccaggtaccaacacaccggcaaggcagtgattttcacacaggtgtcacggcagtggcgcatgaaggctgaggtgaccggtacccaaatcggctcctactttggagcatcactgtgtagtgtcgacgttgactccgacggcagtaccgatctagtgctcataggggcgccccactactatgagcaaaccaggggaggtcaggtaagcgtgtgtcctctgccccgcggctggaggagatggtggtgcgatgctgtgctttacggggaacaaggacacccgtggggccggtttggcgctgctctcaccgtgttaggtgacgtgaacggggataaattgaccgatgttgtcataggtgcgccaggcgaggaggagaaccggggcgcagtctatttatttcacggcgttcttgggccatctatttcaccatcacactcccagagaatcgccgggagccagttatcaagccggcttcaatacttcggtcaggccttatccggaggccaagaccttacgcaggacggtctcgtggatctggccgtgggcgctcgtggacaggttttgctcctgcgcacaaggccggtgttgtgggttggagtcagcatgcagtttattcctgcagagattcctcggtcagctttcgaatgcagagagcaagtggtgtcggaacagactttggtacagtccaatatttgcctgtacatcgacaaacgctctaagaatctacttggctcaagagacctgcaatcatcggtaacactcgacctggccctggaccccgggaggctgtcacctcgggcaacgttccaagaaactaagaatcggagcctatcccgagtgagggtgttgggcctcaaagctcactgtgagaacttcaaccttcttctgccctcctgcgttgaagatagtgtgacccccataactctgcggctcaactttacccttgtggggaagcctctgttggcctttcggaatcttagacctatgttagccgctgatgctcagcggtattttaccgctagtctgccattcgagaagaattgtggggctgatcatatatgtcaggataacctgggcataagctttagtttccccggcctaaagtccctcctcgtgggttcaaacctggagcttaatgctgaggtaatggtctggaatgatggagaggactcctatggcactactataacattctctcatccggcgggcctttcctatcggtacgtcgcagaagggcagaaacaaggccagctgagatccctgcacctgacctgtgacagcgcaccagtggggtcccaggggacctggagcacaagctgcagaataaaccatctgatcttcagaggaggtgcacagattaccttcctggcaacgtttgatgtgagccccaaagctgtcttgggtgaccgcctattgctgacagcaaatgtgagttccgagaacaataccccacggacctccaagacaacctttcaattggagctgccagttaagtatgcagtgtatacagtggtcagttcacacgagcagttcaccaaatatctcaacttttctgagagcgaagaaaaggagtctcatgtggcaatgcaccgctaccaggtgaataatctgggtcagcgagatctcccggtttccatcaacttttgggttcccgtcgagctgaaccaggaggccgtttggatggatgtggaggtgtctcatccgcagaatcctagcctgaggtgttccagcgagaagatcgcaccacctgcctccgactttctcgcacatattcagaagaaccctgtgctcgattgttctatcgcgggatgcctccgattcaggtgcgacgtccctagtttcagtgtgcaggaagagctggactttaccctgaagggaaacctgagctttggttgggtcagacaaatacttcagaagaaagtctcagtggtctctgttgcagagataacatttgatacttctgtgtattcacagttgcccggccaggaggcattcatgcgggctcagacgacgaccgttctggaaaagtataaggtgcataatcccaccccgttgatagtgggctcaagtattgggggcctactgcttttagctttgattaccgcagtgctatataaggtaggtttctttaaaaggcaatacaaagaaatgatggaggaagccaatggccagattgcgcctgaaaatgggacccagacaccttcaccaccctcagaaaagtag

SEQ ID NO: 16768 - DNA, 3492 bp, Artificial Sequence
  derived and/or modified sequence
atgactcgcacccgcgctgccctacttctcttcaccgcactggccaccagtttaggcttcaatcttgacacggaggagttaactgccttccgagtggacagtgccggatttggcgactctgtggtacagtatgcgaattcatgggtcgtggtgggcgctcctcagaagataacagccgcaaaccaaacaggaggcctgtatcagtgcggctactcaaccggggcttgcgaacccattgggcttcaggtcccgccagaagcagtgaacatgtcattagggctgagtctggcttccactacgagcccatcccaactgctggcttgtggccctacagtgcaccatgaatgcgggcgaaatatgtatttaactggcctgtgcttcctgctcggcccaacccaacttacacagcgactgccagtgagccggcaggagtgtccaagacaggagcaggacatagtttttcttatcgacggttccggatctatttcttctcgaaattttgctacgatgatgaactttgtgagagcggtgatcagccagttccagaggcctagcacccagttcagccttatgcaattttccaacaagttccagacccactttacctttgaggaatttaggcgcagctctaaccctttatcactgctggcatccgtccaccagttgcagggctttacttacacagccactgccatacagaatgtggtgcatagactgtttcatgcctcctacggggctaggagagacgcagcgaaaatacttattgtgattaccgatggcaagaaggagggggatagcctcgactataaggacgtcattccaatggcggacgcagctgggatcattcgatacgcgattggcgtgggcctggcattccaaaacagaaattcctggaaggagttaaacgatatagcttcaaagccttcgcaggaacacatcttcaaagtggaggattttgacgcacttaaagatatccagaaccagctcaaagagaaaatttttgccattgagggaacagagactacatcatcctcctccttcgaattggaaatggcccaggaggggttctcagccgtcttcacacccgacggaccagtacttggagcagtggggtcgttcacatggagtggaggcgcatttctgtaccctccaaacatgtcccccacatttatcaacatgtctcaggagaatgttgatatgcgggacagttacctagggtacagcacagaactcgcgctgtggaagggtgtccaaagcctagtcctcggagctccaagatatcagcacaccgggaaggccgtgatctttactcaggtgtccaggcaatggcgcatgaaggcagaggtgacaggaacccagatcggctcttactttggtgctagcctctgctccgtagacgtcgactccgatggctcaaccgatttagttctgattggcgcaccgcattactacgagcaaacgaggggtgggcaggtctctgtgtgccctttacccagagggtggcggcgatggtggtgtgatgccgtgctgtacggcgaacaagggcatccatgggggagatttggcgcagctctcaccgtactgggcgacgtcaatggtgacaagctaacagatgtagtcattggagcaccaggagaagaggagaaccgtggcgctgtgtacctcttccatggtgtgctgggcccttccatctcaccttcccactctcagcgtatagcaggttctcagcttagttcacgattgcagtactttggccaggccctgtctgggggtcaagacctcacacaagacggtttagtggacctcgcggtgggcgcacggggacaggttctcttgctacgtacccgccctgtcctgtgggtaggcgtgtccatgcagtttattccagctgagattcctcgatctgcctttgagtgtcgcgagcaagtagtctccgagcagacactggtccagtctaacatttgcttgtacattgataagcggtccaaaaatcttttaggcagcagggaccttcagagctcagttactcttgacctggccctcgaccccggacggctgtcccctagggccaccttccaggagactaaaaatcgaagtctgtcccgggtgagagtactaggtctaaaggctcactgtgaaaacttcaacctgttactcccttcctgcgtcgaagacagtgttactcctatcacactccggctgaatttcacactggtggggaaaccactcctcgcattcaggaatcttagacctatgctggctgccgacgcccaacggtactttacggctagtcttccgtttgagaaaaattgcggagccgaccacatttgccaggataatctcggcatcagtttctccttcccagggctcaagagcttactggtgggctcaaacctggaactgaatgcagaggtgatggtgtggaatgacggggaagatagctacggcaccaccattactttttcacaccctgcaggtctcagttacaggtacgttgcggaggggcagaagcagggacagcttcggagccttcatctgacgtgtgattccgcgcctgttgggtcacagggaacatggagcaccagttgccggataaatcacctgatcttccgtggaggagcccaaatcacttttttagcaacattcgacgtgtctccaaaggcagtactcggagacaggctgttgctgactgccaatgtatcctcagagaacaataccccgagaaccagcaagactacatttcagctggagctgcccgtgaaatacgcagtctacacagttgtttcaagccatgaacagttcactaaatacctgaatttcagcgaaagtgaggagaaagagagccatgtcgctatgcaccgctaccaagtcaataatctcgggcagagagacttgccagtctcaataaatttttgggtgcccgtagagttaaatcaagaagccgtctggatggacgtcgaagtctcccatccccaaaatccatcactgcggtgcagtagtgagaagatcgcacctcctgcctcagacttccttgcccatatccaaaagaatcccgtcctggactgctcaatagctggctgccttcgcttccgctgcgatgtgccgagtttcagtgtgcaggaagagctagattttacattaaaaggcaatttgtcatttggctgggtcaggcagatcctgcaaaagaaggtgtctgtcgttagcgtagccgaaattacgttcgacacgtcagtgtatagccaattgccgggacaggaagcgtttatgcgggctcagacaacgaccgtcctggagaaatacaaggtccacaatccaacaccgctgattgtaggaagtagtataggcggacttctgttactggctcttattaccgcagtgttgtacaaggtggggttctttaaaagacaatacaaggagatgatggaggaggcgaacgggcagatcgccccagagaacggcactcagaccccgtccccaccttccgagaagtag

SEQ ID NO: 16769 - DNA, 3492 bp, Artificial Sequence
  derived and/or modified sequence
atgaccagaaccagagccgccctgctgctgttcaccgccctggccaccagcctgggcttcaacctggacaccgaggagctgaccgccttcagagtggacagcgccggcttcggcgacagcgtggtgcagtacgccaacagctgggtggtggtgggcgccccccagaagatcaccgccgccaaccagaccggcggcctgtaccagtgcggctacagcaccggcgcctgcgagcccatcggcctgcaggtgccccccgaggccgtgaacatgagcctgggcctgagcctggccagcaccaccagccccagccagctgctggcctgcggccccaccgtgcaccacgagtgcggcagaaacatgtacctgaccggcctgtgcttcctgctgggccccacccagctgacccagagactgcccgtgagcagacaggagtgccccagacaggagcaggacatcgtgttcctgatcgacggcagcggcagcatcagcagcagaaacttcgccaccatgatgaacttcgtgagagccgtgatcagccagttccagagacccagcacccagttcagcctgatgcagttcagcaacaagttccagacccacttcaccttcgaggagttcagaagaagcagcaaccccctgagcctgctggccagcgtgcaccagctgcagggcttcacctacaccgccaccgccatccagaacgtggtgcacagactgttccacgccagctacggcgccagaagagacgccgccaagatcctgatcgtgatcaccgacggcaagaaggagggcgacagcctggactacaaggacgtgatccccatggccgacgccgccggcatcatcagatacgccatcggcgtgggcctggccttccagaacagaaacagctggaaggagctgaacgacatcgccagcaagcccagccaggagcacatcttcaaggtggaggacttcgacgccctgaaggacatccagaaccagctgaaggagaagatcttcgccatcgagggcaccgagaccaccagcagcagcagcttcgagctggagatggcccaggagggcttcagcgccgtgttcacccccgacggccccgtgctgggcgccgtgggcagcttcacctggagcggcggcgccttcctgtacccccccaacatgagccccaccttcatcaacatgagccaggagaacgtggacatgagagacagctacctgggctacagcaccgagctggccctgtggaagggcgtgcagagcctggtgctgggcgcccccagataccagcacaccggcaaggccgtgatcttcacccaggtgagcagacagtggagaatgaaggccgaggtgaccggcacccagatcggcagctacttcggcgccagcctgtgcagcgtggacgtggacagcgacggcagcaccgacctggtgctgatcggcgccccccactactacgagcagaccagaggcggccaggtgagcgtgtgccccctgcccagaggctggagaagatggtggtgcgacgccgtgctgtacggcgagcagggccacccctggggcagattcggcgccgccctgaccgtgctgggcgacgtgaacggcgacaagctgaccgacgtggtgatcggcgcccccggcgaggaggagaacagaggcgccgtgtacctgttccacggcgtgctgggccccagcatcagccccagccacagccagagaatcgccggcagccagctgagcagcagactgcagtacttcggccaggccctgagcggcggccaggacctgacccaggacggcctggtggacctggccgtgggcgccagaggccaggtgctgctgctgagaaccagacccgtgctgtgggtgggcgtgagcatgcagttcatccccgccgagatccccagaagcgccttcgagtgcagagagcaggtggtgagcgagcagaccctggtgcagagcaacatctgcctgtacatcgacaagagaagcaagaacctgctgggcagcagagacctgcagagcagcgtgaccctggacctggccctggaccccggcagactgagccccagagccaccttccaggagaccaagaacagaagcctgagcagagtgagagtgctgggcctgaaggcccactgcgagaacttcaacctgctgctgcccagctgcgtggaggacagcgtgacccccatcaccctgagactgaacttcaccctggtgggcaagcccctgctggccttcagaaacctgagacccatgctggccgccgacgcccagagatacttcaccgccagcctgcccttcgagaagaactgcggcgccgaccacatctgccaggacaacctgggcatcagcttcagcttccccggcctgaagagcctgctggtgggcagcaacctggagctgaacgccgaggtgatggtgtggaacgacggcgaggacagctacggcaccaccatcaccttcagccaccccgccggcctgagctacagatacgtggccgagggccagaagcagggccagctgagaagcctgcacctgacctgcgacagcgcccccgtgggcagccagggcacctggagcaccagctgcagaatcaaccacctgatcttcagaggcggcgcccagatcaccttcctggccaccttcgacgtgagccccaaggccgtgctgggcgacagactgctgctgaccgccaacgtgagcagcgagaacaacacccccagaaccagcaagaccaccttccagctggagctgcccgtgaagtacgccgtgtacaccgtggtgagcagccacgagcagttcaccaagtacctgaacttcagcgagagcgaggagaaggagagccacgtggccatgcacagataccaggtgaacaacctgggccagagagacctgcccgtgagcatcaacttctgggtgcccgtggagctgaaccaggaggccgtgtggatggacgtggaggtgagccacccccagaaccccagcctgagatgcagcagcgagaagatcgccccccccgccagcgacttcctggcccacatccagaagaaccccgtgctggactgcagcatcgccggctgcctgagattcagatgcgacgtgcccagcttcagcgtgcaggaggagctggacttcaccctgaagggcaacctgagcttcggctgggtgagacagatcctgcagaagaaggtgagcgtggtgagcgtggccgagatcaccttcgacaccagcgtgtacagccagctgcccggccaggaggccttcatgagagcccagaccaccaccgtgctggagaagtacaaggtgcacaaccccacccccctgatcgtgggcagcagcatcggcggcctgctgctgctggccctgatcaccgccgtgctgtacaaggtgggcttcttcaagagacagtacaaggagatgatggaggaggccaacggccagatcgcccccgagaacggcacccagacccccagcccccccagcgagaagtag

SEQ ID NO: 16770 - protein, 788 aa, Artificial Sequence
  derived and/or modified sequence
MGIELLCLFFLFLGRNDHVQGGCALGGAETCEDCLLIGPQCAWCAQENFTHPSGVGERCDTPANLLAKGCQLNFIENPVSQVEILKNKPLSVGRQKNSSDIVQIAPQSLILKLRPGGAQTLQVHVRQTEDYPVDLYYLMDLSASMDDDLNTIKELGSRLSKEMSKLTSNFRLGFGSFVEKPVSPFVKTTPEEIANPCSSIPYFCLPTFGFKHILPLTNDAERFNEIVKNQKISANIDTPEGGFDAIMQAAVCKEKIGWRNDSLHLLVFVSDADSHFGMDSKLAGIVIPNDGLCHLDSKNEYSMSTVLEYPTIGQLIDKLVQNNVLLIFAVTQEQVHLYENYAKLIPGATVGLLQKDSGNILQLIISAYEELRSEVELEVLGDTEGLNLSFTAICNNGTLFQHQKKCSHMKVGDTASFSVTVNIPHCERRSRHIIIKPVGLGDALELLVSPECNCDCQKEVEVNSSKCHHGNGSFQCGVCACHPGHMGPRCECGEDMLSTDSCKEAPDHPSCSGRGDCYCGQCICHLSPYGNIYGPYCQCDNFSCVRHKGLLCGGNGDCDCGECVCRSGWTGEYCNCTTSTDSCVSEDGVLCSGRGDCVCGKCVCTNPGASGPTCERCPTCGDPCNSKRSCIECHLSAAGQAREECVDKCKLAGATISEEEDFSKDGSVSCSLQGENECLITFLITTDNEGKTIIHSINEKDCPKPPNIPMIMLGVSLAILLIGVVLLCIWKLLVSFHDRKEVAKFEAERSKAKWQTGTNPLYRGSTSTFKNVTYKHREKQKVDLSTDC

SEQ ID NO: 16771 - DNA, 2367 bp, Artificial Sequence
  derived and/or modified sequence
atggggattgaactgctgtgcctgttctttctgtttcttggcagaaatgatcacgtccagggcggctgtgcactggggggagccgaaacctgcgaggattgtctcttgattgggccccagtgtgcctggtgtgcccaggaaaactttacgcatccttccggggtgggggagcgatgtgacactccagcaaacctacttgccaaggggtgccaattgaacttcatcgaaaatcccgtgtcccaggtggagatcctaaagaacaagccgctgtcagtggggcggcagaagaattcctccgatattgtgcagattgccccccaatccctgattctgaaacttcgacccggaggagctcaaaccttgcaagtgcatgtcagacagaccgaggattatccggtggacctgtactaccttatggacctatccgcctccatggatgacgatctgaacactattaaggagctgggctcgcgcctatctaaagaaatgagtaaacttacaagtaattttagactgggctttggatctttcgtggaaaagcctgtgtcgccgttcgttaaaacaacaccagaggaaatcgccaatccatgtagctcgataccttacttttgtttgcccacatttgggttcaaacacattttaccactgacaaatgacgccgagcgcttcaatgagatagtgaagaatcagaagattagtgcgaatatagacactcccgagggaggattcgacgccattatgcaggcagccgtgtgcaaggagaaaatcggctggagaaatgattcactccacttactcgtcttcgtatcggatgcagactcacacttcggcatggattctaagctcgctggaatcgtgattcctaatgatggcctatgccacttagattcaaaaaacgaatactcgatgagcaccgttctcgagtaccccacaattggacagctgattgacaaattggtccagaacaatgttctgctcatctttgcggtcactcaggagcaagtgcatttgtacgaaaactacgcaaagctcatcccaggagcaacggtaggtctcctccagaaggacagcggtaacatcctccagctgatcatcagcgcatatgaagaactgcgatctgaagtggagctggaggtgctgggggacacggagggtctaaatctgtctttcactgcaatctgcaataacgggacactattccagcaccagaaaaaatgctcccatatgaaggtgggcgatactgcttcattttcagtgaccgtcaacattccccattgcgagcgtagaagccgccacattattatcaaacccgtgggcttaggagacgcacttgagcttctcgtgtcacccgaatgcaattgtgactgtcagaaggaagtggaagtcaacagctctaaatgccatcacggcaatggctcctttcagtgcggcgtgtgcgcttgtcatccggggcacatgggtccaagatgtgagtgcggcgaggacatgctgtccacagattcatgcaaggaagctccagatcacccctcttgctctggaaggggggactgttattgtggccagtgtatatgtcatctgtctccctacgggaatatttacggcccatactgtcagtgtgataacttcagctgcgtacgacataaagggctgctgtgtggcgggaatggcgattgcgattgtggcgaatgtgtatgcagatccggttggacaggtgagtactgtaactgcaccacgagtactgattcatgcgtctcggaggacggcgtactgtgttccggccggggcgactgcgtgtgcggtaagtgcgtctgtaccaatcccggtgcaagcggccctacctgcgaacgatgtcctacctgcggtgacccatgcaactctaaacgatcgtgtatcgagtgccacctttccgctgccggacaggcccgggaagaatgcgtggacaaatgcaagttggccggtgcgacaatttctgaagaagaggatttttctaaggatggatcagtctcctgctctttgcagggtgagaatgaatgtctgatcacgttcttaatcaccaccgataacgaggggaaaaccatcatacacagcatcaatgaaaaggactgccccaagcctcccaatatccctatgataatgctgggcgtaagcttggcgatcctgttgattggggtggtcctgctgtgcatctggaaattgctggtgtctttccacgatcgtaaggaggtggctaaatttgaagccgaaagaagcaaggccaaatggcagaccggtaccaaccccctctaccgcggcagcacttccacttttaagaatgtaacgtacaagcaccgagagaagcaaaaggttgatttgagtactgattgttag

SEQ ID NO: 16772 - DNA, 2367 bp, Artificial Sequence
  derived and/or modified sequence
atgggcatcgaactgttatgtttgtttttcctcttcctaggccgtaatgaccatgtacaaggaggctgcgccttggggggtgctgaaacttgtgaagactgcctcctaatcgggccccagtgcgcatggtgtgcacaggagaacttcactcatcccagtggcgtgggagaacgatgtgacactccggccaaccttctagccaagggatgtcagctgaatttcattgagaatcccgtctcgcaagtcgagatactcaaaaacaaacctctgtccgtgggccgacagaaaaactccagtgacattgtccagatcgctccccagagtcttatcctgaagctcagacccgggggcgcccagacactgcaggtgcatgttcgccagacggaggattaccctgtcgacctttactacctaatggacctatctgcctcaatggatgatgacctcaacaccattaaggagctgggaagtcgcttgtcaaaagaaatgtcaaagctaacttcaaactttcgcctgggattcgggtccttcgttgagaagcctgtgtccccattcgtcaagaccaccccagaagagattgccaatccatgttccagcatcccttatttctgcttacctactttcggcttcaagcacatcctgccccttaccaatgacgccgaacgatttaacgagatagtaaaaaatcagaaaatttcagcaaacatcgacacacctgagggcgggttcgacgccatcatgcaagccgccgtatgtaaggagaaaatcggatggagaaatgatagtctgcaccttctagtgttcgtcagcgatgctgattcccattttggtatggacagcaaactggccggaattgtcatacctaacgacgggctgtgtcatctggatagtaagaatgagtactctatgtctacagtgttagagtaccctacaatcggacagctgatcgacaaattagtgcaaaacaacgttctgctgatctttgccgtcacacaggaacaagtccatctctacgagaattatgcgaagttgataccaggggccactgtaggtctgttacagaaagatagtggaaatatcttgcagctgatcatctccgcctatgaggaattgcgtagcgaggtggaactagaagttttgggcgatacagagggactgaacctctctttcacagcgatctgcaataatggcactctatttcagcatcagaagaagtgctcacatatgaaggtgggcgatacagcttcattttctgtgacagtcaatattccccattgtgagagacgatcgcgccacattattattaagcccgtgggcctgggagatgctttggaattactggtttctcctgagtgcaattgcgattgccagaaggaggttgaggtcaattcatctaaatgccaccatggaaacgggtcattccagtgcggggtgtgtgcttgccatcctggccacatgggtccccggtgcgagtgtggggaagacatgttatctacagactcttgcaaggaggctccagatcatcctagttgtagcgggcggggtgattgttattgcggtcagtgtatttgtcacctgtctccttacggcaatatctacggaccttattgtcaatgcgataacttttcttgcgtgagacacaagggattgctatgcgggggaaacggtgactgcgattgcggcgagtgcgtctgtcgttcgggctggactggcgaatactgcaattgcacgacatccacagactcctgtgtaagcgaggatggagtgctatgcagtgggcgtggcgactgcgtgtgtggcaagtgcgtatgcaccaaccccggagcgagcggacccacctgtgaacgatgtccaacatgcggcgatccctgtaatagcaagcggtcttgtattgagtgccatttatcagccgccggacaagcgcgggaggaatgcgttgacaaatgcaagttggcaggagcgacaatcagcgaggaagaggacttctccaaagacggtagtgtctcatgctccctacagggtgagaacgaatgtctgatcacgtttctcattacgacagacaacgaagggaaaactataatacattcaatcaacgagaaggactgtcccaaacctccaaatattccaatgatcatgttaggcgtgagcctcgctatactgctgattggagtggtgctgctctgcatttggaagctcttagtttcttttcatgaccggaaggaagtagcaaagttcgaggccgaacgctcaaaagcaaagtggcagaccgggacaaatccgctctatcgtggttcaacaagtacctttaaaaatgtcacgtataaacatcgggagaaacagaaggtggatctgagtactgattgttag

SEQ ID NO: 16773 - DNA, 4675 bp, Artificial Sequence
  derived and/or modified sequence
ttgaagttgcttttaaacacagcttttctgctttacctgtccaggtagcctctgttttcatttcagtcttaatgaaaactttctaacttatatctcaagtttcttttcaaagcagtgtaagtagtatttaaaatgttatacttcaagaaagaaagactttaacgatattcagcgttggtcttgtaacgctgaaggtaattcattttttaatcggtctgcacagcaagaactgaaacgaatggggattgaactgctttgcctgttctttctatttctaggaaggaatgatcacgtacaaggtggctgtgccctgggaggtgcagaaacctgtgaagactgcctgcttattggacctcagtgtgcctggtgtgctcaggagaattttactcatccatctggagttggcgaaaggtgtgataccccagcaaaccttttagctaaaggatgtcaattaaacttcatcgaaaaccctgtctcccaagtagaaatacttaaaaataagcctctcagtgtaggcagacagaaaaatagttctgacattgttcagattgcgcctcaaagcttgatccttaagttgagaccaggtggtgcgcagactctgcaggtgcatgtccgccagactgaggactacccggtggatttgtattacctcatggacctctccgcctccatggatgacgacctcaacacaataaaggagctgggctcccggctttccaaagagatgtctaaattaaccagcaactttagactgggcttcggatcttttgtggaaaaacctgtatccccttttgtgaaaacaacaccagaagaaattgccaacccttgcagtagtattccatacttctgtttacctacatttggattcaagcacattttgccattgacaaatgatgctgaaagattcaatgaaattgtgaagaatcagaaaatttctgctaatattgacacacccgaaggtggatttgatgcaattatgcaagctgctgtgtgtaaggaaaaaattggctggcggaatgactccctccacctcctggtctttgtgagtgatgctgattctcattttggaatggacagcaaactagcaggcatcgtcattcctaatgacgggctctgtcacttggacagcaagaatgaatactccatgtcaactgtcttggaatatccaacaattggacaactcattgataaactggtacaaaacaacgtgttattgatcttcgctgtaacccaagaacaagttcatttatatgagaattacgcaaaacttattcctggagctacagtaggtctacttcagaaggactccggaaacattctccagctgatcatctcagcttatgaagaactgcggtctgaggtggaactggaagtattaggagacactgaaggactcaacttgtcatttacagccatctgtaacaacggtaccctcttccaacaccaaaagaaatgctctcacatgaaagtgggagacacagcttccttcagcgtgactgtgaatatcccacactgcgagagaagaagcaggcacattatcataaagcctgtggggctgggggatgccctggaattacttgtcagcccagaatgcaactgcgactgtcagaaagaagtggaagtgaacagctccaaatgtcaccacgggaacggctctttccagtgtggggtgtgtgcctgccaccctggccacatggggcctcgctgtgagtgtggcgaggacatgctgagcacagattcctgcaaggaggccccagatcatccctcctgcagcggaaggggtgactgctactgtgggcagtgtatctgccacttgtctccctatggaaacatttatgggccttattgccagtgtgacaatttctcctgcgtgagacacaaagggctgctctgcggaggtaacggcgactgtgactgtggtgaatgtgtgtgcaggagcggctggactggcgagtactgcaactgcaccaccagcacggactcctgcgtctctgaagatggagtgctctgcagcgggcgcggggactgtgtttgtggcaagtgtgtttgcacaaaccctggagcctcaggaccaacctgtgaacgatgtcctacctgtggtgacccctgtaactctaaacggagctgcattgagtgccacctgtcagcagctggccaagcccgagaagaatgtgtggacaagtgcaaactagctggtgcgaccatcagtgaagaagaagatttctcaaaggatggttctgtttcctgctctctgcaaggagaaaatgaatgtcttattacattcctaataactacagataatgaggggaaaaccatcattcacagcatcaatgaaaaagattgtccgaagcctccaaacattcccatgatcatgttaggggtttccctggctattcttctcatcggggttgtcctactgtgcatctggaagctactggtgtcatttcatgatcgtaaagaagttgccaaatttgaagcagaacgatcaaaagccaagtggcaaacgggaaccaatccactctacagaggatccacaagtacttttaaaaatgtaacttataaacacagggaaaaacaaaaggtagacctttccacagattgctagaactactttatgcatgaaaaaagtctgtttcactgatatgaaatgttaatgcactatttaatttttttctctttgttgcttcaaaatgaggttggtttaagataataataggacatctgcagataagtcatcctctacatgaaggtgacagactgttggcagtttcaaaataatcaagaagagaaatatccttagcaaagagatgactttggggatcatttgaggaatactaactctgttgcattaatgcttcaaaaaatcatcaaatgattcatgggggcctgatttgcatttgaaaaatgtttgaaattagagtctcatttgtttcaggaatgcagctacctgagttttttgtctcggcaaagtcacaaagcccatatactcacattgtgtgtctatacttgccaattaattctaaacttgtaggaaatatgccctctcttaaaggagaattttttttaaatctctgagaaatgagattctgagtttatttcagctaaaaggttgcaattcttctgaagatatctcaaatataaggttgaaagttaagtgttaataatttttgtgaatttatacacacctaaacgttaagtacacaaatattttatttgttttacaaataaggaataagtaatttataaattaagaagttacctataaaaataaaaagataacaaccctatcatatagcttatttttaaattacctgaaaaacgatattctacactgtttcctttttgactctgagttttcaaactgttacttctcccatatttctcaatccatttcactcagttgcacagtcttttaaaccctgtaattgtcataccaaagtttctttttaaaaaaaaattactttaaatgcttagtttattcaaagagcgatccaataatataaaaggaacatgtgttaaacacaataaaattttaaatggctctaaatcaagcacatcaagagtatacaagtcttaaaggctttttaatacatactcttttcccatctatgtaacccaacttgcacatttcagctgcatgtggtgaatatgcatcatatatttactttaagaggtaagattttacttgcaaaatacatgtgcaaattagggatccatcagttgatggaagagatggactctagaatattatttcttgtggttattactcctttacaaagcactttcgtctcacttgatcctcataaggaaactaaggctcagaatgagtagagctgggttcagaatctagctcttctaactccaagccatctcctctttccactgcaggaaactgcctcttttgtcagtgaaataatagaaagattgtgttagttaagtgataactgtcatttgtttgaaaatgttcgagactgaacaaatagcatttaaactgctggcatatagatgagatattgtacttttgtgcaatgtttattacctttgattaaattgtaatgtgaagcttttactaggtgaatagttcattatgtagtggaggcttcgtggttgtccattgaattgtcacagcaaaatctataagtttcttcaattctacaagatagatccatatacctttgatcacttggagactctttttttgctggtttctagataactcaggtaaatcagacctttacagagtacagggctaggtgaaagaattactgaaaaatcaccttgaaaatccgaagggctgatataccctttatgttcctgactgatgcgcagaacctgggggaaatctacagcaatatacaggttgcaatgctgataacacaacagcaatcctctcctctacgtggacttactgttgtttttttaattattattggaatgggattttagaaaatagaagttacctttgtgtgtgttttagggaaggtagagaagaatctgctctttctctgaatactgttttgaccccaggcaggaccttggaaaggccaaaacattaacagtagtacttctgttcactgaagagttatgttacatgaagataaaatggttttgtcgtgtttattattgtattttgtgttgatataaataaacatggtaatttaaacaatgaacctta

SEQ ID NO: 16774 - DNA, 2501 bp, Artificial Sequence
  derived and/or modified sequence
atgttgaagttgcttttaaacacagcttttctgctttacctgtccaggtagcctctgttttcatttcagtcttaatgaaaactttctaacttatatctcaagtttcttttcaaagcagtcaagaactgaaacgaatggggattgaactgctttgcctgttctttctatttctaggaaggaatgatcacgtacaaggtggctgtgccctgggaggtgcagaaacctgtgaagactgcctgcttattggacctcagtgtgcctggtgtgctcaggagaattttactcatccatctggagttggcgaaaggtgtgataccccagcaaaccttttagctaaaggatgtcaattaaacttcatcgaaaaccctgtctcccaagtagaaatacttaaaaataagcctctcagtgtaggcagacagaaaaatagttctgacattgttcagattgcgcctcaaagcttgatccttaagttgagaccaggtggtgcgcagactctgcaggtgcatgtccgccagactgaggactacccggtggatttgtattacctcatggacctctccgcctccatggatgacgacctcaacacaataaaggagctgggctcccggctttccaaagagatgtctaaattaaccagcaactttagactgggcttcggatcttttgtggaaaaacctgtatccccttttgtgaaaacaacaccagaagaaattgccaacccttgcagtagtattccatacttctgtttacctacatttggattcaagcacattttgccattgacaaatgatgctgaaagattcaatgaaattgtgaagaatcagaaaatttctgctaatattgacacacccgaaggtggatttgatgcaattatgcaagctgctgtgtgtaaggaaaaaattggctggcggaatgactccctccacctcctggtctttgtgagtgatgctgattctcattttggaatggacagcaaactagcaggcatcgtcattcctaatgacgggctctgtcacttggacagcaagaatgaatactccatgtcaactgtcttggaatatccaacaattggacaactcattgataaactggtacaaaacaacgtgttattgatcttcgctgtaacccaagaacaagttcatttatatgagaattacgcaaaacttattcctggagctacagtaggtctacttcagaaggactccggaaacattctccagctgatcatctcagcttatgaagaactgcggtctgaggtggaactggaagtattaggagacactgaaggactcaacttgtcatttacagccatctgtaacaacggtaccctcttccaacaccaaaagaaatgctctcacatgaaagtgggagacacagcttccttcagcgtgactgtgaatatcccacactgcgagagaagaagcaggcacattatcataaagcctgtggggctgggggatgccctggaattacttgtcagcccagaatgcaactgcgactgtcagaaagaagtggaagtgaacagctccaaatgtcaccacgggaacggctctttccagtgtggggtgtgtgcctgccaccctggccacatggggcctcgctgtgagtgtggcgaggacatgctgagcacagattcctgcaaggaggccccagatcatccctcctgcagcggaaggggtgactgctactgtgggcagtgtatctgccacttgtctccctatggaaacatttatgggccttattgccagtgtgacaatttctcctgcgtgagacacaaagggctgctctgcggaggtaacggcgactgtgactgtggtgaatgtgtgtgcaggagcggctggactggcgagtactgcaactgcaccaccagcacggactcctgcgtctctgaagatggagtgctctgcagcgggcgcggggactgtgtttgtggcaagtgtgtttgcacaaaccctggagcctcaggaccaacctgtgaacgatgtcctacctgtggtgacccctgtaactctaaacggagctgcattgagtgccacctgtcagcagctggccaagcccgagaagaatgtgtggacaagtgcaaactagctggtgcgaccatcagtgaagaagaagatttctcaaaggatggttctgtttcctgctctctgcaaggagaaaatgaatgtcttattacattcctaataactacagataatgaggggaaaaccatcattcacagcatcaatgaaaaagattgtccgaagcctccaaacattcccatgatcatgttaggggtttccctggctattcttctcatcggggttgtcctactgtgcatctggaagctactggtgtcatttcatgatcgtaaagaagttgccaaatttgaagcagaacgatcaaaagccaagtggcaaacgggaaccaatccactctacagaggatccacaagtacttttaaaaatgtaacttataaacacagggaaaaacaaaaggtagacctttccacagattgctag

SEQ ID NO: 16775 - DNA, 2367 bp, Artificial Sequence
  derived and/or modified sequence
atgggcatcgagctgctgtgcctcttcttcctgttcctgggcagaaatgaccacgtgcagggcggctgtgccctgggcggcgctgagacctgtgaggactgcctgctgattggcccccagtgtgcctggtgtgcccaggagaacttcacccaccccagcggcgtgggggagcgctgtgacaccccagccaacctgctggccaagggctgccagctgaacttcatcgagaaccctgtgtcccaggtggagatcctgaagaacaagcccctgtctgtgggccggcagaagaacagcagtgacatcgtgcagatcgccccccagagcctcatcctgaagctgcggcctggaggagcccagaccctgcaggtgcacgtgcggcagacagaggactaccctgtggacctgtactacctgatggacctgagcgcctccatggatgatgacctgaacaccatcaaggagctgggcagccggctgagcaaggagatgagcaagctgaccagcaacttccggctgggcttcggcagctttgtggagaagcctgtgagcccctttgtgaagaccaccccagaggagatcgccaacccctgcagcagcatcccctacttctgcctgcccaccttcggcttcaagcacatcctgcccctgaccaatgatgctgagcgcttcaatgagatcgtgaagaaccagaagatcagcgccaacatcgacaccccagagggcggctttgatgccatcatgcaggccgctgtgtgcaaggagaagattggctggagaaatgacagcctgcacctgctggtgtttgtgtctgatgctgacagccacttcggcatggacagcaagctggccggcatcgtcatccccaatgatggcctgtgccacctggacagcaagaatgagtacagcatgagcacagtgctggagtaccccaccatcggccagctgattgacaagctggtgcagaacaacgtgctgctgatctttgctgtgacccaggagcaggtgcacctgtatgaaaattatgccaagctgatccctggggccaccgtgggcctgctgcagaaggacagcggcaacatcctgcagctgatcatcagcgcctatgaggagctgcggtctgaggtggagctggaggtgctgggggacacagagggcctgaacctgtccttcaccgccatctgcaacaacggcaccctcttccagcaccagaagaagtgcagccacatgaaggtgggggacacagccagcttctctgtgacagtgaacatcccccactgtgagcggcgcagccgccacatcatcatcaagcctgtgggcctgggagatgccctggagctgctggtgtccccagagtgcaactgtgactgccagaaggaggtggaggtgaacagcagcaagtgccaccacggcaatggcagcttccagtgtggggtgtgtgcctgccaccctggccacatgggcccccgctgtgaatgtggggaggacatgctgagcacagacagctgcaaggaggccccagaccaccccagctgcagcggccgcggggactgctactgcggccagtgcatctgccacctgagcccctacggcaacatctacggcccctactgccagtgtgacaacttcagctgtgtgcgccacaagggcctgctgtgtggcggcaatggagactgtgactgtggggagtgtgtgtgccgcagcggctggacaggagagtactgcaactgcaccaccagcacagacagctgtgtgtctgaagatggagtgctgtgcagcggccgcggggactgtgtgtgtgggaaatgtgtgtgcaccaaccctggggccagcggccccacctgtgagcgctgccccacctgtggggacccctgcaacagcaagaggagctgcatcgagtgccacctgtctgctgctggccaggcccgggaggagtgtgtggacaagtgcaagctggccggggccaccatcagcgaggaggaggacttcagcaaggatggctctgtgtcctgcagcctgcagggagaaaatgaatgtctcatcaccttcctgatcaccacagacaatgaaggcaagaccatcatccacagcatcaatgagaaggactgccccaagccacccaacatccccatgatcatgctgggcgtgtccctggccatcctgctgattggagtggtgctgctgtgcatctggaagctgctggtgtccttccatgacaggaaggaggtggccaagtttgaagctgagaggagcaaggccaagtggcagacaggcaccaaccccctgtaccggggcagcaccagcaccttcaagaatgtgacctacaagcaccgggagaagcagaaggtggacctgagcacagactgctag

SEQ ID NO: 16776 - DNA, 2367 bp, Artificial Sequence
  derived and/or modified sequence
atgggcatcgagctgctgtgcctgttcttcctgttcctgggccggaacgatcatgtccagggcggatgtgcactggggggagccgagacctgtgaagactgtctcctcatcggtcctcagtgcgcctggtgcgcccaggaaaattttacgcatcctagcggagttggtgaaagatgcgacacgcccgccaacttactagctaagggatgccagttgaactttattgagaatccagtaagccaggtcgaaatactcaaaaataagcctctgtcagttggacggcaaaagaactcttcagatatcgttcaaatcgccccccagtccttgattttgaaactgcgaccaggaggagcccagaccctgcaggtgcacgtgcgccagaccgaggactacccggttgatctgtattatctgatggacctgagtgcctctatggacgatgatctgaacacgataaaagaactaggctcccgcctgagcaaggagatgagtaagcttacctccaatttcagactcggatttggctctttcgtcgagaagccagttagccccttcgtcaagacgacacccgaggaaatagccaacccctgctcaagtatcccatatttctgtctccctaccttcggcttcaagcacattctacctcttaccaatgatgctgagcgtttcaatgagatagtcaagaatcagaaaatttctgcaaacattgacacgccagaaggcggattcgacgcaattatgcaggcagctgtgtgtaaggagaagatcggctggcgcaatgattcactgcacctgctggttttcgtctccgatgcagattcccattttggaatggactctaaattggcaggaatagtgatacccaacgatggactgtgtcacctggactccaagaacgagtattccatgtccacagtcctggagtacccaaccattggccaacttattgacaagttagtccagaataacgtattactaatcttcgccgtgacacaggaacaggtacatctgtacgagaactacgctaagctcattcccggggccaccgtgggactcctccagaaagacagcggcaacatcctgcagctgatcatatctgcctatgaggaactgagatcagaagttgaacttgaggtgctgggcgacaccgagggcttgaacctaagctttaccgctatctgcaataacggcacactgtttcagcaccaaaagaagtgttcccacatgaaagtcggggatacagctagcttcagcgtgactgtcaatattcctcattgcgaaagacgctctcgccacataattatcaaacccgtaggtcttggcgacgctctggaactgctggtcagtccagaatgcaattgtgattgtcagaaggaggtcgaagtaaactcaagcaaatgccaccacggcaacggtagctttcagtgtggagtgtgtgcctgccatccaggacacatggggcctcgctgtgagtgcggggaggacatgctaagcacagattcctgcaaagaagcccctgaccacccatcttgttccggcagaggcgattgctactgcgggcagtgtatttgccacctctcgccctacggcaatatatatgggccttattgtcagtgtgacaactttagctgcgtgcgacacaagggccttttatgtggaggcaacggcgactgcgactgtggtgagtgtgtctgtagaagcggctggaccggtgagtactgtaattgtacaacttccacggatagctgtgtgagcgaggatggggttttgtgcagcggacgaggggactgcgtgtgcggtaagtgcgtgtgtaccaatccaggcgcgtccggcccaacttgcgagaggtgtcctacatgtggcgacccttgcaatagtaagcgaagctgtatcgaatgccacttgagcgcagccggccaggctagagaagagtgcgtggacaaatgcaagctggctggggctactatttctgaagaagaggattttagcaaagatggcagcgtgagttgcagcctccagggagaaaacgagtgtctgattactttcttaataaccaccgacaatgaaggcaaaacaatcatacacagcataaatgagaaggattgtccaaaacccccgaacattcctatgataatgctcggtgtcagtctagctattctgctgatcggtgtggtgctgctgtgcatttggaagttactggtgtctttccatgaccggaaagaagtagcaaagttcgaagcggagcgatctaaggctaaatggcagacgggaaccaatccgctgtataggggctctaccagcaccttcaaaaacgtgacttataaacaccgagagaaacagaaagtcgacctcagcaccgattgttag

SEQ ID NO: 16777 - DNA, 2367 bp, Artificial Sequence
  derived and/or modified sequence
atgggcatcgagctgctgtgcctgttcttcctgttcctgggccggaacgaccatgtccaaggaggatgtgccttagggggtgctgagacatgcgaggattgcctgctgatcggcccccaatgtgcttggtgcgcacaggagaatttcactcaccccagcggggtaggggagcgctgtgatacccccgccaatttactggccaaaggctgccaactcaactttatcgagaaccctgtctcacaggtggaaatactcaagaataagcctctctccgtcgggcggcaaaagaattcaagcgacatagtacagattgctcctcagagcctaatcctgaagcttcgtcccggcggggcccaaacattgcaagtgcatgtgcgacagaccgaggactaccctgtagatctgtattaccttatggatctttctgcctctatggacgacgacctgaacactatcaaggagttgggcagcaggctctctaaagagatgtcaaagctgaccagtaatttccggttagggtttgggtctttcgtagagaagcctgtgagcccattcgtgaagactacacccgaggagatagccaatccttgcagctccattccttatttttgcttgcctacttttgggttcaagcacatcttgccactgacaaacgatgctgaaaggtttaacgagatagtcaaaaaccagaagatctcagcaaatatcgacacacccgaaggagggtttgacgcaataatgcaggcggctgtttgcaaggaaaagattggatggagaaacgatagcctccatttactggtattcgtcagtgatgccgatagtcatttcggaatggatagcaaactggcaggcatcgtgatcccaaacgacggcctgtgtcacctggattcgaagaatgaatacagtatgtctaccgttctcgaatatcccactattggtcaactcatcgacaagctcgtgcagaataacgtgttgctaattttcgccgtgactcaggaacaggtgcatctatacgagaactatgccaaattaatacctggtgcgacggtgggacttttacaaaaggatagtggtaatatccttcaattgattatctctgcatatgaggaactgagatcggaggttgaactcgaggttctcggcgacaccgagggcctgaatctgtcattcaccgcgatctgtaataatggcaccctattccagcaccagaagaaatgtagccatatgaaggtgggcgacaccgcgagtttcagcgtcaccgtcaatattccacattgtgagagacgctccagacatataattataaagccagtgggtttaggtgacgcgttggaacttctggtgagccctgagtgcaactgcgattgtcaaaaggaggtggaagtgaatagctccaagtgtcaccatggaaacggatcattccagtgtggcgtctgcgcgtgtcaccctgggcatatgggcccccggtgtgagtgtggagaagacatgctgagcaccgatagctgtaaggaggccccagaccatccatcttgttccggcagaggcgattgctattgtggccagtgcatttgtcatttatccccctatggcaatatttacggaccatattgccaatgcgataacttcagttgtgttcggcacaagggacttctctgtggagggaatggcgattgtgattgtggggagtgcgtgtgccggtccggttggacgggagagtactgcaactgtactacctcaaccgacagctgcgtgtctgaggacggcgtactgtgcagcggacggggcgactgcgtctgcggcaagtgcgtctgtacaaatccaggagcctctggccctacatgtgagagatgtcccacttgtggcgacccctgcaattccaaaagaagctgtatagagtgccacctgtcggcggcgggtcaggccagagaggagtgcgtcgataagtgcaaattggccggtgccacgatcagtgaagaagaggatttctcgaaagatggcagcgtgagttgtagtttgcagggtgaaaacgaatgtttaataacattccttataaccaccgacaacgagggcaaaaccattatccacagtatcaacgaaaaagattgtccaaaacctcctaatatccctatgattatgttaggcgtgtcgctggctatcctcctaatcggcgtggtcttgctgtgtatttggaagctacttgtcagttttcatgataggaaagaagtggccaagtttgaagccgagcgcagtaaggctaaatggcagactggcaccaacccgctgtatcgcgggtctacttccaccttcaagaatgtgacatacaaacatcgggaaaagcagaaggtggatctcagtactgactgttag

SEQ ID NO: 16778 - DNA, 2367 bp, Artificial Sequence
  derived and/or modified sequence
atgggcatcgagttgttatgcctgttcttcctctttctggggcgaaacgaccacgtgcagggcggttgtgcgttaggcggagccgagacctgcgaggactgcttgctgatcggaccccagtgcgcctggtgtgcgcaggaaaattttactcatccttccggggtcggcgagcgatgcgacacacctgctaacctgcttgcaaagggatgtcagctgaacttcattgagaacccagttagccaggttgagatcctgaagaataagccactttccgtcgggcgacaaaagaactcctctgatatcgtgcaaatcgcccctcagagtctcatccttaagttacgacctggaggcgctcagacactgcaggtgcatgttagacagactgaagactatcctgtagatttgtattacctcatggatctcagcgcgtccatggacgatgatctgaataccatcaaggagcttggatcccgcctgagtaaggagatgagtaaactgacatctaattttcgcctgggcttcggttcttttgtagaaaaacccgtgtctccgttcgttaagacaacgcctgaggaaatcgccaatccctgttcgagcatcccatatttctgcctccccacttttggttttaaacatatcctgccccttacaaatgacgctgagcgatttaatgagatagtgaagaaccagaagatctccgcgaatatcgacactcccgaaggaggatttgatgccatcatgcaagcagcagtttgtaaagagaagattggttggcgcaacgactctctccaccttctggtgtttgtgagcgatgcggacagtcacttcggtatggactccaagctagctggaattgtgattcctaacgacggcctctgccaccttgactctaagaatgagtactctatgtctacagtacttgagtatccgaccatcggccagctcattgacaagcttgttcagaataacgtgctcctaatctttgctgtgacacaggaacaggtacacctctacgagaactacgctaaacttatccctggagccacggtggggctgttgcaaaaggactccggcaacatccttcagctgatcatctcagcctatgaggagttgagaagcgaagtagagttagaggtactgggtgacacagaaggactgaacctctctttcaccgcgatctgcaataatggaaccctttttcagcaccagaagaaatgcagtcacatgaaagtgggggataccgctagcttttctgtgaccgtcaacattccacattgtgagaggaggagtaggcacatcattatcaaaccggtagggctgggtgatgcactggaactgctggtatcccctgaatgtaactgcgactgccagaaagaggtggaggtcaacagcagcaaatgccaccatggaaatgggtcctttcagtgcggcgtgtgcgcttgtcacccaggccacatggggcctagatgcgaatgtggcgaagatatgctgtccaccgacagttgcaaggaggcacccgatcaccctagctgttccggccgaggtgattgctactgcgggcagtgtatttgccatctctccccctacgggaacatatacggtccctattgccagtgtgataacttctcatgcgtgcgccataaggggctgctgtgcggaggaaacggggactgtgactgcggcgagtgcgtatgtagatccggctggacaggagaatactgtaattgcacgacctctacggactcctgcgtgtcagaggacggcgtgctgtgttccgggaggggcgactgcgtgtgcgggaagtgcgtttgtactaaccccggagctagcggacctacatgtgaacgctgtcccacctgtggggacccatgtaactccaagagatcttgtatcgagtgtcacctgagtgccgctggccaggcgagggaggagtgcgtggacaaatgtaaattagctggggctactattagcgaggaagaagattttagcaaagacggcagcgtgagctgctctttacagggcgagaatgaatgcctgataacatttttaatcaccactgacaatgagggtaagaccatcattcattctatcaacgaaaaggattgcccgaagccaccaaatattcctatgatcatgctgggagtgagtctggcaattctcctgatcggcgtggtcttactgtgcatctggaaactcctcgtgagcttccacgaccggaaagaggtcgcgaagtttgaagccgaacgatccaaggcgaaatggcagaccgggactaacccactgtatcggggatctacaagcacatttaaaaatgtgacatataagcatcgagaaaaacaaaaagtggaccttagtacagactgctag

SEQ ID NO: 16779 - DNA, 2367 bp, Artificial Sequence
  derived and/or modified sequence
atgggaattgagctgctgtgtttattctttctcttcctgggcaggaatgatcatgtacaggggggttgcgccttgggcggtgccgaaacttgcgaagattgtctgctgatcggcccacaatgcgcctggtgcgctcaggaaaatttcacccatccttcaggggtgggcgagcgctgcgacacacccgcaaacctcctggctaaagggtgccaactcaattttatagaaaatcctgtctcgcaggtggagatactaaagaacaaaccactgagtgttggtagacagaagaattcgagcgacattgtgcagattgcaccccagtccttgatattaaaactgcggccagggggtgctcaaacactccaggttcatgtgcggcagaccgaagactatccagtggacctttattatctgatggatctgtccgcctccatggatgacgacttgaatactattaaagaactgggtagccggctcagcaaagagatgagcaaactaacatctaattttaggcttggctttggcagctttgtcgagaaacctgtatccccatttgtcaagacgacccccgaggaaatagcaaacccttgtagttcaattccttatttctgtctgcctacattcggtttcaagcatatcctgccccttactaatgacgccgagcggttcaacgagatcgtaaaaaaccagaagatatcggctaacatcgacaccccagaaggcggatttgacgcaattatgcaggccgctgtgtgcaaagaaaaaattgggtggcggaacgattctctgcacctgttggtgttcgtctctgatgcagatagccacttcgggatggactctaagctggcaggcatcgtcattcctaatgatggtctgtgccatctggactctaagaatgagtactcaatgtcgacggtgctagaatacccaaccattggtcagctgatcgacaagttggtgcagaacaacgtgctcctgattttcgccgtcacccaggaacaggtgcacctgtatgagaactatgctaaacttattccgggagcaacagtggggttattgcagaaggatagtggtaacattttgcagcttatcatcagtgcatatgaagaactgagaagcgaggtcgaacttgaggtgctaggtgacacagaaggcctgaacctgtctttcacagccatctgtaacaacgggactctgttccaacaccaaaagaaatgctctcacatgaaagtgggagataccgcttctttttcggtcaccgtgaacatcccacattgcgaacggagaagccgacacattattatcaagccagttggattgggggacgcgttggagctactggtcagcccagagtgtaattgcgactgtcaaaaagaggtggaagttaactctagcaagtgccaccacggaaatggcagtttccaatgcggtgtctgcgcatgccatccaggtcacatggggcctcggtgtgagtgcggtgaagacatgcttagcactgactcttgtaaggaggcccctgatcacccgtcttgttcaggaaggggagactgttattgtggccagtgcatctgtcacctctcgccctatgggaatatttatggcccatattgccagtgcgataacttttcatgtgttaggcacaaagggctcctttgtggaggcaacggcgactgcgactgcggcgagtgtgtgtgtaggtcgggatggacgggcgagtactgcaactgtacaacttccaccgactcctgcgtgtctgaggatggggttctgtgcagtggtcggggtgactgtgtgtgcgggaagtgcgtgtgtactaatcctggcgcttccggccctacctgtgagcggtgtcccacctgtggcgatccgtgcaattccaagcgcagttgtatcgaatgccacctctccgccgctggccaggccagggaagaatgtgtagacaagtgtaaattagcaggcgctactattagtgaggaggaggatttctcaaaggacgggagtgtgtcttgctccttacaaggagaaaacgagtgcttgattacctttctaattactacggataacgaaggcaagacaattattcactccatcaatgagaaagattgccccaaaccccctaatatcccaatgattatgctgggtgtctcactcgccattttgctcattggggtcgtcctcttgtgcatctggaagcttctggtctcgttccatgacaggaaggaagtcgcaaaatttgaagcagagagatcaaaagcgaaatggcaaactggtactaaccccctgtataggggtagcacctctacttttaaaaacgttacttacaaacatagagagaaacagaaggtcgatctcagtacagactgttag

SEQ ID NO: 16780 - DNA, 2367 bp, Artificial Sequence
  derived and/or modified sequence
atgggcatcgagctgctgtgcctgttcttcctgttcctgggcagaaacgaccacgtgcagggcggctgcgccctgggcggcgccgagacctgcgaggactgcctgctgatcggcccccagtgcgcctggtgcgcccaggagaacttcacccaccccagcggcgtgggcgagagatgcgacacccccgccaacctgctggccaagggctgccagctgaacttcatcgagaaccccgtgagccaggtggagatcctgaagaacaagcccctgagcgtgggcagacagaagaacagcagcgacatcgtgcagatcgccccccagagcctgatcctgaagctgagacccggcggcgcccagaccctgcaggtgcacgtgagacagaccgaggactaccccgtggacctgtactacctgatggacctgagcgccagcatggacgacgacctgaacaccatcaaggagctgggcagcagactgagcaaggagatgagcaagctgaccagcaacttcagactgggcttcggcagcttcgtggagaagcccgtgagccccttcgtgaagaccacccccgaggagatcgccaacccctgcagcagcatcccctacttctgcctgcccaccttcggcttcaagcacatcctgcccctgaccaacgacgccgagagattcaacgagatcgtgaagaaccagaagatcagcgccaacatcgacacccccgagggcggcttcgacgccatcatgcaggccgccgtgtgcaaggagaagatcggctggagaaacgacagcctgcacctgctggtgttcgtgagcgacgccgacagccacttcggcatggacagcaagctggccggcatcgtgatccccaacgacggcctgtgccacctggacagcaagaacgagtacagcatgagcaccgtgctggagtaccccaccatcggccagctgatcgacaagctggtgcagaacaacgtgctgctgatcttcgccgtgacccaggagcaggtgcacctgtacgagaactacgccaagctgatccccggcgccaccgtgggcctgctgcagaaggacagcggcaacatcctgcagctgatcatcagcgcctacgaggagctgagaagcgaggtggagctggaggtgctgggcgacaccgagggcctgaacctgagcttcaccgccatctgcaacaacggcaccctgttccagcaccagaagaagtgcagccacatgaaggtgggcgacaccgccagcttcagcgtgaccgtgaacatcccccactgcgagagaagaagcagacacatcatcatcaagcccgtgggcctgggcgacgccctggagctgctggtgagccccgagtgcaactgcgactgccagaaggaggtggaggtgaacagcagcaagtgccaccacggcaacggcagcttccagtgcggcgtgtgcgcctgccaccccggccacatgggccccagatgcgagtgcggcgaggacatgctgagcaccgacagctgcaaggaggcccccgaccaccccagctgcagcggcagaggcgactgctactgcggccagtgcatctgccacctgagcccctacggcaacatctacggcccctactgccagtgcgacaacttcagctgcgtgagacacaagggcctgctgtgcggcggcaacggcgactgcgactgcggcgagtgcgtgtgcagaagcggctggaccggcgagtactgcaactgcaccaccagcaccgacagctgcgtgagcgaggacggcgtgctgtgcagcggcagaggcgactgcgtgtgcggcaagtgcgtgtgcaccaaccccggcgccagcggccccacctgcgagagatgccccacctgcggcgacccctgcaacagcaagagaagctgcatcgagtgccacctgagcgccgccggccaggccagagaggagtgcgtggacaagtgcaagctggccggcgccaccatcagcgaggaggaggacttcagcaaggacggcagcgtgagctgcagcctgcagggcgagaacgagtgcctgatcaccttcctgatcaccaccgacaacgagggcaagaccatcatccacagcatcaacgagaaggactgccccaagccccccaacatccccatgatcatgctgggcgtgagcctggccatcctgctgatcggcgtggtgctgctgtgcatctggaagctgctggtgagcttccacgacagaaaggaggtggccaagttcgaggccgagagaagcaaggccaagtggcagaccggcaccaaccccctgtacagaggcagcaccagcaccttcaagaacgtgacctacaagcacagagagaagcagaaggtggacctgagcaccgactgctag

SEQ ID NO: 16781 - protein, 798 aa, Artificial Sequence
  derived and/or modified sequence
MVALPMVLVLLLVLSRGESELDAKIPSTGDATEWRNPHLSMLGSCQPAPSCQKCILSHPSCAWCKQLNFTASGEAEARRCARREELLARGCPLEELEEPRGQQEVLQDQPLSQGARGEGATQLAPQRVRVTLRPGEPQQLQVRFLRAEGYPVDLYYLMDLSYSMKDDLERVRQLGHALLVRLQEVTHSVRIGFGSFVDKTVLPFVSTVPSKLRHPCPTRLERCQSPFSFHHVLSLTGDAQAFEREVGRQSVSGNLDSPEGGFDAILQAALCQEQIGWRNVSRLLVFTSDDTFHTAGDGKLGGIFMPSDGHCHLDSNGLYSRSTEFDYPSVGQVAQALSAANIQPIFAVTSAALPVYQELSKLIPKSAVGELSEDSSNVVQLIMDAYNSLSSTVTLEHSSLPPGVHISYESQCEGPEKREGKAEDRGQCNHVRINQTVTFWVSLQATHCLPEPHLLRLRALGFSEELIVELHTLCDCNCSDTQPQAPHCSDGQGHLQCGVCSCAPGRLGRLCECSVAELSSPDLESGCRAPNGTGPLCSGKGHCQCGRCSCSGQSSGHLCECDDASCERHEGILCGGFGRCQCGVCHCHANRTGRACECSGDMDSCISPEGGLCSGHGRCKCNRCQCLDGYYGALCDQCPGCKTPCERHRDCAECGAFRTGPLATNCSTACAHTNVTLALAPILDDGWCKERTLDNQLFFFLVEDDARGTVVLRVRPQEKGADHTQAIVLGCVGGIVAVGLGLVLAYRLSVEIYDRREYSRFEKEQQQLNWKQDSNPLYKSAITTTINPRFQEADSPTL

SEQ ID NO: 16782 - protein, 650 aa, Artificial Sequence
  derived and/or modified sequence
MVALPMVLVLLLVLSRGESELDAKIPSTGDATEWRNPHLSMLGSCQPAPSCQKCILSHPSCAWCKQLNFTASGEAEARRCARREELLARGCPLEELEEPRGQQEVLQDQPLSQGARGEGATQLAPQRVRVTLRPGEPQQLQVRFLRAEGYPVDLYYLMDLSYSMKDDLERVRQLGHALLVRLQEVTHSVRIGFGSFVDKTVLPFVSTVPSKLRHPCPTRLERCQSPFSFHHVLSLTGDAQAFEREVGRQSVSGNLDSPEGGFDAILQAALCQEQIGWRNVSRLLVFTSDDTFHTAGDGKLGGIFMPSDGHCHLDSNGLYSRSTEFDYPSVGQVAQALSAANIQPIFAVTSAALPVYQELSKLIPKSAVGELSEDSSNVVQLIMDAYNSLSSTVTLEHSSLPPGVHISYESQCEGPEKREGKAEDRGQCNHVRINQTVTFWVSLQATHCLPEPHLLRLRALGFSEELIVELHTLCDCNCSDTQPQAPHCSDGQGHLQCGVCRDCAECGAFRTGPLATNCSTACAHTNVTLALAPILDDGWCKERTLDNQLFFFLVEDDARGTVVLRVRPQEKGADHTQAIVLGCVGGIVAVGLGLVLAYRLSVEIYDRREYSRFEKEQQQLNWKQDSNPLYKSAITTTINPRFQEADSPTL

SEQ ID NO: 16783 - DNA, 2397 bp, Artificial Sequence
  derived and/or modified sequence
atggtcgctttaccgatggtactggtcctgctcctggtgctgtccaggggcgaatccgaactcgacgctaagatcccatcaacaggagatgctactgaatggaggaatccccacctgagcatgttgggcagttgtcagccagccccgagctgtcagaagtgtatcctgtcacacccaagttgtgcctggtgtaaacagttgaacttcacagcctcaggcgaggccgaagctcgtcgatgcgccaggcgcgaagaactcctcgctcgtggctgcccactggaggaactggaggaaccgcgagggcaacaagaggtgctgcaagatcaaccactatcccaaggcgctagaggagagggggctacacagctagctcctcagcgggtaagagtgacattgcgccctggcgaaccgcagcagctccaggttcgcttccttcgagctgaaggctaccctgtggacttatactacctcatggacctctcatatagtatgaaggatgacttggagcgcgtgcggcagcttgggcacgctctgcttgttcgcctgcaggaggtgacacacagtgtcagaatcgggttcggctctttcgtggacaaaacagtgctgccattcgtcagtactgtaccctcaaagttacggcacccgtgtcctacacggctggagcggtgccagtcaccgtttagcttccatcacgtcctaagtttgacaggcgatgcccaagccttcgagcgagaggtgggacgtcaatccgtgagcggaaatcttgactcgcctgaagggggttttgatgccattctgcaggctgccttgtgccaggagcagataggctggaggaacgtttctcggctgttggtatttacttccgacgacactttccacaccgccggagatgggaagctcggcggcatattcatgccatctgacggacattgccacctggattcaaacggcttatattcccgatctacagagttcgattaccccagcgtgggccaggtggcccaggcactgagtgcggccaatatccagccaatttttgcagttacaagtgctgcgctacccgtgtatcaggagctgagtaagctgatcccaaagtcagcagttggggagctgtctgaggatagcagcaacgtggttcagctcattatggacgcatataactcgctatcctcaacagttacgttagagcatagtagcctgccccccggcgtgcacatctcctacgagtcacaatgcgagggccccgaaaagagagaagggaaggccgaagatcggggacagtgcaaccatgtgagaattaatcaaacggtcactttttgggtttctctccaagccacacattgtttgcccgaacctcacttactgaggctcagggcccttggcttttcagaggagctgatagtcgaactgcatacactttgcgattgtaactgctctgatactcagccccaggcaccgcattgtagcgacgggcaggggcatctgcagtgtggcgtatgcagctgtgctccaggccgactcgggagactctgtgagtgcagcgtggcggagctctcgtctccagacttagagagcggatgtcgggcacccaacggcacaggacctctatgcagcgggaaaggtcactgccaatgcggccgttgttcctgctccggccagtcttccggccacctctgcgaatgcgacgacgcgagttgcgagaggcatgagggcatcctctgcggaggtttcggtcggtgtcaatgtggggtgtgccattgccacgcaaaccgcactgggcgtgcatgtgagtgttctggggatatggactcatgcatttcccctgaggggggtctctgctccgggcatggccgctgtaagtgcaaccgatgccagtgtctggatggatattacggcgcactgtgcgaccagtgcccggggtgcaagacaccatgtgaacgacacagagattgtgcggagtgtggggccttccgcaccgggccgctggcaaccaattgctcaacagcatgcgcacacacaaatgtaactctcgcgttagctccaatactggacgatggctggtgtaaggaaagaactctggataaccagctgttcttcttcctggtggaggacgatgctagagggacagtggttctccgcgtgcggccacaagagaaaggggccgatcacactcaggccatcgtgctgggatgcgtgggagggatcgtggccgtcggactgggactggtgcttgcctacagattaagtgtggagatctacgatcggcgcgagtactcgcggtttgagaaagaacagcaacagttgaactggaaacaggatagtaaccccctgtataagtccgcaataactaccaccattaacccaagatttcaagaggccgattcccccactctctag

SEQ ID NO: 16784 - DNA, 1953 bp, Artificial Sequence
  derived and/or modified sequence
atggtggcgctgccaatggtgctagtactgttattagtcttgagccggggagaatccgagctggatgccaagatcccctcaacaggtgacgcaacggaatggcgaaaccctcacctctccatgctggggtcatgccagcctgctccttcatgtcaaaaatgtattctgtctcatccatcgtgcgcttggtgcaagcaactgaattttaccgccagtggcgaagccgaagcccgaagatgtgctaggagggaggagctgttggcccgcggatgccctctggaagagttggaagaacccagggggcagcaggaggtgctgcaggaccagccgctttcccagggagcacgtggggaaggggccacacagctggcacctcaaagggttagggtgacactgcgccccggcgaacctcagcaactgcaagtgcggttcttgcgagctgagggctaccccgtggatctctactacctaatggacctttcttactcaatgaaggatgacctcgagagagtacgccaattgggacatgcacttctggtgcgattgcaagaggtgacccacagcgttcgcatcggattcggttcttttgtcgacaagaccgtcttaccttttgtcagcacagtgccatctaaactcagacacccgtgccctaccagactcgagaggtgccaaagccccttctcatttcaccacgtcctatctttgacgggtgatgcccaagccttcgaacgcgaggtcgggagacaatccgttagcggcaacttggactcccccgagggcggcttcgatgctatcctccaggccgccctgtgtcaggaacaaatcggatggcggaacgtctctaggcttcttgtgtttacatcagatgacacatttcacactgccggggacggtaagcttggtggtatattcatgcctagcgacgggcactgccacttagactccaacggcctctactcacgttcaacagagttcgattatccttcagtgggacaggtggcacaggctctgagcgccgccaatatccagcccattttcgccgttacaagcgctgcactccctgtataccaagaactcagcaaattaattcccaaatctgccgtgggggagctgtccgaggactctagtaatgttgtccaactaattatggacgcttacaacagcctttcaagcaccgtaactctggagcattccagcctgcccccaggcgtgcatatttcttatgagtcccagtgcgaaggaccagagaaacgcgaagggaaggctgaggatcgcgggcagtgtaatcatgtgcggatcaaccagacagtcacgttttgggtgtcgctgcaggccacgcactgccttccagaaccccacctgctgcgattaagagcccttggcttttcagaagaactgattgtggaactccacaccctgtgcgactgtaattgttccgacacacaaccacaggctccccattgttccgatgggcagggccacctacagtgcggtgtgtgtagagattgcgcagaatgtggcgctttcaggacaggccctttagcaactaactgcagcaccgcctgcgctcatactaacgtgacgctagcccttgcacctatactcgatgatgggtggtgtaaagagcgtacactcgacaatcagctctttttctttctggtagaagacgacgccaggggcactgtggtgctgagagtgcggccccaggaaaagggagctgatcacacacaggcaatcgttttaggttgtgtagggggcatcgttgcagtgggccttgggctggtgctcgcctaccggctgtctgtggaaatctacgatagacgggagtacagtagatttgaaaaggaacagcagcaactgaattggaagcaggattcaaaccccctgtacaagtcggccatcacaaccacgattaacccacggttccaggaagccgacagcccaactctgtag

SEQ ID NO: 16785 - DNA, 2397 bp, Artificial Sequence
  derived and/or modified sequence
atggtagcgctgcccatggttttagtgctcctactagtgcttagccgcggcgagagcgagctggacgcgaagatcccctcaacaggtgatgccactgaatggcgaaacccccacctgtccatgctcgggtcttgtcagcccgccccatcatgccaaaaatgtattctcagccacccttcctgcgcctggtgcaagcagcttaacttcacggcttcaggcgaggccgaagctagacggtgtgcccggagggaagaactactcgcccgcggatgcccactcgaagaactggaagagccacgcggccaacaggaagtgctacaggaccagcccttaagccagggagcacgtggcgaaggagcaacacagttggctcctcagagagttagagttaccttgagacctggcgaacctcagcagctgcaagtgagattcctcagagccgagggctatcccgtggatctgtattaccttatggatctgtcttatagcatgaaggacgacctcgagagggtccgacagctgggacacgctctcttagtgagactccaggaggtaactcacagcgtgcgcattgggtttgggtccttcgtagacaagacggtgctgccctttgtcagcacagtcccctccaaactgaggcacccatgtcccacccgactggagagatgccaaagcccattctctttccaccacgtactgagcttgacgggcgacgctcaagccttcgaacgcgaggtgggccgccaaagcgtctctgggaacctggatagtcccgagggcggatttgatgcaatcctgcaggcagccctctgccaagaacagattggatggaggaatgtgagccgactactggtattcacctccgatgacacattccacaccgctggagacgggaaacttggggggatttttatgccttctgatggacactgtcatcttgactccaacggcctctacagcaggagtaccgaattcgactatccaagcgtggggcaggtagcccaagctttgagcgcagcgaacattcagccaatctttgctgtcacctctgccgctttgccagtgtatcaagaactgagtaagctgattcccaaatccgccgtgggagagttgagcgaggattcttctaacgtcgtgcagttgatcatggacgcctacaactccttatctagcacggttactctggaacattcaagcctgcctccaggtgtccacatctcctatgagagccagtgtgagggccctgaaaagcgggagggaaaggctgaggacagggggcaatgtaaccacgtaagaattaatcaaactgtgacattttgggtgtctcttcaggcgacccattgcctccccgaacctcatcttctgaggctgcgtgccttaggcttcagcgaggagctcatagtggaactgcatacactttgtgactgcaactgctcagatacccaaccccaagcgccacattgctctgacggccagggacacttacaatgtggagtatgcagttgtgcccccggaaggctagggcgcctttgtgaatgttccgtggctgaactcagttctcccgatttagagtccggctgcagggctcccaacggcacaggtcctctgtgctcgggcaaagggcattgccaatgtgggcgatgctcatgttcagggcagtcttcaggtcacctctgcgaatgcgatgacgccagctgtgaaagacacgagggaatcctctgcggtggattcgggcggtgccaatgcggggtctgccactgtcatgccaacaggactggccgcgcctgcgagtgttcaggtgacatggattcttgcatctctcctgaaggcggtctttgctccggtcatggccggtgcaaatgtaataggtgccaatgcttagacgggtactacggggccctgtgtgaccagtgtcccggctgcaagacaccatgtgagcgccatagggactgtgcagagtgtggggccttccgtacaggaccgctggcaacaaactgcagcacggcatgcgcccacacgaatgtgactctagctcttgccccgatcctggatgatggatggtgcaaagaacgcactctagataatcagctctttttttttctagtcgaggacgacgccaggggcactgtagtgctcagagtaagacctcaggagaagggggccgaccatactcaagcgattgtgctggggtgtgttggcggtatcgtcgcggtaggcctggggcttgtcctggcctataggctttctgtcgagatatatgaccgacgcgagtatagtagattcgagaaagagcagcagcagctgaattggaagcaggatagtaaccctctctataagagtgccattactacaacaatcaatccaagattccaggaagccgatagccccaccttgtag

SEQ ID NO: 16786 - DNA, 2861 bp, Artificial Sequence
  derived and/or modified sequence
aaatcttccccaccctggggagtgtcacttcctcctctgccgtctcccagatcagtacacaaaggctgctgctgccgccagaggaaggactgctctgcacgcacctatgtggaaactaaagcccagagagaaagtctgacttgccccacagccagtgagtgactgcagcagcaccagaatctggtctgtttcctgtttggctcttctaccactacggcttgggatctcgggcatggtggctttgccaatggtccttgttttgctgctggtcctgagcagaggtgagagtgaattggacgccaagatcccatccacaggggatgccacagaatggcggaatcctcacctgtccatgctggggtcctgccagccagccccctcctgccagaagtgcatcctctcacaccccagctgtgcatggtgcaagcaactgaacttcaccgcgtcgggagaggcggaggcgcggcgctgcgcccgacgagaggagctgctggctcgaggctgcccgctggaggagctggaggagccccgcggccagcaggaggtgctgcaggaccagccgctcagccagggcgcccgcggagagggtgccacccagctggcgccgcagcgggtccgggtcacgctgcggcctggggagccccagcagctccaggtccgcttccttcgtgctgagggatacccggtggacctgtactaccttatggacctgagctactccatgaaggacgacctggaacgcgtgcgccagctcgggcacgctctgctggtccggctgcaggaagtcacccattctgtgcgcattggttttggttcctttgtggacaaaacggtgctgccctttgtgagcacagtaccctccaaactgcgccacccctgccccacccggctggagcgctgccagtcaccattcagctttcaccatgtgctgtccctgacgggggacgcacaagccttcgagcgggaggtggggcgccagagtgtgtccggcaatctggactcgcctgaaggtggcttcgatgccattctgcaggctgcactctgccaggagcagattggctggagaaatgtgtcccggctgctggtgttcacttcagacgacacattccatacagctggggacgggaagttgggcggcattttcatgcccagtgatgggcactgccacttggacagcaatggcctctacagtcgcagcacagagtttgactacccttctgtgggtcaggtagcccaggccctctctgcagcaaatatccagcccatctttgctgtcaccagtgccgcactgcctgtctaccaggagctgagtaaactgattcctaagtctgcagttggggagctgagtgaggactccagcaacgtggtacagctcatcatggatgcttataatagcctgtcttccaccgtgacccttgaacactcttcactccctcctggggtccacatttcttacgaatcccagtgtgagggtcctgagaagagggagggtaaggctgaggatcgaggacagtgcaaccacgtccgaatcaaccagacggtgactttctgggtttctctccaagccacccactgcctcccagagccccatctcctgaggctccgggcccttggcttctcagaggagctgattgtggagttgcacacgctgtgtgactgtaattgcagtgacacccagccccaggctccccactgcagtgatggccagggacacctacaatgtggtgtatgcagctgtgcccctggccgcctaggtcggctctgtgagtgctctgtggcagagctgtcctccccagacctggaatctgggtgccgggctcccaatggcacagggcccctgtgcagtggaaagggtcactgtcaatgtggacgctgcagctgcagtggacagagctctgggcatctgtgcgagtgtgacgatgccagctgtgagcgacatgagggcatcctctgcggaggctttggtcgctgccaatgtggagtatgtcactgtcatgccaaccgcacgggcagagcatgcgaatgcagtggggacatggacagttgcatcagtcccgagggagggctctgcagtgggcatggacgctgcaaatgcaaccgctgccagtgcttggacggctactatggtgctctatgcgaccaatgcccaggctgcaagacaccatgcgagagacaccgggactgtgcagagtgtggggccttcaggactggcccactggccaccaactgcagtacagcttgtgcccataccaatgtgaccctggccttggcccctatcttggatgatggctggtgcaaagagcggaccctggacaaccagctgttcttcttcttggtggaggatgacgccagaggcacggtcgtgctcagagtgagaccccaagaaaagggagcagaccacacgcaggccattgtgctgggctgcgtagggggcatcgtggcagtggggctggggctggtcctggcttaccggctctcggtggaaatctatgaccgccgggaatacagtcgctttgagaaggagcagcaacaactcaactggaagcaggacagtaatcctctctacaaaagtgccatcacgaccaccatcaatcctcgctttcaagaggcagacagtcccactctctgaaggagggagggacacttacccaaggctcttctccttggaggacagtgggaactggagggtgagaggaagggtgggtctgtaagaccttggtaggggactaattcactggcgaggtgcggccaccaccctacttcattttcagagtgacacccaagagggctgcttcccatgcctgcaaccttgcatccatctgggctaccccacccaagtatacaataaagtcttacctcag

SEQ ID NO: 16787 - DNA, 2324 bp, Artificial Sequence
  derived and/or modified sequence
gctctgcacgcacctatgtggaaactaaagcccagagagaaagtctgacttgccccacagccagtgagtgactgcagcagcaccagaatctggtctgtttcctgtttggctcttctaccactacggcttgggatctcgggcatggtggctttgccaatggtccttgttttgctgctggtcctgagcagaggtgagagtgaattggacgccaagatcccatccacaggggatgccacagaatggcggaatcctcacctgtccatgctggggtcctgccagccagccccctcctgccagaagtgcatcctctcacaccccagctgtgcatggtgcaagcaactgaacttcaccgcgtcgggagaggcggaggcgcggcgctgcgcccgacgagaggagctgctggctcgaggctgcccgctggaggagctggaggagccccgcggccagcaggaggtgctgcaggaccagccgctcagccagggcgcccgcggagagggtgccacccagctggcgccgcagcgggtccgggtcacgctgcggcctggggagccccagcagctccaggtccgcttccttcgtgctgagggatacccggtggacctgtactaccttatggacctgagctactccatgaaggacgacctggaacgcgtgcgccagctcgggcacgctctgctggtccggctgcaggaagtcacccattctgtgcgcattggttttggttcctttgtggacaaaacggtgctgccctttgtgagcacagtaccctccaaactgcgccacccctgccccacccggctggagcgctgccagtcaccattcagctttcaccatgtgctgtccctgacgggggacgcacaagccttcgagcgggaggtggggcgccagagtgtgtccggcaatctggactcgcctgaaggtggcttcgatgccattctgcaggctgcactctgccaggagcagattggctggagaaatgtgtcccggctgctggtgttcacttcagacgacacattccatacagctggggacgggaagttgggcggcattttcatgcccagtgatgggcactgccacttggacagcaatggcctctacagtcgcagcacagagtttgactacccttctgtgggtcaggtagcccaggccctctctgcagcaaatatccagcccatctttgctgtcaccagtgccgcactgcctgtctaccaggagctgagtaaactgattcctaagtctgcagttggggagctgagtgaggactccagcaacgtggtacagctcatcatggatgcttataatagcctgtcttccaccgtgacccttgaacactcttcactccctcctggggtccacatttcttacgaatcccagtgtgagggtcctgagaagagggagggtaaggctgaggatcgaggacagtgcaaccacgtccgaatcaaccagacggtgactttctgggtttctctccaagccacccactgcctcccagagccccatctcctgaggctccgggcccttggcttctcagaggagctgattgtggagttgcacacgctgtgtgactgtaattgcagtgacacccagccccaggctccccactgcagtgatggccagggacacctacaatgtggtgtatgcagggactgtgcagagtgtggggccttcaggactggcccactggccaccaactgcagtacagcttgtgcccataccaatgtgaccctggccttggcccctatcttggatgatggctggtgcaaagagcggaccctggacaaccagctgttcttcttcttggtggaggatgacgccagaggcacggtcgtgctcagagtgagaccccaagaaaagggagcagaccacacgcaggccattgtgctgggctgcgtagggggcatcgtggcagtggggctggggctggtcctggcttaccggctctcggtggaaatctatgaccgccgggaatacagtcgctttgagaaggagcagcaacaactcaactggaagcaggacagtaatcctctctacaaaagtgccatcacgaccaccatcaatcctcgctttcaagaggcagacagtcccactctctgaaggagggagggacacttacccaaggctcttctccttggaggacagtgggaactggagggtgagaggaagggtgggtctgtaagaccttggtaggggactaattcactggcgaggtgcggccaccaccctacttcattttcagagtgacacccaagagggctgcttcccatgcctgcaaccttgcatccatctgggctaccccacccaagtatacaataaagtcttacctc

SEQ ID NO: 16788 - DNA, 2791 bp, Artificial Sequence
  derived and/or modified sequence
cacttcctcctctgccgtctcccagatcagtacacaaaggctgctgctgccgccagaggaaggactgctctgcacgcacctatgtggaaactaaagcccagagagaaagtctgacttgccccacagccagtgagtgactgcagcagcaccagaatctgggcatggtggctttgccaatggtccttgttttgctgctggtcctgagcagaggtgagagtgaattggacgccaagatcccatccacaggggatgccacagaatggcggaatcctcacctgtccatgctggggtcctgccagccagccccctcctgccagaagtgcatcctctcacaccccagctgtgcatggtgcaagcaactgaacttcaccgcgtcgggagaggcggaggcgcggcgctgcgcccgacgagaggagctgctggctcgaggctgcccgctggaggagctggaggagccccgcggccagcaggaggtgctgcaggaccagccgctcagccagggcgcccgcggagagggtgccacccagctggcgccgcagcgggtccgggtcacgctgcggcctggggagccccagcagctccaggtccgcttccttcgtgctgagggatacccggtggacctgtactaccttatggacctgagctactccatgaaggacgacctggaacgcgtgcgccagctcgggcacgctctgctggtccggctgcaggaagtcacccattctgtgcgcattggttttggttcctttgtggacaaaacggtgctgccctttgtgagcacagtaccctccaaactgcgccacccctgccccacccggctggagcgctgccagtcaccattcagctttcaccatgtgctgtccctgacgggggacgcacaagccttcgagcgggaggtggggcgccagagtgtgtccggcaatctggactcgcctgaaggtggcttcgatgccattctgcaggctgcactctgccaggagcagattggctggagaaatgtgtcccggctgctggtgttcacttcagacgacacattccatacagctggggacgggaagttgggcggcattttcatgcccagtgatgggcactgccacttggacagcaatggcctctacagtcgcagcacagagtttgactacccttctgtgggtcaggtagcccaggccctctctgcagcaaatatccagcccatctttgctgtcaccagtgccgcactgcctgtctaccaggagctgagtaaactgattcctaagtctgcagttggggagctgagtgaggactccagcaacgtggtacagctcatcatggatgcttataatagcctgtcttccaccgtgacccttgaacactcttcactccctcctggggtccacatttcttacgaatcccagtgtgagggtcctgagaagagggagggtaaggctgaggatcgaggacagtgcaaccacgtccgaatcaaccagacggtgactttctgggtttctctccaagccacccactgcctcccagagccccatctcctgaggctccgggcccttggcttctcagaggagctgattgtggagttgcacacgctgtgtgactgtaattgcagtgacacccagccccaggctccccactgcagtgatggccagggacacctacaatgtggtgtatgcagctgtgcccctggccgcctaggtcggctctgtgagtgctctgtggcagagctgtcctccccagacctggaatctgggtgccgggctcccaatggcacagggcccctgtgcagtggaaagggtcactgtcaatgtggacgctgcagctgcagtggacagagctctgggcatctgtgcgagtgtgacgatgccagctgtgagcgacatgagggcatcctctgcggaggctttggtcgctgccaatgtggagtatgtcactgtcatgccaaccgcacgggcagagcatgcgaatgcagtggggacatggacagttgcatcagtcccgagggagggctctgcagtgggcatggacgctgcaaatgcaaccgctgccagtgcttggacggctactatggtgctctatgcgaccaatgcccaggctgcaagacaccatgcgagagacaccgggactgtgcagagtgtggggccttcaggactggcccactggccaccaactgcagtacagcttgtgcccataccaatgtgaccctggccttggcccctatcttggatgatggctggtgcaaagagcggaccctggacaaccagctgttcttcttcttggtggaggatgacgccagaggcacggtcgtgctcagagtgagaccccaagaaaagggagcagaccacacgcaggccattgtgctgggctgcgtagggggcatcgtggcagtggggctggggctggtcctggcttaccggctctcggtggaaatctatgaccgccgggaatacagtcgctttgagaaggagcagcaacaactcaactggaagcaggacagtaatcctctctacaaaagtgccatcacgaccaccatcaatcctcgctttcaagaggcagacagtcccactctctgaaggagggagggacacttacccaaggctcttctccttggaggacagtgggaactggagggtgagaggaagggtgggtctgtaagaccttggtaggggactaattcactggcgaggtgcggccaccaccctacttcattttcagagtgacacccaagagggctgcttcccatgcctgcaaccttgcatccatctgggctaccccacccaagtatacaataaagtcttacctcaga

SEQ ID NO: 16789 - DNA, 2397 bp, Artificial Sequence
  derived and/or modified sequence
atggtggccctgcccatggtgctggtgctgctgctggtgctgagcagaggagagagcgagctggatgccaagatccccagcactggagatgccacagagtggaggaacccccacctgtccatgctgggcagctgccagcctgcccccagctgccagaagtgcatcctgagccaccccagctgtgcctggtgcaagcagctgaacttcaccgccagcggggaggccgaggcccggcgctgtgcccggcgggaggagctgctggcccggggctgccccctggaggagctggaggagccccggggccagcaggaggtgctgcaggaccagcccctgagccagggcgcccggggggagggcgccacccagctggccccccagagggtgcgggtgaccctgcggcctggagagccccagcagctgcaggtgcgcttcctgcgggcagagggctaccctgtggacctgtactacctgatggacctgagctacagcatgaaggatgacctggagcgggtgcggcagctgggccacgccctgctggtgcggctgcaggaggtgacccacagcgtgagaattggatttggcagctttgtggacaagacagtgctgccctttgtgtccacagtgcccagcaagctgcggcacccctgccccacccggctggagcgctgccagagccccttctccttccaccacgtgctgagcctgactggagatgcccaggcctttgagcgggaggtgggccggcagagcgtgtctggcaacctggacagccctgagggcggctttgatgccatcctgcaggccgccctgtgccaggagcagatcggctggagaaatgtgtcccggctgctggtgttcaccagtgatgacaccttccacacagctggagatggcaagctgggcggcatcttcatgcccagtgatggccactgccacctggacagcaatggcctgtacagccgcagcacagaatttgactaccccagcgtgggccaggtggcccaggccctgtctgctgccaacatccagcccatctttgctgtgaccagcgctgccctgcctgtgtaccaggagctgagcaagctgatccccaagtctgctgtgggggagctgtctgaggacagcagcaatgtggtgcagctgatcatggatgcctacaacagcctgagcagcacagtgaccctggagcacagcagcctgcccccaggagtgcacatctcctatgagagccagtgtgagggccctgagaagcgggagggcaaggcagaagatcggggccagtgcaaccacgtgcgcatcaaccagacagtgaccttctgggtgtccctgcaggccacccactgcctgcctgagccccacctgctgcggctgcgggccctgggcttcagcgaggagctgattgtggagctgcacaccctgtgtgactgcaactgcagcgacacccagccccaggccccccactgcagtgatggccagggccacctgcagtgtggggtgtgcagctgtgcccctggccgcctgggccgcctgtgtgagtgcagcgtggccgagctgagcagcccagacctggagagcggctgccgggccccaaatggaacaggccccctgtgcagcggcaagggccactgccagtgtggccgctgcagctgcagcggccagagcagcggccacctgtgtgaatgtgatgatgccagctgtgaaagacatgagggcatcctgtgtggcggcttcggccgctgccagtgtggggtgtgccactgccacgccaacagaacaggccgggcctgtgaatgttctggggacatggacagctgcatcagccctgagggcggcctgtgcagcggccacggccgctgcaagtgcaaccgctgccagtgcctggatggctactatggagccctgtgtgaccagtgccccggctgcaagaccccctgtgagcggcaccgggactgtgctgaatgtggggccttcagaacaggccccctggccaccaactgcagcacagcctgtgcccacaccaacgtgaccctggccctggcccccatcctggatgatggctggtgcaaggagaggaccctggacaaccagctgttcttcttcctggtggaggatgatgcccggggcaccgtggtgctgcgggtgcggccccaggagaagggagctgaccacacccaggccatcgtgctgggctgtgtgggcggcatcgtggccgtgggcctgggcctggtgctggcctaccgcctgtctgtggagatctatgacagaagagagtacagcagatttgagaaggagcagcagcagctgaactggaagcaggacagcaaccccctgtacaagagcgccatcaccaccaccatcaacccccgcttccaggaggccgacagccccaccctgtag

SEQ ID NO: 16790 - DNA, 1953 bp, Artificial Sequence
  derived and/or modified sequence
atggtggccctgcccatggtgctggtgctgctgctggtgctgagcagaggagagagcgagctggatgccaagatccccagcactggagatgccacagagtggaggaacccccacctgtccatgctgggcagctgccagcctgcccccagctgccagaagtgcatcctgagccaccccagctgtgcctggtgcaagcagctgaacttcaccgccagcggggaggccgaggcccggcgctgtgcccggcgggaggagctgctggcccggggctgccccctggaggagctggaggagccccggggccagcaggaggtgctgcaggaccagcccctgagccagggcgcccggggggagggcgccacccagctggccccccagagggtgcgggtgaccctgcggcctggagagccccagcagctgcaggtgcgcttcctgcgggcagagggctaccctgtggacctgtactacctgatggacctgagctacagcatgaaggatgacctggagcgggtgcggcagctgggccacgccctgctggtgcggctgcaggaggtgacccacagcgtgagaattggatttggcagctttgtggacaagacagtgctgccctttgtgtccacagtgcccagcaagctgcggcacccctgccccacccggctggagcgctgccagagccccttctccttccaccacgtgctgagcctgactggagatgcccaggcctttgagcgggaggtgggccggcagagcgtgtctggcaacctggacagccctgagggcggctttgatgccatcctgcaggccgccctgtgccaggagcagatcggctggagaaatgtgtcccggctgctggtgttcaccagtgatgacaccttccacacagctggagatggcaagctgggcggcatcttcatgcccagtgatggccactgccacctggacagcaatggcctgtacagccgcagcacagaatttgactaccccagcgtgggccaggtggcccaggccctgtctgctgccaacatccagcccatctttgctgtgaccagcgctgccctgcctgtgtaccaggagctgagcaagctgatccccaagtctgctgtgggggagctgtctgaggacagcagcaatgtggtgcagctgatcatggatgcctacaacagcctgagcagcacagtgaccctggagcacagcagcctgcccccaggagtgcacatctcctatgagagccagtgtgagggccctgagaagcgggagggcaaggcagaagatcggggccagtgcaaccacgtgcgcatcaaccagacagtgaccttctgggtgtccctgcaggccacccactgcctgcctgagccccacctgctgcggctgcgggccctgggcttcagcgaggagctgattgtggagctgcacaccctgtgtgactgcaactgcagcgacacccagccccaggccccccactgcagtgatggccagggccacctgcagtgtggggtgtgccgggactgtgctgaatgtggggccttcagaacaggccccctggccaccaactgcagcacagcctgtgcccacaccaacgtgaccctggccctggcccccatcctggatgatggctggtgcaaggagaggaccctggacaaccagctgttcttcttcctggtggaggatgatgcccggggcaccgtggtgctgcgggtgcggccccaggagaagggagctgaccacacccaggccatcgtgctgggctgtgtgggcggcatcgtggccgtgggcctgggcctggtgctggcctaccgcctgtctgtggagatctatgacagaagagagtacagcagatttgagaaggagcagcagcagctgaactggaagcaggacagcaaccccctgtacaagagcgccatcaccaccaccatcaacccccgcttccaggaggccgacagccccaccctgtag

SEQ ID NO: 16791 - DNA, 2397 bp, Artificial Sequence
  derived and/or modified sequence
atggtggccctgcccatggtgctggtgctgctgctggtgctgagccgcggtgagtccgagctggatgctaagatcccttctactggagacgctacagagtggaggaatcctcacctgagtatgcttggctcttgtcagcccgctccttcttgtcaaaaatgcatattaagccacccgtcgtgcgcctggtgtaagcagctcaatttcacggcatctggagaggctgaagcccggcgatgtgcacgtcgggaagaactgctggcaaggggctgtccactagaagagctagaagaaccaaggggccagcaagaggtcttgcaggatcagcctctctcccagggcgcaaggggggaaggcgctacacagttagccccccaacgagttcgagtgacgctccgcccaggcgaaccacaacaattgcaggtgcgcttcctgagagctgaggggtaccccgtagacttatattatctcatggatctgagctattccatgaaagatgacctggagagggtccggcagctggggcacgcactgcttgtccggctgcaagaagtaactcattccgtgaggatcgggtttggtagttttgtggacaaaactgtcctgccttttgtttcaacagtccccagcaaacttagacacccgtgcccgactcggctggaacgatgccagtcaccattctcgttccatcacgtgctctctctgaccggcgatgcgcaggccttcgagcgggaggtgggcagacaatctgtatccggcaatctggactctcccgagggggggttcgacgccatcctccaggctgccctatgtcaagagcagataggctggcgcaacgtgtctaggctgctggttttcactagcgatgatacattccacactgcaggcgacggcaaacttggggggatctttatgccttccgacggtcactgtcacctggatagtaatggcctatattctcgctctaccgaatttgattacccatccgttgggcaggtcgcccaggctctcagtgcagcaaatatacagcctatctttgccgtgacctccgcggccttgccagtgtatcaggagctgagcaagctgatccctaagtccgcggttggggaactctccgaggacagtagcaatgtcgtccagttgataatggatgcttacaattccctgagctccacagttactctcgagcattcttctctccctccgggcgtccacattagctacgagagccagtgtgagggtcctgagaaaagagaaggcaaagccgaggatagaggtcagtgcaatcacgttagaataaatcagaccgttactttttgggtctccttgcaggccactcactgcctcccagaaccacatctgttgcgcctgagagccctaggcttcagcgaggaactgatcgtggaactacacacactctgtgattgtaactgcagtgatacccaaccccaggcacctcactgcagtgacggacagggccatcttcaatgtggtgtgtgttcctgtgccccaggtcggctcggacgcctctgcgaatgcagcgtggccgagctcagttcaccagatctggaatcaggttgcagagccccaaatgggacagggcccctctgctctggaaagggacattgtcagtgcgggagatgtagctgcagcgggcaaagctctggtcacctgtgcgaatgtgatgacgcatcctgcgagaggcacgagggcattttgtgtggcggcttcggtcgatgtcagtgcggggtatgccattgtcatgcaaatcgtaccgggagggcctgcgaatgctctggcgatatggactcctgtatttctcctgagggtggcctttgttcgggccacggaaggtgtaaatgcaacagatgtcagtgcctggacggctactacggggccctctgcgaccagtgcccaggctgtaagacaccgtgtgaacggcatcgcgattgtgcagaatgcggagcgttccggacaggccccctggccacgaactgcagcacagcatgtgctcacactaacgtgaccctcgctctggctcccatactcgacgatgggtggtgtaaggaacggacccttgacaaccaacttttcttctttttggtggaagacgacgcccgaggcacagtcgtacttcgggtgcgcccgcaggagaagggggccgatcatacccaggctatcgtactgggctgtgtgggcggcatcgtcgctgtgggcctgggcctggttttggcgtacagactgtcagtggagatctatgataggcgggaatattcaagattcgagaaggaacagcagcagctaaattggaaacaggactccaatcccctctacaagagcgcaataacaactaccatcaacccgagattccaggaggcagactcacctactctttag

SEQ ID NO: 16792 - DNA, 1953 bp, Artificial Sequence
  derived and/or modified sequence
atggtggccctgcccatggtgctggtgctgctgctggtgctgagcagaggtgaatctgaactggatgctaagatcccatccactggggatgcaacagaatggcgtaacccacacctttccatgctgggttcttgtcagccagcccctagttgtcaaaagtgcattctgtctcacccctcttgcgcctggtgcaaacagctgaacttcacagctagcggcgaagccgaggctagacgttgcgccagaagggaggaacttctagcccgtggctgcccccttgaggagctcgaggaacctcgtggtcagcaggaagttctgcaggatcagcctctgagccaaggcgcccggggagagggggcaacccagctagcccctcagcgggtgcgcgtcacactgagacctggagagcctcagcagctccaagtgcgcttcctgagggccgagggctaccccgttgacctttactatctgatggatctcagctactcgatgaaggacgatctggaacgggtacgccagctcggtcacgcccttctggtgcggcttcaggaggtcactcattccgtgcgtatcggctttgggagcttcgtggataagacagtactcccctttgtgtcaacagtgccttcgaaacttaggcacccctgcccaacccgtctagagagatgtcaatctcctttttcctttcaccatgtgttgtcgttaaccggagacgcccaggccttcgagcgagaagtagggcgccaaagcgtgtctggaaacttggatagcccagagggcgggttcgacgctatcctccaggccgcattatgtcaggaacagataggctggcggaacgtgagtaggctgttggtatttacttccgacgatacgttccataccgccggcgatggcaagctcggcggcatctttatgccaagcgatggtcactgccatttggatagtaatggcctttactcaaggagcactgagtttgattacccctctgtaggccaggtcgcgcaggctctgtcagccgccaatatacagccgatatttgcagtgacatccgctgccctaccagtgtaccaggagctaagcaaactgattccaaagtccgcggtcggtgagctgtctgaggatagcagtaacgtcgttcagttgatcatggatgcctacaatagcttgagctccacagtgacgctggagcattcttctttgccaccgggggtgcatatctcctatgagtctcagtgtgaggggccggaaaaaagagaggggaaggcagaggatcgcggccagtgtaaccacgttagaatcaatcagactgtaaccttctgggtctctctgcaggcaacccactgcctgccagaaccgcacttgctcagattgcgtgcactgggcttcagcgaggagctcattgttgaacttcatacactttgcgattgtaattgcagcgacacccaaccacaagctccccactgtagcgacggtcagggccatctgcagtgcggtgtttgtagagattgtgcagagtgcggggcgttccggaccggtccactagccaccaattgtagtactgcctgcgcacacacaaacgttactcttgccctggctcccatcctggatgacggctggtgcaaggagaggacgctggacaaccagttgtttttcttcctggtggaagatgatgcccgtggcaccgtggttcttcgtgtgcgcccgcaagaaaaaggagctgaccatacacaggccattgttctcggctgtgtggggggcatcgtcgcggtgggacttggactggtgctcgcctatcggctatcagtcgagatttatgaccgccgtgaatattccagatttgaaaaagaacagcagcaactgaattggaagcaggatagcaatcctctgtacaaaagcgccatcactacaaccatcaaccctcgcttccaggaggctgatagccctaccttgtag

SEQ ID NO: 16793 - DNA, 2397 bp, Artificial Sequence
  derived and/or modified sequence
atggtggccctgcccatggtgctggtgctgctgctggtgctgagccggggcgagagcgaactcgacgctaagattccatccactggcgatgccaccgagtggcgcaacccacacctcagtatgctgggtagctgccagccagcccctagctgtcaaaagtgtatattgagccaccccagctgtgcttggtgtaaacagctgaacttcaccgcatccggcgaagccgaagccagaaggtgcgccaggagggaggaactgcttgcaagggggtgccctctggaggagttggaggagcctcgtggccagcaggaggtcctccaggaccagcctctttctcaaggggcccgtggagagggtgctacccagctcgcccctcaacgcgtccgcgtgacacttcgacctggggagccacagcagctgcaggtacggtttcttcgtgcagaaggctatcccgtggacctttactatcttatggacctcagctactctatgaaggatgaccttgagcgcgtgcgccagctgggccacgcactgctcgttcgtttgcaggaggttacacattcagtgcgcatcggttttggcagctttgtggacaaaactgtcttgcctttcgtgtccacagtcccgagtaaactccgacacccttgtcccacaaggctggagagatgtcagagcccattcagctttcatcatgtgctctccctgactggcgacgcccaggcatttgagcgagaggtgggaagacaatccgtgtcaggcaacctggatagtcccgagggggggttcgatgccatactgcaggccgcactatgccaggagcagattggttggaggaacgtttctagactgctggtcttcacatcagacgacacatttcatacagccggagatggaaagctcggaggcatatttatgccttctgacgggcactgccatctggacagtaacggtctgtactcacggtcaaccgaattcgattaccctagtgtgggtcaggtggctcaggcactgagcgctgccaatattcaaccaatatttgctgtgacctctgctgcacttccagtgtatcaagaactgagtaaactgattcccaagtcagcggtgggagaactgtctgaggactcatcaaatgtcgtgcaactgatcatggacgcgtacaacagtctttcatcaactgtcaccctggagcacagttctctgccaccaggtgttcacatcagctatgagtcccaatgtgagggccccgagaagcgggagggaaaagccgaggatcggggccagtgtaaccatgtccggattaaccagactgtaactttttgggttagcttacaagccacccactgcctgccggaacctcacctgctccgtctgagagcccttgggttctcggaagagctcattgtggagttacataccctctgcgactgcaattgttcagacacacagccgcaggccccacactgcagcgatggacagggacatctgcagtgcggagtgtgttcctgtgctcccgggcgcctgggacgcctgtgcgaatgcagcgtcgccgagctcagctcgcccgatctggagtccggatgtcgggcaccaaatggtactgggccgttgtgcagtggcaagggtcactgtcaatgcgggagatgctcttgctccggtcaatcctctggtcatctgtgtgaatgtgatgatgcctcttgtgagaggcacgagggcatattgtgcggaggctttggtaggtgccagtgcggcgtgtgtcactgtcacgcaaataggacaggccgggcttgcgagtgttccggggatatggacagctgcatcagtcccgagggtggactgtgctctgggcacgggcggtgcaaatgtaaccggtgtcagtgcctggatgggtattacggggctctgtgtgatcagtgcccggggtgtaagaccccgtgtgagaggcacagggactgtgccgagtgtggcgcgtttcgaacaggaccactggccacaaactgcagtaccgcctgcgctcatactaacgtaacattagcactggcgcccatattagatgatggatggtgtaaagagcgcactttggataatcagctgtttttctttttggtcgaagatgatgctcggggcactgtggtgctgcgcgtgcgtccccaggaaaaaggcgccgatcatacccaggcaatcgttctgggctgtgtgggcggcatcgtggcagtgggcctgggcttggttcttgcatacaggcttagcgtcgaaatttatgaccgccgcgagtactctcgatttgagaaggagcaacagcaactgaattggaagcaggatagcaacccactttacaaatctgctatcaccacaacgatcaaccccagattccaagaagctgatagcccgactttgtag

SEQ ID NO: 16794 - DNA, 2397 bp, Artificial Sequence
  derived and/or modified sequence
atggtcgctctgcctatggttctagtgttgctactggtgttgagtaggggagagagcgaattagacgcgaagattccatccaccggcgatgcaaccgagtggcgaaacccccacctgtccatgctcggtagttgtcagccggctccctcctgccagaaatgtatcctgtctcatccctcctgtgcctggtgcaagcagctgaatttcaccgcaagcggcgaagccgaggctcgaaggtgcgcacggagagaagagctgctcgcccgaggctgtccgttggaggagcttgaggagccaagagggcagcaggaggttctccaggaccagccgctgtctcagggagctagaggcgagggggctactcagctcgcccctcagcgggttagagtgaccctgcggcctggtgaacctcagcagctgcaggtccggttcctgagagcagagggttaccccgttgatctgtattatctgatggacctgagttactctatgaaggatgatctggaacgggtgcgccaactggggcatgccctccttgtgcggttacaagaagtaacccactccgtccgcattggctttgggtcttttgtggacaagacggttctgccgttcgtatctaccgtgccaagtaagctgcgacacccctgtcctacgcggcttgaaaggtgccagtccccattctccttccatcacgtgctctccctcacaggcgacgcgcaggcctttgaaagagaggttgggcgacagtcagtgtccggcaatttagacagtccagagggcggtttcgacgccattttacaggccgctctgtgccaggaacagatcggatggaggaatgtgtcacggttactggtgttcactagcgatgatacttttcatacagctggggatggcaagctgggcggaatcttcatgccttctgatgggcattgccacctggactcaaatggcctgtactcacgatctaccgaattcgattatccctcagtggggcaggtagcccaggccctgagcgccgctaacattcagccaatctttgccgtcaccagtgcggctctgccggtatatcaggaattatcaaagctgattcctaaaagtgccgtgggcgaactttctgaagacagctctaacgtggtgcaattaatcatggacgcctacaactccctgtccagcacagtaaccttagagcatagcagcttgcctcctggagtccatatttcttatgagtcacagtgtgaaggtccagagaaaagagagggcaaagccgaggaccgtggccagtgcaatcatgttcgcataaaccaaaccgtgacattctgggtatccctgcaagccacccactgcctccctgaaccgcatctgctacgcctgagggccctcggcttctctgaagagctgatcgtcgagctgcataccctgtgcgactgtaattgttctgatactcaaccccaggcacctcactgttctgacggtcagggccacctgcagtgtggagtgtgctcttgtgctcctgggcgactgggcagactttgcgaatgtagcgtggctgaactttcgtcacccgatctcgaatccggatgtagagctcctaatggcaccggtcccttgtgttccggtaaggggcactgtcagtgcgggaggtgcagctgttctgggcagtcgagtggccacctgtgcgagtgcgacgacgccagttgtgagagacatgaaggcatcttgtgcgggggttttggacggtgtcagtgtggggtttgtcattgccacgctaaccgcactgggagggcttgcgagtgctctggagacatggattcgtgcatcagcccagaaggtggtttgtgtagcggacatggcaggtgcaagtgcaaccgctgccagtgccttgacggttattatggtgctctctgtgaccagtgtccaggttgcaagaccccctgtgagaggcaccgggactgcgctgagtgtggcgcatttcgaaccggaccactggcaacaaattgcagcacggcctgcgcacacacgaacgtaactctggccctcgctcccatcctggacgacgggtggtgcaaagagcgtactttggacaaccagctcttttttttcctggttgaggatgacgccaggggcacggtggtgctgcgggtgaggccccaggagaagggcgcagaccacactcaggctatagttctgggatgcgtcggcggaatcgtggcagtcggacttggacttgtgctggcatatagactctcagttgaaatctatgatagacgcgaatattcccgttttgagaaggagcagcaacagctgaactggaagcaggatagcaatcctctctataaaagtgccattaccacgaccatcaaccctaggttccaagaggctgactctcccacactctag

SEQ ID NO: 16795 - DNA, 1953 bp, Artificial Sequence
  derived and/or modified sequence
atggtcgcattgccgatggtgctagttttgcttctcgttttgtcacgtggagagtccgaactggacgctaaaataccctcaacgggtgacgcaaccgaatggcgtaacccacacctgtctatgttaggctcctgtcaacctgccccatcgtgtcagaagtgtatcctgagtcaccccagttgtgcgtggtgtaaacaattgaacttcacagcatcaggcgaggccgaggccaggcggtgcgcacgcagggaggaactgcttgccagaggatgccccctagaggaactggaagagcctcgagggcagcaggaggttttgcaggatcagccactgtctcagggcgcacggggagagggcgctactcagctggctccccagcgcgtaagggtgacattaaggcccggagagccccagcaactgcaggtgcgcttcttacgcgctgaaggctacccggtagacttgtactacctgatggatctatcatattccatgaaggacgatcttgagcgcgtccggcaacttgggcatgctctactcgtgaggctgcaggaagtgacacatagtgtgcgaatcggtttcggatcctttgtggacaaaaccgtgttacccttcgtgtccaccgtgccctccaaactgagacacccatgcccaactcgtctggaacgatgccagtctcctttcagtttccatcatgtcttgtccctgaccggcgatgcccaggctttcgagcgggaagtcgggcgacagtctgtgagtggcaatctcgacagtcccgaaggaggtttcgacgctatactacaggccgctctctgtcaggaacagatcgggtggcgtaatgtatcaagactgctggttttcacatcagacgataccttccatacagcaggcgacggtaagttgggaggtatcttcatgccaagcgatggccactgccaccttgatagcaacggactctacagccggagcacggagttcgattatcccagcgttggccaggtcgctcaggcgctctccgcagctaatatccagcccatttttgccgtgacctcggctgctctcccggtgtaccaggagttgagcaagttgatccctaagagcgctgtgggtgaactaagtgaggatagcagtaatgtggtgcagttgataatggacgcatacaactccctgtcatccacagttactctcgagcactcaagcctgccgccaggggtgcatatatcatacgaatctcagtgtgaaggccctgagaagagagaggggaaagcggaagatcggggacaatgcaaccacgtccgaattaaccagacggtgactttctgggtttctctgcaggccacccactgtctccccgagccgcatttgctcaggctccgcgctcttgggttctccgaagaattgatcgtggaattgcacacgctctgtgattgcaattgtagcgatacccagcctcaggcaccacattgcagtgacggacagggccacctacagtgcggagtctgccgggattgcgcggaatgcggcgcattccgaactggcccactcgctacgaactgtagcacagcgtgcgcccacacgaatgttaccttggccttagcgcctatattggacgatggctggtgcaaggagagaaccttggacaaccaattgtttttcttcctagtcgaagacgacgcccgaggcactgtcgtcctgcgcgtgagaccccaagagaaaggtgcggatcatacacaggccattgtactgggctgtgtgggaggcattgtagctgtcggcctgggactcgtgctcgcctataggctgagcgtggagatctatgaccgcagagaatactcccgctttgagaaggagcagcaacagctgaactggaagcaggacagcaacccgttatataagtcggcgataacaaccacaatcaatccaaggtttcaggaagccgatagtcctacactttag

SEQ ID NO: 16796 - DNA, 2397 bp, Artificial Sequence
  derived and/or modified sequence
atggtcgccctgccaatggtccttgtgctgttattggtcctctctagaggcgagtctgagcttgacgcaaaaattccttccacaggagatgcaactgaatggaggaacccacacctgagcatgcttggctcttgtcagcctgccccatcctgtcagaagtgcattctcagtcatccaagttgcgcctggtgcaaacagctgaacttcacagcttccggggaggcggaagcacgcagatgtgcacggagggaggagctcctcgccaggggctgtccccttgaagagcttgaggaacccaggggccagcaagaagtgctgcaagatcagcccctcagccagggtgcgaggggagagggcgctacccaactggccccacagagggtcagggtaactctccgaccgggtgagccccaacagctgcaagtgcgatttctgcgagcagaaggctacccggtagatttatattacctaatggatctgagttactctatgaaagacgatctggagcgcgttagacaactgggacacgccctgttggttcgactgcaggaagttacacacagtgtccggatcggcttcggctcatttgtagataaaacagtgctgccattcgtctccactgtcccaagcaagctgagacacccttgcccgacccgcctggaacgctgccagagcccttttagcttccaccatgttctctcattaactggagacgcacaagcgtttgaacgagaagtcggtcgacagagtgtaagcggcaacctggattcgccagaaggcggatttgacgctattctccaggccgctctgtgccaggaacagatcggatggcgcaacgtgtcgaggttgttggttttcacatccgacgataccttccacacagctggtgatggtaagttgggcggaattttcatgccaagtgatggccattgtcatctcgatagcaatggcctctactctcggtcgacggagtttgattacccctctgtaggccaggtggcacaggcactctctgcagctaatatccagccaattttcgcagttacatcagccgctctccccgtgtaccaggagcttagcaagttgatccccaagagcgccgtaggcgagctaagtgaagactcctccaatgtggtgcaattgattatggacgcatacaattccctgagctctacggtaaccctggaacacagttccttgccccctggcgtgcatatatcttacgagagccagtgtgagggcccagagaagcgagaaggcaaggccgaggaccgcggacaatgcaaccacgtccggattaatcagactgttacattttgggtgtccctgcaggccactcattgcctgcctgagcctcacctgctgaggctgcgcgctctgggattttcagaggaactgattgtcgaactccatacactgtgcgactgtaattgtagcgatactcagccccaggcccctcactgcagcgacggacagggacatctacagtgtggggtgtgctcctgcgccccaggtagactggggcgtctgtgcgaatgctctgttgccgagctctcaagtccggatctggagtccggatgcagagccccaaacggaacagggcctttgtgttctggaaaaggccactgtcagtgcgggagatgttcctgttctgggcagagctctggacacctctgcgagtgcgatgatgcatcctgcgagaggcatgagggcatcctttgtggaggatttggtcggtgtcagtgcggggtctgccattgtcacgcaaacagaactggcagggcctgcgagtgttccggggatatggacagttgtatctcccctgagggtggactgtgtagcggtcacggaagatgtaagtgcaatcgatgtcagtgcctggatggctactatggcgcactctgcgatcagtgcccaggctgcaaaactccttgcgaacgccaccgtgactgcgcggagtgtggagcgttccgcacaggccctctggccactaactgtagcacagcttgcgcccacactaacgtcacattggccttggccccaatattggacgatggctggtgcaaggaacgcacactggacaatcagctgttcttttttctggtggaggatgatgcaagaggtactgtggtcctgagggtgagaccccaagagaagggagcagatcatacacaggcgatcgttttggggtgtgtgggagggattgtggccgttggcttgggacttgtgctggcctacagactcagcgtggagatctatgataggcgggaatactctcgcttcgaaaaggaacagcagcagctcaactggaagcaggatagcaatccactgtacaagtccgctatcactactactattaatcccagattccaggaagccgatagtcctaccctctag

SEQ ID NO: 16797 - DNA, 2397 bp, Artificial Sequence
  derived and/or modified sequence
atggtggccctgcccatggtgctggtgctgctgctggtgctgagcagaggcgagagcgagctggacgccaagatccccagcaccggcgacgccaccgagtggagaaacccccacctgagcatgctgggcagctgccagcccgcccccagctgccagaagtgcatcctgagccaccccagctgcgcctggtgcaagcagctgaacttcaccgccagcggcgaggccgaggccagaagatgcgccagaagagaggagctgctggccagaggctgccccctggaggagctggaggagcccagaggccagcaggaggtgctgcaggaccagcccctgagccagggcgccagaggcgagggcgccacccagctggccccccagagagtgagagtgaccctgagacccggcgagccccagcagctgcaggtgagattcctgagagccgagggctaccccgtggacctgtactacctgatggacctgagctacagcatgaaggacgacctggagagagtgagacagctgggccacgccctgctggtgagactgcaggaggtgacccacagcgtgagaatcggcttcggcagcttcgtggacaagaccgtgctgcccttcgtgagcaccgtgcccagcaagctgagacacccctgccccaccagactggagagatgccagagccccttcagcttccaccacgtgctgagcctgaccggcgacgcccaggccttcgagagagaggtgggcagacagagcgtgagcggcaacctggacagccccgagggcggcttcgacgccatcctgcaggccgccctgtgccaggagcagatcggctggagaaacgtgagcagactgctggtgttcaccagcgacgacaccttccacaccgccggcgacggcaagctgggcggcatcttcatgcccagcgacggccactgccacctggacagcaacggcctgtacagcagaagcaccgagttcgactaccccagcgtgggccaggtggcccaggccctgagcgccgccaacatccagcccatcttcgccgtgaccagcgccgccctgcccgtgtaccaggagctgagcaagctgatccccaagagcgccgtgggcgagctgagcgaggacagcagcaacgtggtgcagctgatcatggacgcctacaacagcctgagcagcaccgtgaccctggagcacagcagcctgccccccggcgtgcacatcagctacgagagccagtgcgagggccccgagaagagagagggcaaggccgaggacagaggccagtgcaaccacgtgagaatcaaccagaccgtgaccttctgggtgagcctgcaggccacccactgcctgcccgagccccacctgctgagactgagagccctgggcttcagcgaggagctgatcgtggagctgcacaccctgtgcgactgcaactgcagcgacacccagccccaggccccccactgcagcgacggccagggccacctgcagtgcggcgtgtgcagctgcgcccccggcagactgggcagactgtgcgagtgcagcgtggccgagctgagcagccccgacctggagagcggctgcagagcccccaacggcaccggccccctgtgcagcggcaagggccactgccagtgcggcagatgcagctgcagcggccagagcagcggccacctgtgcgagtgcgacgacgccagctgcgagagacacgagggcatcctgtgcggcggcttcggcagatgccagtgcggcgtgtgccactgccacgccaacagaaccggcagagcctgcgagtgcagcggcgacatggacagctgcatcagccccgagggcggcctgtgcagcggccacggcagatgcaagtgcaacagatgccagtgcctggacggctactacggcgccctgtgcgaccagtgccccggctgcaagaccccctgcgagagacacagagactgcgccgagtgcggcgccttcagaaccggccccctggccaccaactgcagcaccgcctgcgcccacaccaacgtgaccctggccctggcccccatcctggacgacggctggtgcaaggagagaaccctggacaaccagctgttcttcttcctggtggaggacgacgccagaggcaccgtggtgctgagagtgagaccccaggagaagggcgccgaccacacccaggccatcgtgctgggctgcgtgggcggcatcgtggccgtgggcctgggcctggtgctggcctacagactgagcgtggagatctacgacagaagagagtacagcagattcgagaaggagcagcagcagctgaactggaagcaggacagcaaccccctgtacaagagcgccatcaccaccaccatcaaccccagattccaggaggccgacagccccaccctgtag

SEQ ID NO: 16798 - DNA, 1953 bp, Artificial Sequence
  derived and/or modified sequence
atggtggccctgcccatggtgctggtgctgctgctggtgctgagcagaggcgagagcgagctggacgccaagatccccagcaccggcgacgccaccgagtggagaaacccccacctgagcatgctgggcagctgccagcccgcccccagctgccagaagtgcatcctgagccaccccagctgcgcctggtgcaagcagctgaacttcaccgccagcggcgaggccgaggccagaagatgcgccagaagagaggagctgctggccagaggctgccccctggaggagctggaggagcccagaggccagcaggaggtgctgcaggaccagcccctgagccagggcgccagaggcgagggcgccacccagctggccccccagagagtgagagtgaccctgagacccggcgagccccagcagctgcaggtgagattcctgagagccgagggctaccccgtggacctgtactacctgatggacctgagctacagcatgaaggacgacctggagagagtgagacagctgggccacgccctgctggtgagactgcaggaggtgacccacagcgtgagaatcggcttcggcagcttcgtggacaagaccgtgctgcccttcgtgagcaccgtgcccagcaagctgagacacccctgccccaccagactggagagatgccagagccccttcagcttccaccacgtgctgagcctgaccggcgacgcccaggccttcgagagagaggtgggcagacagagcgtgagcggcaacctggacagccccgagggcggcttcgacgccatcctgcaggccgccctgtgccaggagcagatcggctggagaaacgtgagcagactgctggtgttcaccagcgacgacaccttccacaccgccggcgacggcaagctgggcggcatcttcatgcccagcgacggccactgccacctggacagcaacggcctgtacagcagaagcaccgagttcgactaccccagcgtgggccaggtggcccaggccctgagcgccgccaacatccagcccatcttcgccgtgaccagcgccgccctgcccgtgtaccaggagctgagcaagctgatccccaagagcgccgtgggcgagctgagcgaggacagcagcaacgtggtgcagctgatcatggacgcctacaacagcctgagcagcaccgtgaccctggagcacagcagcctgccccccggcgtgcacatcagctacgagagccagtgcgagggccccgagaagagagagggcaaggccgaggacagaggccagtgcaaccacgtgagaatcaaccagaccgtgaccttctgggtgagcctgcaggccacccactgcctgcccgagccccacctgctgagactgagagccctgggcttcagcgaggagctgatcgtggagctgcacaccctgtgcgactgcaactgcagcgacacccagccccaggccccccactgcagcgacggccagggccacctgcagtgcggcgtgtgcagagactgcgccgagtgcggcgccttcagaaccggccccctggccaccaactgcagcaccgcctgcgcccacaccaacgtgaccctggccctggcccccatcctggacgacggctggtgcaaggagagaaccctggacaaccagctgttcttcttcctggtggaggacgacgccagaggcaccgtggtgctgagagtgagaccccaggagaagggcgccgaccacacccaggccatcgtgctgggctgcgtgggcggcatcgtggccgtgggcctgggcctggtgctggcctacagactgagcgtggagatctacgacagaagagagtacagcagattcgagaaggagcagcagcagctgaactggaagcaggacagcaaccccctgtacaagagcgccatcaccaccaccatcaaccccagattccaggaggccgacagccccaccctgtag

SEQ ID NO: 16799 - protein, 638 aa, Artificial Sequence
  derived and/or modified sequence
MILFKQATYFISLFATVSCGCLTQLYENAFFRGGDVASMYTPNAQYCQMRCTFHPRCLLFSFLPASSINDMEKRFGCFLKDSVTGTLPKVHRTGAVSGHSLKQCGHQISACHRDIYKGVDMRGVNFNVSKVSSVEECQKRCTSNIRCQFFSYATQTFHKAEYRNNCLLKYSPGGTPTAIKVLSNVESGFSLKPCALSEIGCHMNIFQHLAFSDVDVARVLTPDAFVCRTICTYHPNCLFFTFYTNVWKIESQRNVCLLKTSESGTPSSSTPQENTISGYSLLTCKRTLPEPCHSKIYPGVDFGGEELNVTFVKGVNVCQETCTKMIRCQFFTYSLLPEDCKEEKCKCFLRLSMDGSPTRIAYGTQGSSGYSLRLCNTGDNSVCTTKTSTRIVGGTNSSWGEWPWQVSLQVKLTAQRHLCGGSLIGHQWVLTAAHCFDGLPLQDVWRIYSGILNLSDITKDTPFSQIKEIIIHQNYKVSEGNHDIALIKLQAPLNYTEFQKPICLPSKGDTSTIYTNCWVTGWGFSKEKGEIQNILQKVNIPLVTNEECQKRYQDYKITQRMVCAGYKEGGKDACKGDSGGPLVCKHNGMWRLVGITSWGEGCARREQPGVYTKVAEYMDWILEKTQSSDGKAQMQSPA

SEQ ID NO: 16800 - protein, 148 aa, Artificial Sequence
  derived and/or modified sequence
MILFKQATYFISLFATVSCGCLTQLYENAFFRGGDVASMYTPNAQYCQMRCTFHPRCLLFSFLPASSINDMEKRFGCFLKDSVTGTLPKVHRTGAVSGHSLKQCGHQISACHRDIYKGVDMRGVNFNVSKVSSVEECQKRCTSNIRCQ

SEQ ID NO: 16801 - DNA, 1917 bp, Artificial Sequence
  derived and/or modified sequence
atgattctgtttaaacaagccacttactttatatcattgttcgctactgtctcctgcgggtgcctgacgcaattgtacgagaacgcctttttcagggggggggatgtggcgtctatgtatacgcctaatgcccagtactgtcagatgagatgcacgtttcaccctaggtgtctccttttttctttcttacctgcttcaagtatcaacgacatggagaagcgcttcggatgttttcttaaggatagcgtaacagggacccttccaaaggtgcatcgaaccggtgccgtgtcaggccattccctcaagcaatgcggccaccaaatttcagcctgtcacagggatatatataagggagtcgacatgcgcggcgtgaattttaacgtgtctaaggtgagctctgttgaagaatgccagaaacgctgcacctccaacatcagatgccagttttttagctacgccacacagacattccacaaggcagaataccggaataattgtctcttgaaatattcaccaggggggactcccactgccattaaggtcttgagtaacgtcgagtcagggttttcccttaaaccatgtgccctgtctgagataggatgtcatatgaacatctttcagcaccttgccttctcagacgtcgatgttgccagagtgcttacacccgatgccttcgtgtgccgcacaatttgtacttaccaccctaattgtctgttcttcacattctataccaatgtctggaaaatagagtcccagagaaatgtgtgcctgctaaaaacaagtgagtctggcacaccatcttccagtacccctcaagagaatacgataagtggctactcactcttaacttgtaagcggactctgccagagccctgccacagtaaaatctaccccggagtggacttcggtggggaggaacttaatgtcacattcgtcaagggagtcaacgtgtgtcaggaaacctgcacaaagatgattcggtgccaatttttcacctattccctgttacctgaagactgtaaggaggaaaagtgtaagtgttttttgcgcctctctatggacggctcacccacccgtattgcctacgggacgcaagggagctcagggtactctctgcgcctgtgcaacacaggggataatagcgtgtgtacaactaaaacttctactcggatcgtcggcggcacgaactcttcatggggcgagtggccatggcaggtttccctgcaggtgaagttgacggctcagagacatttgtgcggaggatctttgattggacatcagtgggtgctcactgctgcgcattgttttgatggattgccccttcaggatgtgtggcgaatttactcaggcatactgaacctctccgatattacgaaagatactccgttttcacagattaaggagattatcatccaccaaaattacaaagtgtccgagggcaaccacgacattgctctaattaagctgcaggccccgctgaactacacagaatttcagaaacccatctgcctcccaagcaagggtgacacctctactatttataccaattgttgggtgacaggctggggcttttccaaagagaagggggagatacagaatatcctgcaaaaagttaacatcccactcgttactaacgaggagtgccagaaaaggtatcaggactacaagattacccagaggatggtctgcgcgggctataaagagggtgggaaagacgcgtgtaaaggtgattccggcggtccactggtctgcaaacacaacggcatgtggcggctggtcggaatcaccagttggggcgagggctgcgccagaagggagcagcctggcgtgtacaccaaagtggcagaatacatggactggatcttggagaagacccagtcctcagatggaaaagcccagatgcagtccccggcctag

SEQ ID NO: 16802 - DNA, 447 bp, Artificial Sequence
  derived and/or modified sequence
atgatattgtttaaacaagctacatactttatctccttatttgcaactgtgagctgcgggtgccttacacagctgtatgaaaacgcattctttcgaggaggtgatgtggcttctatgtacacccctaatgctcaatactgtcagatgcgctgcacttttcacccacgctgtctgcttttttcctttctgcctgcctcatctatcaatgacatggagaagaggttcggctgctttcttaaggacagcgtgaccggaactctgcctaaagttcaccgcactggcgccgtttctgggcacagtctcaagcaatgtgggcaccagattagcgcctgccacagagacatctataaaggagtagacatgagaggagtgaacttcaacgtcagcaaagtgtctagtgtcgaagaatgccagaagaggtgtacgtccaatattaggtgtcagtag

SEQ ID NO: 16803 - DNA, 2363 bp, Artificial Sequence
  derived and/or modified sequence
ctgaacacggataggatgttcatggaatatgttgacaggacaaaaagttgaaactgttggcagaaacccaaagtcaatattgaagccaagcaaaatattgcctgcagtgccacattagaacagcttgaagaccgttcatttttaagtgacaagagactcacctccaagaagcaattgtgttttcagaatgattttattcaagcaagcaacttatttcatttccttgtttgctacagtttcctgtggatgtctgactcaactctatgaaaacgccttcttcagaggtggggatgtagcttccatgtacaccccaaatgcccaatactgccagatgaggtgcacattccacccaaggtgtttgctattcagttttcttccagcaagttcaatcaatgacatggagaaaaggtttggttgcttcttgaaagatagtgttacaggaaccctgccaaaagtacatcgaacaggtgcagtttctggacattccttgaagcaatgtggtcatcaaataagtgcttgccatcgagacatttataaaggagttgatatgagaggagtcaattttaatgtgtctaaggttagcagtgttgaagaatgccaaaaaaggtgcaccagtaacattcgctgccagtttttttcatatgccacgcaaacatttcacaaggcagagtaccggaacaattgcctattaaagtacagtcccggaggaacacctaccgctataaaggtgctgagtaacgtggaatctggattctcactgaagccctgtgccctttcagaaattggttgccacatgaacatcttccagcatcttgcgttctcagatgtggatgttgccagggttctcactccagatgcttttgtgtgtcggaccatctgcacctatcaccccaactgcctcttctttacattctatacaaatgtatggaaaatcgagtcacaaagaaatgtttgtcttcttaaaacatctgaaagtggcacaccaagttcctctactcctcaagaaaacaccatatctggatatagccttttaacctgcaaaagaactttacctgaaccctgccattctaaaatttacccgggagttgactttggaggagaagaattgaatgtgacttttgttaaaggagtgaatgtttgccaagagacttgcacaaagatgattcgctgtcagtttttcacttattctttactcccagaagactgtaaggaagagaagtgtaagtgtttcttaagattatctatggatggttctccaactaggattgcgtatgggacacaagggagctctggttactctttgagattgtgtaacactggggacaactctgtctgcacaacaaaaacaagcacacgcattgttggaggaacaaactcttcttggggagagtggccctggcaggtgagcctgcaggtgaagctgacagctcagaggcacctgtgtggagggtcactcataggacaccagtgggtcctcactgctgcccactgctttgatgggcttcccctgcaggatgtttggcgcatctatagtggcattttaaatctgtcagacattacaaaagatacacctttctcacaaataaaagagattattattcaccaaaactataaagtctcagaagggaatcatgatatcgccttgataaaactccaggctcctttgaattacactgaattccaaaaaccaatatgcctaccttccaaaggtgacacaagcacaatttataccaactgttgggtaaccggatggggcttctcgaaggagaaaggtgaaatccaaaatattctacaaaaggtaaatattcctttggtaacaaatgaagaatgccagaaaagatatcaagattataaaataacccaacggatggtctgtgctggctataaagaagggggaaaagatgcttgtaagggagattcaggtggtcccttagtttgcaaacacaatggaatgtggcgtttggtgggcatcaccagctggggtgaaggctgtgcccgcagggagcaacctggtgtctacaccaaagtcgctgagtacatggactggattttagagaaaacacagagcagtgatggaaaagctcagatgcagtcaccagcatgagaagcagtccagagtctaggcaatttttacaacctgagttcaagtcaaattctgagcctggggggtcctcatctgcaaagcatggagagtggcatcttctttgcatcctaaggacgaaaaacacagtgcactcagagctgctgaggacaatgtctggctgaagcccgctttcagcacgccgtaaccaggggctgacaatgcgaggtcgcaactgagatctccatgactgtgtgttgtgaaataaaatggtgaaagatca

SEQ ID NO: 16804 - DNA, 645 bp, Artificial Sequence
  derived and/or modified sequence
tggtgggctgtctgttggggtctatgcacaggatttctgctggagttctaaggacaaaaagttgaaactgttggcagaaacccaaagtcaatattgaagccaagcaaaatattgcctgcagtgccacattagaacagcttgaagaccgttcatttttaagtgacaagagactcacctccaagaagcaattgtgttttcagaatgattttattcaagcaagcaacttatttcatttccttgtttgctacagtttcctgtggatgtctgactcaactctatgaaaacgccttcttcagaggtggggatgtagcttccatgtacaccccaaatgcccaatactgccagatgaggtgcacattccacccaaggtgtttgctattcagttttcttccagcaagttcaatcaatgacatggagaaaaggtttggttgcttcttgaaagatagtgttacaggaaccctgccaaaagtacatcgaacaggtgcagtttctggacattccttgaagcaatgtggtcatcaaataagtgcttgccatcgagacatttataaaggagttgatatgagaggagtcaattttaatgtgtctaaggttagcagtgttgaagaatgccaaaaaaggtgcaccagtaacattcgctgccag

SEQ ID NO: 16805 - DNA, 1917 bp, Artificial Sequence
  derived and/or modified sequence
atgatcctcttcaagcaggccacctacttcatcagcctgtttgccaccgtgtcctgtggctgcctgacccagctgtatgaaaatgccttcttcagaggaggagatgtggcctccatgtacaccccaaatgcccagtactgccagatgcgctgcaccttccacccccgctgcctgctcttctccttcctgcctgccagcagcatcaatgacatggagaagagatttggctgcttcctgaaggacagcgtgacaggcaccctgcccaaggtgcacaggactggagctgtgtctggccacagcctgaagcagtgtggccaccagatcagcgcctgccaccgggacatctacaagggcgtggacatgagaggagtgaacttcaacgtgtccaaggtgtcctctgtggaggagtgccagaagcgctgcaccagcaacatccgctgccagttcttctcctatgccacccagaccttccacaaggccgagtacagaaacaactgcctgctgaagtacagccctgggggcacccccacagccatcaaggtgctgagcaatgtggagagcggcttcagcctgaagccctgtgccctgtctgaaattggctgccacatgaacatcttccagcacctggccttcagtgatgtggatgtggcccgggtgctgaccccagatgcctttgtgtgcaggaccatctgcacctaccaccccaactgcctcttcttcaccttctacaccaacgtgtggaagattgagagccagagaaatgtgtgcctgctgaagaccagcgagagcggcacccccagcagcagcaccccccaggagaacaccatcagcggctacagcctgctgacctgcaagaggaccctgcctgagccctgccacagcaagatctacccaggagtggactttggaggagaggagctgaatgtgacctttgtgaagggcgtgaatgtgtgccaggagacctgcaccaagatgatccgctgccagttcttcacctacagcctgctgcctgaggactgcaaggaggagaagtgcaagtgcttcctgcggctgtccatggatggcagccccacccgcatcgcctacggcacccagggcagcagcggctacagcctgcggctgtgcaacacaggagacaacagcgtgtgcaccaccaagaccagcaccagaattgtgggcggcaccaacagctcctggggcgagtggccctggcaggtgtccctgcaggtgaagctgacagcccagaggcacctgtgtggcggcagcctcatcggccaccagtgggtgctgacagctgcccactgctttgatggcctgcccctgcaggatgtgtggaggatctacagcggcatcctgaacctgagtgacatcaccaaggacacccccttcagccagatcaaggagatcatcatccaccagaactacaaggtgtctgagggcaaccacgacatcgccctgatcaagctgcaggcccccctgaactacacagagttccagaagcccatctgcctgcccagcaaaggagacaccagcaccatctacaccaactgctgggtgacaggctggggcttcagcaaggagaagggggagatccagaacatcctgcagaaggtgaacatccccctggtgaccaatgaggagtgccagaagcgctaccaggactacaagatcacccagaggatggtgtgtgccggctacaaggagggcggcaaggatgcctgcaagggggacagcggcggccccctggtgtgcaagcacaacggcatgtggaggctggtgggcatcacctcctggggcgagggctgtgcccggcgggagcagcccggggtgtacaccaaggtggccgagtacatggactggatcctggagaagacccagagcagtgatggcaaggcccagatgcagagccctgcctag

SEQ ID NO: 16806 - DNA, 447 bp, Artificial Sequence
  derived and/or modified sequence
atgatcctcttcaagcaggccacctacttcatcagcctgtttgccaccgtgtcctgtggctgcctgacccagctgtatgaaaatgccttcttcagaggaggagatgtggcctccatgtacaccccaaatgcccagtactgccagatgcgctgcaccttccacccccgctgcctgctcttctccttcctgcctgccagcagcatcaatgacatggagaagagatttggctgcttcctgaaggacagcgtgacaggcaccctgcccaaggtgcacaggactggagctgtgtctggccacagcctgaagcagtgtggccaccagatcagcgcctgccaccgggacatctacaagggcgtggacatgagaggagtgaacttcaacgtgtccaaggtgtcctctgtggaggagtgccagaagcgctgcaccagcaacatccgctgccagtag

SEQ ID NO: 16807 - DNA, 1917 bp, Artificial Sequence
  derived and/or modified sequence
atgatcctgttcaagcaggccacctacttcatcagcctgttcgccactgtttcttgcggctgtctgacacagctctatgagaacgctttcttcagagggggagatgttgcaagcatgtatacccctaacgctcaatactgtcagatgcggtgcacattccacccaaggtgcctgctattcagctttctacctgccagcagcatcaatgatatggagaaaagattcggttgttttttaaaggacagtgtgacaggcacgctacctaaagtgcacaggaccggcgccgtctcgggccactccctcaagcagtgtggtcaccagatctccgcctgccatcgcgacatatacaagggagttgacatgcgtggggtgaattttaatgtgagcaaggtatccagcgtcgaggagtgtcagaaacgttgtactagcaatatcaggtgccagtttttttcctacgctacacagacattccacaaggctgagtaccgcaataactgcctactcaaatattccccggggggaaccccaacagccatcaaggtgctgagtaatgttgagagcggctttagcctgaagccatgtgctctttccgagataggctgccatatgaatattttccaacatctcgcattctccgatgtcgatgtcgccagggtgctgacccccgacgcgtttgtgtgccgaaccatctgtacctaccatccaaactgcctcttcttcacattctacactaatgtgtggaagattgagtcacagagaaacgtgtgtttactgaagacatctgagtctgggaccccctcttcaagtaccccgcaggagaacacaatctccggttatagcctcctcacatgtaagaggaccttgccggagccttgtcactctaagatttatcccggtgtggatttcggaggcgaggagctgaatgtgacattcgtaaaaggcgtgaatgtctgccaggagacttgtaccaaaatgattaggtgtcagttttttacttatagtctgctgcccgaagactgcaaggaagagaagtgcaagtgcttcctgcggctgtctatggacggctctcccacccgaatcgcctacggaacacagggatcctccgggtactccttaagactctgtaatactggagataatagcgtgtgtacaacaaaaacatctacacgtatcgtcggaggtacaaactcctcttggggcgaatggccttggcaggtaagtctccaggtaaaactcactgcacagaggcacctgtgtggaggaagcctcatagggcaccaatgggttctgactgctgctcattgtttcgacgggttgccgcttcaggatgtgtggagaatttactctggcatcttgaacctatctgacatcacaaaagacacacccttttctcagatcaaagaaatcataatacatcagaattacaaagtatctgagggaaatcacgacattgctttgattaaactccaggccccactcaactacaccgaatttcagaaacccatatgtctgccttccaaaggggatacatccaccatatacactaactgctgggtgactgggtggggattttcgaaggaaaagggagagatccagaatattctgcaaaaggtcaacattcctttagtgacgaatgaggagtgccaaaaaagataccaggattacaaaatcacacagcggatggtatgtgctggttacaaagaggggggcaaagatgcatgtaaaggcgattctggtgggcccttggtttgtaaacataatggcatgtggcgactcgtgggaatcacgagctggggggagggctgtgcgcgtcgcgagcaaccaggagtttacacaaaagtggcagagtatatggactggattctggaaaaaacccaatcttccgacgggaaggcccaaatgcagtcgcccgcttag

SEQ ID NO: 16808 - DNA, 447 bp, Artificial Sequence
  derived and/or modified sequence
atgatcctgttcaagcaggccacctacttcatcagcctgttcgccactgtatcatgcgggtgcttaactcagctgtatgaaaacgccttttttagaggaggagacgtggcaagcatgtacacccctaacgcccagtactgtcagatgagatgcactttccacccccgatgcctgcttttctcttttctcccagccagttccatcaatgacatggagaagaggtttgggtgtttccttaaagattcggtcactggtacattaccgaaagttcaccgtaccggtgccgtttccgggcatagcctgaagcagtgcgggcaccagataagtgcgtgccatagagatatttacaagggagtcgacatgcggggagttaacttcaatgtgtcaaaggtgtcctctgtcgaagaatgtcagaagcggtgtacatcaaacatcaggtgccaatag

SEQ ID NO: 16809 - DNA, 1917 bp, Artificial Sequence
  derived and/or modified sequence
atgatcctattcaaacaggccacctactttatttcactgttcgccaccgttagctgtggctgcctaacccagttatacgaaaacgctttcttccgcggtggtgatgtggcctctatgtacacccccaatgcacagtattgccaaatgcgctgtacatttcatccaaggtgcctgttgttttcttttctgccggctagcagtatcaacgatatggaaaagcgctttggatgctttctgaaggacagcgtgacaggcacccttcccaaagtgcacagaacgggggctgtgtctggacactctctgaaacagtgcgggcaccagatctccgcctgtcaccgggatatctataaaggtgtcgacatgcgtggcgttaattttaacgtttctaaagtttcctctgtggaggaatgccagaaacggtgtactagcaacatacggtgtcaatttttttcatacgccacgcaaacgttccataaagcagagtaccgtaacaactgtctgctgaagtactctccaggcggaacaccaaccgctattaaagtattgtctaacgtcgagagcggcttctccctgaagccatgcgccttgtcagagatcgggtgccacatgaatatatttcagcatttagcattttctgacgtggacgtcgctagagtactcacaccagatgcctttgtgtgtcgaactatctgcacttatcacccaaattgtctgtttttcaccttttataccaatgtttggaaaatagaaagccagcgcaatgtttgtctgcttaagactagcgagtctggcactccatcatctagcactccccaagagaacacaatcagcggctatagcctcctgacctgtaagaggacactgcccgaaccatgccattccaaaatctatcctggtgtagacttcgggggagaagaactgaatgtaacgttcgtcaagggagtcaacgtctgtcaggagacctgtacgaagatgatcagatgtcaattcttcacgtacagcctacttcctgaagattgcaaagaggagaagtgtaagtgcttcctgcggctgtccatggatgggtcacctacaagaattgcttatggaacccaagggtcctccggctactctctgcgactgtgcaatacaggcgataatagcgtatgcaccaccaaaacctccactcgtatagtggggggaactaattcttcctggggggagtggccctggcaggttagcctacaggtgaaattaacagcacagaggcatttatgcggaggtagcctcattggacaccagtgggtgctgacagccgctcactgttttgatgggcttcccctgcaggacgtttggaggatctattcagggatcctgaatctctctgacataacaaaggacaccccattctcccaaattaaggagatcattatacaccagaactacaaagtgagcgagggcaaccacgacattgccttaattaaactgcaggcccctctgaactatactgagttccagaagcctatttgcctcccatctaagggagacacaagcaccatttacaccaattgctgggtgacaggctggggattctccaaagagaaaggggagatccagaatatcttacagaaagtgaatatccccctggttacgaacgaggagtgccaaaagcgctaccaggattataagatcacccaacgtatggtttgcgccggatacaaagaaggcggaaaggatgcttgtaagggggatagcgggggaccgcttgtttgcaaacacaacgggatgtggagactcgtgggcattacttcctggggcgagggatgtgcacgccgtgaacagcctggcgtctacacaaaggtggccgagtatatggactggattttggagaaaactcagagcagcgatggaaaagcccagatgcagtctcccgcttag

SEQ ID NO: 16810 - DNA, 447 bp, Artificial Sequence
  derived and/or modified sequence
atgattctcttcaagcaggcaacatattttatctcactctttgccaccgtaagctgcggctgcctgactcagctgtacgagaatgcctttttcaggggcggagacgtcgctagcatgtatacgcccaacgctcagtattgccagatgagatgcacatttcaccccagatgcctcttgttttcctttttaccggcaagtagcattaacgacatggagaagcgcttcggctgtttcctgaaggacagcgtgacagggacgctgcccaaggtgcataggacaggggctgtctctggccattcactgaaacagtgtggccatcaaatctccgcatgccacagagatatctacaaaggggtggacatgaggggcgtgaattttaatgtctcaaaggtgtcatcggtagaagagtgccagaaacgctgtacatctaacatccgctgtcagtag

SEQ ID NO: 16811 - DNA, 1917 bp, Artificial Sequence
  derived and/or modified sequence
atgatcctgttcaagcaggccacctacttcatcagcctgttcgccaccgtgagctgcggctgcctgacccagctgtacgagaacgccttcttcagaggcggcgacgtggccagcatgtacacccccaacgcccagtactgccagatgagatgcaccttccaccccagatgcctgctgttcagcttcctgcccgccagcagcatcaacgacatggagaagagattcggctgcttcctgaaggacagcgtgaccggcaccctgcccaaggtgcacagaaccggcgccgtgagcggccacagcctgaagcagtgcggccaccagatcagcgcctgccacagagacatctacaagggcgtggacatgagaggcgtgaacttcaacgtgagcaaggtgagcagcgtggaggagtgccagaagagatgcaccagcaacatcagatgccagttcttcagctacgccacccagaccttccacaaggccgagtacagaaacaactgcctgctgaagtacagccccggcggcacccccaccgccatcaaggtgctgagcaacgtggagagcggcttcagcctgaagccctgcgccctgagcgagatcggctgccacatgaacatcttccagcacctggccttcagcgacgtggacgtggccagagtgctgacccccgacgccttcgtgtgcagaaccatctgcacctaccaccccaactgcctgttcttcaccttctacaccaacgtgtggaagatcgagagccagagaaacgtgtgcctgctgaagaccagcgagagcggcacccccagcagcagcaccccccaggagaacaccatcagcggctacagcctgctgacctgcaagagaaccctgcccgagccctgccacagcaagatctaccccggcgtggacttcggcggcgaggagctgaacgtgaccttcgtgaagggcgtgaacgtgtgccaggagacctgcaccaagatgatcagatgccagttcttcacctacagcctgctgcccgaggactgcaaggaggagaagtgcaagtgcttcctgagactgagcatggacggcagccccaccagaatcgcctacggcacccagggcagcagcggctacagcctgagactgtgcaacaccggcgacaacagcgtgtgcaccaccaagaccagcaccagaatcgtgggcggcaccaacagcagctggggcgagtggccctggcaggtgagcctgcaggtgaagctgaccgcccagagacacctgtgcggcggcagcctgatcggccaccagtgggtgctgaccgccgcccactgcttcgacggcctgcccctgcaggacgtgtggagaatctacagcggcatcctgaacctgagcgacatcaccaaggacacccccttcagccagatcaaggagatcatcatccaccagaactacaaggtgagcgagggcaaccacgacatcgccctgatcaagctgcaggcccccctgaactacaccgagttccagaagcccatctgcctgcccagcaagggcgacaccagcaccatctacaccaactgctgggtgaccggctggggcttcagcaaggagaagggcgagatccagaacatcctgcagaaggtgaacatccccctggtgaccaacgaggagtgccagaagagataccaggactacaagatcacccagagaatggtgtgcgccggctacaaggagggcggcaaggacgcctgcaagggcgacagcggcggccccctggtgtgcaagcacaacggcatgtggagactggtgggcatcaccagctggggcgagggctgcgccagaagagagcagcccggcgtgtacaccaaggtggccgagtacatggactggatcctggagaagacccagagcagcgacggcaaggcccagatgcagagccccgcctag

SEQ ID NO: 16812 - DNA, 447 bp, Artificial Sequence
  derived and/or modified sequence
atgatcctgttcaagcaggccacctacttcatcagcctgttcgccaccgtgagctgcggctgcctgacccagctgtacgagaacgccttcttcagaggcggcgacgtggccagcatgtacacccccaacgcccagtactgccagatgagatgcaccttccaccccagatgcctgctgttcagcttcctgcccgccagcagcatcaacgacatggagaagagattcggctgcttcctgaaggacagcgtgaccggcaccctgcccaaggtgcacagaaccggcgccgtgagcggccacagcctgaagcagtgcggccaccagatcagcgcctgccacagagacatctacaagggcgtggacatgagaggcgtgaacttcaacgtgagcaaggtgagcagcgtggaggagtgccagaagagatgcaccagcaacatcagatgccagtag

SEQ ID NO: 16813 - protein, 427 aa, Artificial Sequence
  derived and/or modified sequence
MKLITILFLCSRLLLSLTQESQSEEIDCNDKDLFKAVDAALKKYNSQNQSNNQFVLYRITEATKTVGSDTFYSFKYEIKEGDCPVQSGKTWQDCEYKDAAKAATGECTATVGKRSSTKFSVATQTCQITPAEGPVVTAQYDCLGCVHPISTQSPDLEPILRHGIQYFNNNTQHSSLFMLNEVKRAQRQVVAGLNFRITYSIVQTNCSKENFLFLTPDCKSLWNGDTGECTDNAYIDIQLRIASFSQNCDIYPGKDFVQPPTKICVGCPRDIPTNSPELEETLTHTITKLNAENNATFYFKIDNVKKARVQVVAGKKYFIDFVARETTCSKESNEELTESCETKKLGQSLDCNAEVYVVPWEKKIYPTVNCQPLGMISLMKRPPGFSPFRSSRIGEIKEETTSHLRSCEYKGRPPKAGAEPASEREVS

SEQ ID NO: 16814 - protein, 415 aa, Artificial Sequence [sequence omitted]

SEQ ID NO: 16815 - DNA, 1284 bp, Artificial Sequence
  derived and/or modified sequence
atgaaactgatcacaatactgtttttatgttctcgtttattgctgagtcttacccaggagtctcaatcggaagagatcgactgcaacgataaagatctgtttaaagcagtggatgctgccctgaaaaagtacaattctcagaatcagagcaacaatcagtttgtactgtatagaatcactgaggcaaccaaaactgtaggctccgatacgttttactcttttaaatatgagataaaagagggcgattgcccagtgcagagcggaaaaacttggcaagactgcgagtacaaagatgcagcaaaagcagcgacaggtgagtgcaccgctaccgtgggaaagcgtagtagtacaaagttcagcgtggcaacccagacatgccagatcactccagctgaaggccccgtggtgactgcccagtatgattgccttgggtgtgttcaccccatctcaacccagtccccagatctggaacctatactccgccacgggatccagtatttcaacaataatacacagcacagctctttgtttatgctgaacgaagttaagagggcacagcgacaggttgtagcggggctcaatttccggatcacatactctatcgtgcagacaaattgtagcaaagagaatttcctgtttctgaccccagactgcaagagtctgtggaacggtgataccggcgagtgtactgacaatgcctacatcgacatccaactgcgcatagcttccttcagccagaattgcgacatttatcctggcaaggacttcgtgcaacccccaaccaaaatctgcgtagggtgtcctcgggacatccccacaaattctccagagctggaggagactctgactcataccatcacaaaactgaacgccgaaaataatgctaccttctacttcaagattgataatgtgaaaaaggctagggttcaggtcgtggcaggcaagaaatacttcatcgactttgttgcgcgggaaacaacttgctccaaagagagcaatgaggagttgacagaatcctgtgaaacgaagaagctgggccagtccctggattgcaatgccgaggtgtatgtggttccatgggagaaaaagatctacccaaccgtcaactgccagcctctgggaatgatctctttaatgaaacgtccccccggcttctcccccttccgctcatctcgcataggtgagatcaaagaagagaccacttcacatctgcgtagctgtgagtataagggcagaccaccaaaagcaggcgctgagcccgcttccgagagagaggtctcatag

SEQ ID NO: 16816 - DNA, 1248 bp, Artificial Sequence
  derived and/or modified sequence
atgaagttatccctgactcaggagtctcagtctgaagagatagactgcaacgacaaggatctatttaaagcagttgacgctgccctcaaaaagtataactcacagaaccaatccaacaatcagttcgtgctttaccgcataaccgaagccacgaagacagtgggcagcgataccttctattcttttaagtatgaaatcaaagagggagactgtcccgtccagtcaggcaaaacatggcaggattgtgaatacaaagacgctgcaaaagccgcaaccggcgaatgtaccgccactgtgggcaagcgctcatccactaaatttagtgtagctacacaaacatgtcagataacacccgccgaaggtcccgtggtcaccgctcagtacgactgccttggctgtgtgcacccaatctcaacccaatcacctgacctcgaacctatactccgacacggcatacagtattttaacaataatacacagcatagtagtctgtttatgctcaatgaagtaaaaagggcccagaggcaggtggtggctggcttaaacttccgtattacttactctatcgtacagaccaactgttccaaagagaattttctattcctcacgccggattgtaaatctttgtggaatggagacacaggagaatgtacagacaacgcgtacatcgatatccaattaagaatagcctcatttagtcaaaattgcgatatctacccggggaaggacttcgtgcagcctcccacaaagatctgcgtgggctgcccccgtgatataccaactaacagtccagagcttgaggagacactgacacacactatcaccaaactaaacgccgagaacaacgctactttctacttcaagatcgataatgtcaaaaaagcccgagtgcaagtggtcgctgggaaaaagtatttcattgactttgtggcccgggaaaccacatgttccaaggaaagcaacgaagaactcaccgagtcctgcgagaccaagaaacttggacagtcattagactgcaatgctgaggtgtacgttgtcccctgggagaagaagatttatcctactgtgaactgccagcccctcggcatgatatcactcatgaagcgacccccgggcttcagtcccttcaggagctcccggatcggagaaattaaggaggaaacaactagtcacctcagatcctgcgagtataaggggcgtccaccgaaagctggcgcagagcccgcgtccgaacgtgaagtatcctag

SEQ ID NO: 16817 - DNA, 1720 bp, Artificial Sequence
  derived and/or modified sequence
ttttcaaatgcaaatgagcaggttaacaaccccagtgttgcaatgttctagctgtaaatatgtttggataacccagcagagccatttaacctttgggaacaaggcaactagcgtctggcagcaggaatccaaccagtgccctgagttctgaggcagagaggaggacagaagaaacaagaggctggagattgtcaaattcagtatcccagttggctcttgattcttggtgaaaccatccctcagctcctagagggagattgttagatcatgaaactaattaccatccttttcctctgctccaggctgctactaagtttaacccaggaatcacagtccgaggaaattgactgcaatgacaaggatttatttaaagctgtggatgctgctctgaagaaatataacagtcaaaaccaaagtaacaaccagtttgtattgtaccgcataactgaagccactaagacggttggctctgacacgttttattccttcaagtacgaaatcaaggagggggattgtcctgttcaaagtggcaaaacctggcaggactgtgagtacaaggatgctgcaaaagcagccactggagaatgcacggcaaccgtggggaagaggagcagtacgaaattctccgtggctacccagacctgccagattactccagccgagggccctgtggtgacagcccagtacgactgcctcggctgtgtgcatcctatatcaacgcagagcccagacctggagcccattctgagacacggcattcagtactttaacaacaacactcaacattcctccctcttcatgcttaatgaagtaaaacgggcccaaagacaggtggtggctggattgaactttcgaattacctactcaattgtgcaaacgaattgttccaaagagaattttctgttcttaactccagactgcaagtccctttggaatggtgataccggtgaatgtacagataatgcatacatcgatattcagctacgaattgcttccttctcacagaactgtgacatttatccagggaaggattttgtacaaccacctaccaagatttgcgtgggctgccccagagatatacccaccaacagcccagagctggaggagacactgactcacaccatcacaaagcttaatgcagagaataacgcaactttctatttcaagattgacaatgtgaaaaaagcaagagtacaggtggtggctggcaagaaatattttattgacttcgtggccagggaaaccacatgttccaaggaaagtaatgaagagttgaccgaaagctgtgagaccaaaaaacttggccaaagcctagattgcaacgctgaagtttatgtggtaccctgggagaaaaaaatttaccctactgtcaactgtcaaccactgggaatgatctcactgatgaaaaggcctccaggtttttcacctttccgatcatcacgaataggggaaataaaagaagaaacaactagtcacctaaggtcctgcgagtacaagggtcgacccccaaaggcaggggcagagccagcatctgagagggaggtctcttgaccaatgggcagaatcttcactccaggcacatagccccaaccacctctgccagcaaccttgagaggaaggacaagaagaaagatgggatagaatttaaatagagaagaatgccattttatcactctgcctctgggtgaaataaagatcagtcttgatgttctaactctaa

SEQ ID NO: 16818 - DNA, 1538 bp, Artificial Sequence
  derived and/or modified sequence
atttaacctttgggaacaaggcaactagcgtctggcagcaggaatccaaccagtgccctgagttctgaggcagagaggaggacagaagaaacaagaggctggagattgtcaaattcagtatcccagttggctcttgattcttggtgaaaccatccctcagctcctagagggagattgttagatcatgaaactaagtttaacccaggaatcacagtccgaggaaattgactgcaatgacaaggatttatttaaagctgtggatgctgctctgaagaaatataacagtcaaaaccaaagtaacaaccagtttgtattgtaccgcataactgaagccactaagacggttggctctgacacgttttattccttcaagtacgaaatcaaggagggggattgtcctgttcaaagtggcaaaacctggcaggactgtgagtacaaggatgctgcaaaagcagccactggagaatgcacggcaaccgtggggaagaggagcagtacgaaattctccgtggctacccagacctgccagattactccagccgagggccctgtggtgacagcccagtacgactgcctcggctgtgtgcatcctatatcaacgcagagcccagacctggagcccattctgagacacggcattcagtactttaacaacaacactcaacattcctccctcttcatgcttaatgaagtaaaacgggcccaaagacaggtggtggctggattgaactttcgaattacctactcaattgtgcaaacgaattgttccaaagagaattttctgttcttaactccagactgcaagtccctttggaatggtgataccggtgaatgtacagataatgcatacatcgatattcagctacgaattgcttccttctcacagaactgtgacatttatccagggaaggattttgtacaaccacctaccaagatttgcgtgggctgccccagagatatacccaccaacagcccagagctggaggagacactgactcacaccatcacaaagcttaatgcagagaataacgcaactttctatttcaagattgacaatgtgaaaaaagcaagagtacaggtggtggctggcaagaaatattttattgacttcgtggccagggaaaccacatgttccaaggaaagtaatgaagagttgaccgaaagctgtgagaccaaaaaacttggccaaagcctagattgcaacgctgaagtttatgtggtaccctgggagaaaaaaatttaccctactgtcaactgtcaaccactgggaatgatctcactgatgaaaaggcctccaggtttttcacctttccgatcatcacgaataggggaaataaaagaagaaacaactagtcacctaaggtcctgcgagtacaagggtcgacccccaaaggcaggggcagagccagcatctgagagggaggtctcttgaccaatgggcagaatcttcactccaggcacatagccccaaccacctctgccagcaaccttgagaggaaggacaagaagaaagatgggatagaatttaaatagagaag

SEQ ID NO: 16819 - DNA, 1284 bp, Artificial Sequence
  derived and/or modified sequence
atgaagctgatcaccatcctcttcctgtgcagccggctgctgctgagcctgacccaggagagccagagcgaggagattgactgcaatgacaaggacctcttcaaggctgtggatgctgccctgaagaagtacaacagccagaaccagagcaacaaccagtttgtgctgtaccgcatcacagaggccaccaagacagtgggcagtgacaccttctacagcttcaagtatgagatcaaggagggggactgccctgtgcagagcggcaagacctggcaggactgtgagtacaaggatgctgccaaggccgccaccggggagtgcacagccaccgtgggcaagaggagcagcaccaagttctctgtggccacccagacctgccagatcaccccagctgagggccctgtggtgacagcccagtatgactgcctgggctgtgtgcaccccatcagcacccagagcccagacctggagcccatcctgcggcacggcatccagtacttcaacaacaacacccagcacagcagcctcttcatgctgaatgaggtgaagagggcccagaggcaggtggtggccggcctgaacttccgcatcacctacagcatcgtgcagaccaactgcagcaaagaaaacttcctgttcctgaccccagactgcaagagcctgtggaatggagacaccggggagtgcacagacaatgcctacatcgacatccagctgagaattgccagcttcagccagaactgtgacatctacccaggcaaggactttgtgcagccccccaccaagatctgtgtgggctgcccccgggacatccccaccaacagccctgagctggaggagaccctgacccacaccatcaccaagctgaatgctgagaacaatgccaccttctacttcaagattgacaacgtgaagaaggcccgggtgcaggtggtggccggcaagaagtacttcatcgactttgtggcccgggagaccacctgcagcaaggagagcaatgaggagctgacagagagctgtgagaccaagaagctgggccagagcctggactgcaatgctgaggtgtatgtggtgccctgggagaagaagatctaccccaccgtgaactgccagcccctgggcatgatcagcctgatgaagaggcctcctggcttcagccccttccgcagcagcagaattggagagatcaaggaggagaccaccagccacctgcggagctgtgagtacaagggccggccccccaaggccggggctgagcccgccagcgagcgggaggtgtcctag

SEQ ID NO: 16820 - DNA, 1248 bp, Artificial Sequence
  derived and/or modified sequence
atgaagctgagcctgacccaggagagccagagcgaggagattgactgcaatgacaaggacctcttcaaggctgtggatgctgccctgaagaagtacaacagccagaaccagagcaacaaccagtttgtgctgtaccgcatcacagaggccaccaagacagtgggcagtgacaccttctacagcttcaagtatgagatcaaggagggggactgccctgtgcagagcggcaagacctggcaggactgtgagtacaaggatgctgccaaggccgccaccggggagtgcacagccaccgtgggcaagaggagcagcaccaagttctctgtggccacccagacctgccagatcaccccagctgagggccctgtggtgacagcccagtatgactgcctgggctgtgtgcaccccatcagcacccagagcccagacctggagcccatcctgcggcacggcatccagtacttcaacaacaacacccagcacagcagcctcttcatgctgaatgaggtgaagagggcccagaggcaggtggtggccggcctgaacttccgcatcacctacagcatcgtgcagaccaactgcagcaaagaaaacttcctgttcctgaccccagactgcaagagcctgtggaatggagacaccggggagtgcacagacaatgcctacatcgacatccagctgagaattgccagcttcagccagaactgtgacatctacccaggcaaggactttgtgcagccccccaccaagatctgtgtgggctgcccccgggacatccccaccaacagccctgagctggaggagaccctgacccacaccatcaccaagctgaatgctgagaacaatgccaccttctacttcaagattgacaacgtgaagaaggcccgggtgcaggtggtggccggcaagaagtacttcatcgactttgtggcccgggagaccacctgcagcaaggagagcaatgaggagctgacagagagctgtgagaccaagaagctgggccagagcctggactgcaatgctgaggtgtatgtggtgccctgggagaagaagatctaccccaccgtgaactgccagcccctgggcatgatcagcctgatgaagaggcctcctggcttcagccccttccgcagcagcagaattggagagatcaaggaggagaccaccagccacctgcggagctgtgagtacaagggccggccccccaaggccggggctgagcccgccagcgagcgggaggtgtcctag

SEQ ID NO: 16821 - DNA, 1284 bp, Artificial Sequence
  derived and/or modified sequence
atgaagctgatcaccatcctgttcctgtgcagccggctgctgctgtccctgacacaggagtctcaatcagaggagattgattgcaacgataaggacctctttaaagctgtggacgccgcgttgaagaagtataattcccaaaaccagtccaacaaccagttcgtgttgtataggatcaccgaggcaaccaagacagtggggagcgacacattttattcattcaaatacgagatcaaggaaggggattgtcccgttcagtccggaaagacttggcaggactgtgaatacaaggatgccgctaaagcggccaccggcgagtgcacagccacggtcggcaaacgtagcagcacaaagtttagtgtggccactcagacctgtcaaatcacgcctgcggagggccccgtcgtgacggcccagtacgattgcttgggatgcgtccatccaattagtacgcagagtcctgatctcgaaccaatcctgcggcacggcatccagtattttaataacaatacacagcacagttctctctttatgctgaatgaggttaagcgagcccaaaggcaggttgtagccggcctgaactttcgtatcacatatagcatcgttcagacaaactgctccaaggaaaactttctcttcctgacgcctgactgcaagtctttgtggaatggtgataccggcgagtgtactgataatgcatacatcgacatccagctccggatcgccagcttcagtcagaactgtgatatctacccggggaaggattttgtgcaaccaccgaccaaaatctgcgtcggctgccctcgggatattccgacaaatagccctgagctcgaggaaacattaacccatacaatcaccaagcttaatgccgaaaacaacgccactttttacttcaagattgataatgttaaaaaggcccgggtgcaggtcgtggcaggtaaaaagtatttcatcgatttcgtcgcccgagagacgacttgtagtaaggagagcaatgaagaactgaccgagagctgtgagactaaaaagctcgggcaatccttggactgcaacgcggaagtttatgtggtaccttgggagaagaagatttaccctacagtgaactgccaaccacttggcatgatctctctgatgaaaagaccacccgggttctccccttttaggtcctcgcgcatcggtgagatcaaggaggagactacctcccacttgcgtagttgtgagtataaggggagacctccaaaggcaggcgctgagcctgcctcagaacgcgaagtctcttag

SEQ ID NO: 16822 - DNA, 1248 bp, Artificial Sequence
  derived and/or modified sequence
atgaagctgagcctgacccaggagagccagagcgaggagatcgactgcaacgataaggacctgttcaaggcagtagacgccgctctgaagaaatataactcccagaaccaatctaacaatcaattcgtcctgtatcgcattacggaggcaacaaaaactgtgggcagcgataccttctatagcttcaaatatgaaattaaggaaggtgactgtcctgtccagtcaggaaagacctggcaagactgcgagtataaagatgcggctaaagccgctacgggagaatgcacagccacagtagggaagcggtccagtacaaaattttccgtggccacgcagacttgtcaaatcacgcctgccgaagggccagtagttaccgcacagtacgactgcttggggtgcgtccacccaatttccactcagtcacccgacttggagcccatcctacgtcacggaatccagtacttcaacaacaatacacagcactctagcttattcatgttaaacgaagtgaagcgtgcacaaaggcaagttgtggccggactgaactttaggataacctattccatcgttcagaccaattgctcaaaagagaactttttgttcttgactcccgattgtaagagtctgtggaacggggacacgggtgaatgcacagacaacgcttacatcgatatacagctgcgcatcgcgtcattttcacagaactgcgatatttatccaggtaaggattttgtacagccaccgacgaaaatctgcgttggatgccccagggacatccccactaactctcctgagttagaagaaaccttaactcatactattacaaaactgaacgctgaaaacaatgctaccttctactttaagatagataatgtgaaaaaggcccgggtgcaggtggttgcagggaaaaaatactttatcgatttcgtggccagggagactacttgttccaaggagagcaacgaggagttaacggagtcctgcgagaccaaaaagttagggcagtcattggactgcaacgccgaggtgtatgtcgtgccatgggaaaaaaaaatctacccaaccgttaactgtcagcccctgggcatgatatctctgatgaagagaccgcctggattctctccttttaggagcagtcgtattggcgaaattaaggaggagaccacctctcatctccgatcttgtgaatataaagggcgcccaccaaaggctggagccgagcctgcaagcgagcgtgaggtcagctag

SEQ ID NO: 16823 - DNA, 1284 bp, Artificial Sequence
  derived and/or modified sequence
atgaaactgattactatcctgtttctatgttctcgtttattgttaagcttgactcaggagtcacagtccgaggaaattgattgtaacgataaagatctattcaaggcagttgacgccgcacttaagaaatataactcccagaaccaatccaataatcagttcgtgctgtatcggataaccgaggccacgaagaccgtcggctccgataccttctattcgtttaaatacgagattaaggagggcgactgcccagtacaaagtggaaagacgtggcaggactgtgaatataaagacgctgccaaagccgctaccggagaatgtaccgctactgtgggcaaacgttctagcacaaagttcagcgtcgccacacagacatgccagataacacccgctgaaggcccagtggtaacagcccagtacgactgcttgggctgtgtccaccctatcagcacacagtcgcccgatcttgagcccatactccgacacggaattcaatactttaataacaatactcagcacagctctctattcatgctcaatgaagtgaaaagagcccagcgacaggtagtggccggtcttaactttcgaataacttactctatcgtccagactaactgtagcaaagagaatttcctgttcttgacacccgattgcaaatcactatggaatggggacacgggggaatgcactgacaatgcatatatagacattcagttgaggatcgcctccttttctcagaactgcgacatatatccgggaaaagatttcgttcagcccccaacaaagatttgcgtcggatgcccgcgtgacatccccacaaactcccccgagttagaagagaccctgacccacacaattacgaaactgaatgcagaaaataatgccaccttttatttcaagatagacaatgtgaagaaagccagagtacaggttgttgccggtaagaaatacttcattgacttcgtggcgcgagagacaacatgctctaaggaatcaaacgaggagctgaccgagagctgtgagactaaaaaactcggacagagcctcgactgtaacgcggaagtctatgtggtgccttgggagaagaaaatatatcctacagtcaactgccagcctttgggcatgattagcctgatgaaaaggccacctgggttctcccccttccggtctagccgcatcggcgagatcaaggaggaaacgacgtctcatctgagaagctgtgagtataaaggacgccctccgaaggctggcgcagaaccagcttccgaacgcgaagtaagctag

SEQ ID NO: 16824 - DNA, 1248 bp, Artificial Sequence
  derived and/or modified sequence
atgaaactgtcactgacccaagagtcacagtctgaggagattgattgtaacgataaagatctgtttaaagctgtcgatgccgcattgaagaagtataatagccagaaccagtcgaataatcagtttgtgttgtatcgcattacggaggccacaaagaccgttggcagcgacactttctacagcttcaaatatgaaatcaaagaaggcgactgccctgtacagtccggcaagacctggcaggattgcgaatacaaagacgctgccaaagcagccaccggagaatgcaccgcgaccgtgggtaagcggagctccactaagttctctgtggcgacacaaacatgccagattaccccagccgagggcccagtcgtgaccgcacagtacgattgtctcgggtgtgtccaccctataagtactcagagtccagacctggagcccatcctacgtcatggaatccaatacttcaataataatactcagcacagctctctctttatgctcaatgaagtaaagcgggcacaaaggcaggtggtggcagggcttaatttcagaatcacttattccattgtacaaactaattgcagtaaagaaaatttccttttcctcacaccagattgcaagagcctttggaatggcgataccggtgaatgtacagacaacgcctacattgacatccaacttcgtattgcatccttctcacaaaattgcgatatttatcccggaaaggatttcgtacagccaccaactaagatttgtgtggggtgcccaagggatattcctaccaattcaccagagctcgaagagaccctgacgcatactatcaccaagctgaacgctgagaataacgcgacgttctacttcaaaatcgacaacgttaaaaaagcgcgtgtccaggtggtggcgggaaagaagtactttatcgactttgtggcaagagaaacaacttgttccaaagaatctaatgaggaacttaccgagtcctgcgagactaagaagctcgggcaaagcttggattgcaatgcggaggtttacgtcgtgccctgggaaaaaaagatatatccgaccgtaaattgtcagcctttggggatgatttcactgatgaagcgacccccaggcttcagccctttccgatcttctaggattggcgagatcaaagaggagactacatctcatctacggagttgcgaatataaaggcaggccacccaaagcaggcgcagaacccgctagtgaacgggaggtatcctag

SEQ ID NO: 16825 - DNA, 1284 bp, Artificial Sequence
  derived and/or modified sequence
atgaagctgatcaccatcctgttcctgtgcagcagactgctgctgagcctgacccaggagagccagagcgaggagatcgactgcaacgacaaggacctgttcaaggccgtggacgccgccctgaagaagtacaacagccagaaccagagcaacaaccagttcgtgctgtacagaatcaccgaggccaccaagaccgtgggcagcgacaccttctacagcttcaagtacgagatcaaggagggcgactgccccgtgcagagcggcaagacctggcaggactgcgagtacaaggacgccgccaaggccgccaccggcgagtgcaccgccaccgtgggcaagagaagcagcaccaagttcagcgtggccacccagacctgccagatcacccccgccgagggccccgtggtgaccgcccagtacgactgcctgggctgcgtgcaccccatcagcacccagagccccgacctggagcccatcctgagacacggcatccagtacttcaacaacaacacccagcacagcagcctgttcatgctgaacgaggtgaagagagcccagagacaggtggtggccggcctgaacttcagaatcacctacagcatcgtgcagaccaactgcagcaaggagaacttcctgttcctgacccccgactgcaagagcctgtggaacggcgacaccggcgagtgcaccgacaacgcctacatcgacatccagctgagaatcgccagcttcagccagaactgcgacatctaccccggcaaggacttcgtgcagccccccaccaagatctgcgtgggctgccccagagacatccccaccaacagccccgagctggaggagaccctgacccacaccatcaccaagctgaacgccgagaacaacgccaccttctacttcaagatcgacaacgtgaagaaggccagagtgcaggtggtggccggcaagaagtacttcatcgacttcgtggccagagagaccacctgcagcaaggagagcaacgaggagctgaccgagagctgcgagaccaagaagctgggccagagcctggactgcaacgccgaggtgtacgtggtgccctgggagaagaagatctaccccaccgtgaactgccagcccctgggcatgatcagcctgatgaagagaccccccggcttcagccccttcagaagcagcagaatcggcgagatcaaggaggagaccaccagccacctgagaagctgcgagtacaagggcagaccccccaaggccggcgccgagcccgccagcgagagagaggtgagctag

SEQ ID NO: 16826 - DNA, 1248 bp, Artificial Sequence
  derived and/or modified sequence
atgaagctgagcctgacccaggagagccagagcgaggagatcgactgcaacgacaaggacctgttcaaggccgtggacgccgccctgaagaagtacaacagccagaaccagagcaacaaccagttcgtgctgtacagaatcaccgaggccaccaagaccgtgggcagcgacaccttctacagcttcaagtacgagatcaaggagggcgactgccccgtgcagagcggcaagacctggcaggactgcgagtacaaggacgccgccaaggccgccaccggcgagtgcaccgccaccgtgggcaagagaagcagcaccaagttcagcgtggccacccagacctgccagatcacccccgccgagggccccgtggtgaccgcccagtacgactgcctgggctgcgtgcaccccatcagcacccagagccccgacctggagcccatcctgagacacggcatccagtacttcaacaacaacacccagcacagcagcctgttcatgctgaacgaggtgaagagagcccagagacaggtggtggccggcctgaacttcagaatcacctacagcatcgtgcagaccaactgcagcaaggagaacttcctgttcctgacccccgactgcaagagcctgtggaacggcgacaccggcgagtgcaccgacaacgcctacatcgacatccagctgagaatcgccagcttcagccagaactgcgacatctaccccggcaaggacttcgtgcagccccccaccaagatctgcgtgggctgccccagagacatccccaccaacagccccgagctggaggagaccctgacccacaccatcaccaagctgaacgccgagaacaacgccaccttctacttcaagatcgacaacgtgaagaaggccagagtgcaggtggtggccggcaagaagtacttcatcgacttcgtggccagagagaccacctgcagcaaggagagcaacgaggagctgaccgagagctgcgagaccaagaagctgggccagagcctggactgcaacgccgaggtgtacgtggtgccctgggagaagaagatctaccccaccgtgaactgccagcccctgggcatgatcagcctgatgaagagaccccccggcttcagccccttcagaagcagcagaatcggcgagatcaaggaggagaccaccagccacctgagaagctgcgagtacaagggcagaccccccaaggccggcgccgagcccgccagcgagagagaggtgagctag

SEQ ID NO: 16827 - protein, 141 aa, Artificial Sequence
  derived and/or modified sequence
MEMLQGLLLLLLLSMGGAWASREPLRPWCHPINAILAVEKEGCPVCITVNTTICAGYCPTMMRVLQAVLPPLPQVVCTYRDVRFESIRLPGCPRGVDPVVSFPVALSCRCGPCRRSTSDCGGPKDHPLTCDHPQLSGLLFL

SEQ ID NO: 16828 - DNA, 129 bp, Artificial Sequence
  derived and/or modified sequence
atgggagtccggcatccgccatgcagccacagactgcttgcagtgtgtgccctcgtgtcgctggcgactgcggctctgctcgccaacaccccctgcggtccgtacactcacgattgtcctgtgaaacgg

SEQ ID NO: 16829 - DNA, 523 bp, Artificial Sequence
  derived and/or modified sequence
gcaccaaggatggagatgctccaggggctgctgctgttgctgctgctgagcatgggcggggcatgggcatccagggagccgcttcggccatggtgccaccccatcaatgccatcctggctgtcgagaaggagggctgcccagtgtgcatcaccgtcaacaccaccatctgtgccggctactgccccaccatgatgcgcgtgctgcaggcggtcctgccgcccctgcctcaggtggtgtgcacctaccgtgatgtgcgcttcgagtccatccggctccctggctgcccgcgtggtgtggaccccgtggtctccttccctgtggctctcagctgtcgctgtggaccctgccgccgcagcacctctgactgtgggggtcccaaagaccaccccttgacctgtgaccacccccaactctcaggcctcctcttcctctaaagaccctccccgcagccttccaagtccatcccgactcctggagccctgacaccccgatcctcccacaataaaggcttctcaatccgca

SEQ ID NO: 16830 - DNA, 426 bp, Artificial Sequence
  derived and/or modified sequence
atggagatgctacagggcctgctcctcttgttgttactctctatgggtggggcgtgggcatctagagagccactgcgtccttggtgtcatcccatcaacgcaattctggcagtggaaaaagaaggatgcccggtgtgtattacagtgaacactaccatttgcgctggctactgccctaccatgatgagagtgttacaggccgttctgccacctttgcctcaggtggtgtgtacctatagggacgtaaggttcgaatccatccgcctgcctggctgcccccgaggggtggaccctgtggtgagtttccccgtggctctctcatgtaggtgcggaccctgtagacggtcaactagcgactgtggcggtcccaaggatcatcctctcacgtgtgaccacccccagctttccggactgctgtttctttag

SEQ ID NO: 16831 - DNA, 426 bp, Artificial Sequence
  derived and/or modified sequence
atggagatgctgcagggcctgctgctgctgctgctgctgtccatgggcggggcctgggccagccgggagcccctgcggccctggtgccaccccatcaatgccatcctggccgtggagaaggagggctgccctgtgtgcatcaccgtgaacaccaccatctgtgccggctactgccccaccatgatgagggtgctgcaggccgtgctgccccccctgccccaggtggtgtgcacctacagagatgtgcgctttgagagcatccggctgcccggctgcccccggggcgtggaccctgtggtgtccttccctgtggccctgagctgccgctgtggcccctgccgccgcagcaccagtgactgtggcggccccaaggaccaccccctgacctgtgaccacccccagctgagcggcctgctcttcctgtag

SEQ ID NO: 16832 - DNA, 426 bp, Artificial Sequence
  derived and/or modified sequence
atggagatgctgcagggcctgctgctgctgctgctgctgagcatgggtggagcatgggccagtcgcgagccgcttcgtccatggtgccatcctattaacgcgattctggctgtggaaaaggaggggtgtcctgtttgtatcacggtaaatacgacgatctgcgcagggtactgccccacgatgatgagggtgttgcaggcagtgttgcctccactcccacaggttgtgtgtacatatagggacgttaggttcgagtctatcaggctgccgggatgcccacggggcgttgacccagtcgtctcatttcctgttgccttaagttgtcggtgcggcccatgtagaaggtcaactagtgactgcggcggtcctaaggaccatccccttacttgcgaccacccgcagctaagtgggttactgtttctctag

SEQ ID NO: 16833 - DNA, 426 bp, Artificial Sequence
  derived and/or modified sequence
atggagatgctgcagggcctccttctccttctgttgttgagtatgggaggggcatgggcgtcccgggagcctctgcgtccttggtgtcaccccattaatgcaatactggcagttgagaaggagggttgcccagtgtgcattacggttaacaccacaatatgcgcagggtactgccccaccatgatgagggtattgcaagccgttctgcctcccctgccacaagttgtttgtacgtaccgcgatgtgcggttcgagtctatccgcctacctggttgccccaggggagtagacccggttgtttcctttcccgttgcgctctcttgcaggtgtgggccatgcaggaggtcgacttcagactgcggtggacctaaagatcacccactcacatgtgaccacccccagctttccggtcttctgttcctctag

SEQ ID NO: 16834 - DNA, 426 bp, Artificial Sequence
  derived and/or modified sequence
atggaaatgttgcaaggcttgttattgctgctcctcctgagtatgggaggcgcatgggccagtagggaacctctgcgtccctggtgccatccaataaacgctatcctcgcagtcgagaaggaaggatgtccagtctgcatcaccgtgaatacgacaatctgtgctgggtactgtccgactatgatgagagtactccaagctgtgctaccccccttgccccaggtcgtatgcacttacagagatgtgcggttcgaatccataagattgcctggctgtcctagaggtgtagaccccgtcgtgtctttccccgtcgccctgagttgccggtgcggaccttgcaggcggagcacatcagattgcggcggcccaaaggatcaccctctgacatgcgaccacccccaactgtctggcttattatttctatag

SEQ ID NO: 16835 - DNA, 426 bp, Artificial Sequence
  derived and/or modified sequence
atggaaatgttgcaaggcttgttattgctgctcctcctgagtatgggaggcgcatgggccagtagggaacctctgcgtccctggtgccatccaataaacgctatcctcgcagtcgagaaggaaggatgtccagtctgcatcaccgtgaatacgacaatctgtgctgggtactgtccgactatgatgagagtactccaagctgtgctaccccccttgccccaggtcgtatgcacttacagagatgtgcggttcgaatccataagattgcctggctgtcctagaggtgtagaccccgtcgtgagtttccctgtagccctcagttgccggtgtggcccatgtcgcagaagcacatcagattgcggaggaccaaaagaccacccactgacttgtgaccatccccagctctcgggcctgttgttcttgtag

SEQ ID NO: 16836 - DNA, 426 bp, Artificial Sequence
  derived and/or modified sequence
atggagatgctgcagggcctgctgctgctgctgctgctgagcatgggcggcgcctgggccagcagagagcccctgagaccctggtgccaccccatcaacgccatcctggccgtggagaaggagggctgccccgtgtgcatcaccgtgaacaccaccatctgcgccggctactgccccaccatgatgagagtgctgcaggccgtgctgccccccctgccccaggtggtgtgcacctacagagacgtgagattcgagagcatcagactgcccggctgccccagaggcgtggaccccgtggtgagcttccccgtggccctgagctgcagatgcggcccctgcagaagaagcaccagcgactgcggcggccccaaggaccaccccctgacctgcgaccacccccagctgagcggcctgctgttcctgtag

SEQ ID NO: 16837 - protein, 611 aa, Artificial Sequence
  derived and/or modified sequence
MPEIVDTCSLASPASVCRTKHLHLRCSVDFTRRTLTGTAALTVQSQEDNLRSLVLDTKDLTIEKVVINGQEVKYALGERQSYKGSPMEISLPIALSKNQEIVIEISFETSPKSSALQWLTPEQTSGKEHPYLFSQCQAIHCRAILPCQDTPSVKLTYTAEVSVPKELVALMSAIRDGETPDPEDPSRKIYKFIQKVPIPCYLIALVVGALESRQIGPRTLVWSEKEQVEKSAYEFSETESMLKIAEDLGGPYVWGQYDLLVLPPSFPYGGMENPCLTFVTPTLLAGDKSLSNVIAHEISHSWTGNLVTNKTWDHFWLNEGHTVYLERHICGRLFGEKFRHFNALGGWGELQNSVKTFGETHPFTKLVVDLTDIDPDVAYSSVPYEKGFALLFYLEQLLGGPEIFLGFLKAYVEKFSYKSITTDDWKDFLYSYFKDKVDVLNQVDWNAWLYSPGLPPIKPNYDMTLTNACIALSQRWITAKEDDLNSFNATDLKDLSSHQLNEFLAQTLQRAPLPLGHIKRMQEVYNFNAINNSEIRFRWLRLCIQSKWEDAIPLALKMATEQGRMKFTRPLFKDLAAFDKSHDQAVRTYQEHKASMHPVTAMLVGKDLKVD

SEQ ID NO: 16838 - DNA, 1836 bp, Artificial Sequence
  derived and/or modified sequence
atgcccgagattgtggatacgtgctcgttggcctcaccggctagcgtgtgccggacgaagcaccttcatcttagatgtagtgtcgacttcactcgacggaccctgacggggactgctgcacttaccgtacagtctcaagaagacaacctaaggtccctggtgcttgatacaaaggatctgaccatcgaaaaggtggtgattaacggccaggaggtgaagtatgccttaggagagcggcagtcttataaaggcagcccgatggagatctctctacctattgctctttcaaagaatcaggagatagtaattgagataagcttcgagacttcgcctaagtccagcgccctccagtggttaaccccagagcagacttctggtaaggaacacccctacctattttcccagtgtcaagcgatccattgccgtgccatcctgccctgtcaggataccccatccgtgaagctgacgtatacggcagaggtcagcgtccccaaggagcttgtcgccctgatgtcagccatccgcgacggtgaaacaccagaccctgaggaccctagcaggaaaatatataaatttatccagaaggtgccaatcccttgttacctgattgctctggtggtaggagctctcgagtccaggcagatcggcccaaggactttagtctggagcgaaaaggagcaggtggagaaatctgcttatgagttttcagagacagagtctatgctgaagatagccgaagatttggggggtccctacgtctggggacagtatgatctcctggttcttccacctagctttccctatggtgggatggagaacccctgcctgacgttcgtgacgcctacactgctggccggcgataagtccctctccaatgtaattgcccacgaaatctcacacagctggacaggcaacctggttacaaacaagacgtgggaccacttctggctcaatgagggacacacggtttacttagaaagacacatctgcggcagacttttcggagagaagttcagacacttcaatgccctcggtggatggggagaactgcagaattccgttaaaaccttcggagagacacacccatttacgaagctcgtggtcgatctcacggatatcgatcccgatgtcgcttactcaagcgtaccatacgaaaagggatttgcgttgctcttctatctggagcagcttctgggcggtcctgagatctttcttgggttcctgaaagcatacgttgaaaaattttcttataagtctattaccactgacgactggaaggatttcctgtactcttatttcaaagataaggttgacgtgctgaatcaagttgactggaatgcgtggttgtacagcccggggctgccgccgatcaaacccaactatgacatgactctgaccaatgcatgcatcgccttatcacagagatggatcactgccaaggaggacgatctcaatagtttcaatgctactgatttgaaagatttgtcctctcatcagctcaacgagttcctggcccagaccctccagagagcgcccctccccctaggccatatcaaaagaatgcaggaggtctataacttcaatgccataaataacagcgaaatacggttcaggtggcttagactgtgtatacagtcaaagtgggaagatgcaatcccactggcattaaaaatggctacggagcagggtaggatgaagttcacaagaccgctgttcaaagaccttgcagcattcgataaatctcacgaccaagccgtcagaacctatcaggaacataaagccagtatgcatcccgtgactgccatgctggttggaaaggacctgaaggtggattag

SEQ ID NO: 16839 - DNA, 1836 bp, Artificial Sequence
  derived and/or modified sequence
atgcctgagatcgtggacacctgcagcctggccagccctgcctctgtgtgcaggaccaagcacctgcacctgcgctgcagcgtggacttcaccaggaggaccctgaccggcacagctgccctgactgtgcagagccaggaggacaacctgcggagcctggtgctggacaccaaggacctgaccatcgagaaggtggtgatcaatggccaggaggtgaagtatgccctgggggagcggcagagctacaagggcagccccatggagatcagcctgcccatcgccctgagcaagaaccaggagatcgtgattgagatcagctttgagaccagccccaagagcagcgccctgcagtggctgaccccagagcagaccagcggcaaggagcacccctacctgttcagccagtgccaggccatccactgccgggccatcctgccctgccaggacacccccagcgtgaagctgacctacacagctgaggtgtctgtgcccaaggagctggtggccctgatgtctgccatcagagatggagagaccccagaccctgaggaccccagcaggaagatctacaagttcatccagaaggtgcccatcccctgctacctgattgccctggtggtgggcgccctggagagccggcagatcggccccaggaccctggtgtggagcgagaaggagcaggtggagaagagcgcctatgagttcagcgagacagagagcatgctgaagattgctgaggacctgggcggcccctacgtgtggggccagtatgacctgctggtgctgcccccatccttcccctacggcggcatggagaacccctgcctgacctttgtgacccccaccctgctggccggggacaagagcctgagcaatgtcatcgcccacgagatcagccacagctggacaggcaacctggtgaccaacaagacctgggaccacttctggctgaatgaaggccacacagtgtacctggagcggcacatctgtggccgcctgtttggagagaagttccgccacttcaatgccctgggcggctggggcgagctgcagaacagcgtgaagacctttggagagacccaccccttcaccaagctggtggtggacctgacagacattgatcctgatgtggcctacagctctgtgccctatgagaagggctttgccctgctcttctacctggagcagctgctgggcggccctgagatcttcctgggcttcctgaaggcctacgtggagaagttctcctacaagagcatcaccacagatgactggaaggacttcctgtacagctacttcaaggacaaggtggatgtgctgaaccaggtggactggaatgcctggctgtacagccctggcctgccccccatcaagcccaactatgacatgaccctgaccaatgcctgcatcgccctgagccagcgctggatcacagccaaggaggatgacctgaacagcttcaatgccacagacctgaaggacctgagcagccaccagctgaatgagttcctggcccagaccctgcagagggcccccctgcccctgggccacatcaagaggatgcaggaggtgtacaacttcaatgccatcaacaacagcgagatccgcttccgctggctgcggctgtgcatccagagcaagtgggaggatgccatccccctggccctgaagatggccacagagcagggccgcatgaagttcacccggcccctcttcaaggacctggccgcctttgacaagagccatgaccaggccgtgaggacctaccaggagcacaaggcctccatgcaccctgtgacagccatgctggtgggcaaggacctgaaggtggactag

SEQ ID NO: 16840 - DNA, 2139 bp, Artificial Sequence
  derived and/or modified sequence
aagaaacttcctttcccggcgtgcaccgcgaatccctcctcctcttctttacctctctccctcctcctcaggttctctatcgacgagtctggtagctgagcgttgggctgtaggtcgctgtgctgtgtgatcccccagagccatgcccgagatagtggatacctgttcgttggcctctccggcttccgtctgccggaccaagcacctgcacctgcgctgcagcgtcgactttactcgccggacgctgaccgggactgctgctctcacggtccagtctcaggaggacaatctgcgcagcctggttttggatacaaaggaccttacaatagaaaaagtagtgatcaatggacaagaagtcaaatatgctcttggagaaagacaaagttacaagggatcgccaatggaaatctctcttcctatcgctttgagcaaaaatcaagaaattgttatagaaatttcttttgagacctctccaaaatcttctgctctccagtggctcactcctgaacagacttctgggaaggaacacccatatctctttagtcagtgccaggccatccactgcagagcaatccttccttgtcaggacactccttctgtgaaattaacctatactgcagaggtgtctgtccctaaagaactggtggcacttatgagtgctattcgtgatggagaaacacctgacccagaagacccaagcaggaaaatatacaaattcatccaaaaagttccaataccctgctacctgattgctttagttgttggagctttagaaagcaggcaaattggcccaagaactttggtgtggtctgagaaagagcaggtggaaaagtctgcttatgagttttctgagactgaatctatgcttaaaatagcagaagatctgggaggaccgtatgtatggggacagtatgacctattggtcctgccaccatccttcccttatggtggcatggagaatccttgccttacttttgtaactcctactctactggcaggcgacaagtcactctccaatgtcattgcacatgaaatatctcatagctggacagggaatctagtgaccaacaaaacttgggatcacttttggttaaatgagggacatactgtgtacttggaacgccacatttgcggacgattgtttggtgaaaagttcagacattttaatgctctgggaggatggggagaactacagaattcggtaaagacatttggggagacacatcctttcaccaaacttgtggttgatctgacagatatagaccctgatgtagcttattcttcagttccctatgagaagggctttgctttacttttttaccttgaacaactgcttggaggaccagagattttcctaggattcttaaaagcttatgttgagaagttttcctataagagcataactactgatgactggaaggatttcctgtattcctattttaaagataaggttgatgttctcaatcaagttgattggaatgcctggctctactctcctggactgcctcccataaagcccaattatgatatgactctgacaaatgcttgtattgccttaagtcaaagatggattactgccaaagaagatgatttaaattcattcaatgccacagacctgaaggatctctcttctcatcaattgaatgagtttttagcacagacgctccagagggcacctcttccattggggcacataaagcgaatgcaagaggtgtacaacttcaatgccattaacaattctgaaatacgattcagatggctgcggctctgcattcaatccaagtgggaggacgcaattcctttggcgctaaagatggcaactgaacaaggaagaatgaagtttacccggcccttattcaaggatcttgctgcctttgacaaatcccatgatcaagctgtccgaacctaccaagagcacaaagcaagcatgcatcccgtgactgcaatgctggtggggaaagacttaaaagtggattaaagacctgcgtattgatgattttagagatttctcttttttaaatggaattcgtaaagaaatataaaacttcagctcacaattaaaactgtctttttagttttggctttttattgttttgttggtgattttactgaaataaagttgagctacttcttcttata

SEQ ID NO: 16841 - DNA, 1836 bp, Artificial Sequence
  derived and/or modified sequence
atgcccgagatcgtggacacctgcagcctggccagccccgccagcgtgtgtagaacaaaacatctacacctccgttgtagcgtggacttcacacgcagaacactgacaggcaccgccgctctgacagtccaatcccaggaagacaatttacgcagtctggtcctcgatacaaaggatctgactattgagaaagtggttattaatggccaggaggtgaagtacgctctgggagaaaggcagagctataaaggctcaccaatggaaatctccctcccaattgccctctctaagaaccaagagatcgtgatcgaaatatcattcgagacaagtccaaagtccagtgctttgcagtggcttacccccgagcagacgtctggcaaggagcacccatatctgttctcacagtgccaggccatccattgcagagctatcctgccttgccaagatactcctagtgtcaaactgacatatacagctgaagtgtctgttccgaaggagttagtggcactgatgtctgccatccgggacggcgaaacaccagaccccgaagatccgagtcgcaagatttataaatttatccagaaagtccccatcccatgttatctgatcgccctcgtagtgggagccctcgaatccaggcagatcggaccacggactctggtgtggtctgaaaaggagcaggtcgagaagtcagcctatgaattcagtgaaacagagtcgatgcttaagatagcagaagacctcggcggcccttacgtttggggacagtatgatctgctcgtgctccccccgtcgtttccttacggcggtatggagaatccttgtttgacgttcgtgacccccactctgctggccggagataagagtctgtcgaatgttattgcccatgagatttcacacagctggactggcaatctagtgacaaataagacatgggaccacttttggctcaatgaaggccacactgtatatctggaacgccacatttgtgggcggttgttcggcgaaaagttccgtcattttaacgctttgggcggatggggcgaattgcagaattcggttaagacgtttggtgagactcatcccttcactaagctggttgtggacttgacagacattgaccctgatgtggcttactcttctgtaccctacgagaaaggctttgccctcttattctacctcgagcaactgctgggcggtccggagatatttcttggatttcttaaggcctacgtcgaaaagttttcttataagtcaattaccaccgacgattggaaggacttcctgtattcttatttcaaggataaggttgacgtgctgaatcaggtggactggaacgcttggctgtactctcccggcctccccccaattaaacccaactacgatatgactcttaccaatgcttgtatcgccctcagccagcgatggatcactgcaaaagaggatgatctgaacagcttcaacgccacagacctcaaagatctgtcgtcgcaccagttaaacgaatttttggcccagaccttacaacgtgctccactgccccttggacacatcaaaaggatgcaggaggtatataatttcaatgccatcaacaattctgagatccgctttcgttggcttcggctgtgtattcagagtaagtgggaggatgcaattcccctggcgctaaagatggctactgaacaaggtcgcatgaaattcacgaggcctctgtttaaagatctggccgcctttgacaagagccacgatcaggccgttagaacataccaggagcataaagccagcatgcatcctgtcaccgccatgctcgtgggaaaggatttgaaggtggattag

SEQ ID NO: 16842 - DNA, 1836 bp, Artificial Sequence
  derived and/or modified sequence
atgcctgagatcgttgacacgtgctctcttgcgagcccagcttccgtctgccgaaccaagcaccttcacctgagatgcagtgttgattttacaagacgtaccttaacggggaccgccgctcttactgtgcagtcccaagaagacaacctgcggagcctggtgttggacacgaaagaccttacaatagaaaaagtggtgatcaacggacaggaagtgaagtatgctctcggtgagaggcaatcttataaaggatctccaatggagattagtcttcctatcgctctgtcaaaaaaccaggaaatcgtgatcgagattagctttgagacgtctcctaaatcgtctgcgctacaatggttgacaccagaacagacaagcggcaaagagcatccttaccttttcagccaatgtcaggcaatacactgcagagctattctaccttgccaggacacccccagtgtcaagctgacatacactgcagaagttagcgtgcccaaagagctggttgctctgatgtctgccatccgggacggggaaacacccgatcctgaagaccctagtagaaaaatctacaaatttatccagaaggttccaataccatgttacttgattgcactcgtagtaggggctctcgagtcgaggcagataggtcccaggaccctggtatggagtgaaaaagagcaggtcgaaaagtccgcttacgagttcagtgagacagagagcatgttgaaaatcgcagaggatctcggcggaccatacgtctggggacagtacgatctcctggtcctaccccctagtttcccttatgggggaatggagaacccttgcctgacatttgtcacaccaacactccttgccggagacaaaagtctctcaaatgtgattgcacacgagatcagccacagctggacaggcaatctcgtgactaataagacctgggatcatttttggttgaatgaggggcatacagtttatctggaaagacatatttgtggtcgactcttcggggaaaagttcaggcatttcaatgccctggggggatggggtgaactacagaacagcgtgaagacttttggtgagacacacccttttaccaaactagttgtggacttgacagatatcgacccagatgtggcctatagtagcgtgccgtatgaaaagggattcgctctattattttatctcgagcagttgctgggcggtccagaaatcttcctaggcttcctaaaggcatacgtagaaaagttctcatacaagtctatcacaacagatgattggaaggacttcctgtattcctatttcaaagacaaggtggacgtgttgaaccaggtcgactggaatgcttggctgtattcccccggactgccccctattaagccaaactatgatatgaccttgacaaacgcctgtattgctttgtcccaaaggtggatcaccgcaaaggaggatgatctgaacagctttaatgccaccgacttgaaggacctcagctctcaccagttgaacgaatttcttgctcagacactgcaaagagctccgctgccactcggtcacattaaacgcatgcaggaggtttataatttcaatgctatcaacaactcagagatccgttttcgctggctgcggttgtgcatccaatctaagtgggaagatgccattccattggctctgaagatggccacagaacagggcagaatgaaatttacccgcccactcttcaaggacttggctgcattcgataagagtcacgatcaagcagtgagaacctatcaggaacacaaagctagcatgcacccagttacagcgatgctggtgggaaaagacctcaaagttgactag

SEQ ID NO: 16843 - DNA, 1836 bp, Artificial Sequence
  derived and/or modified sequence
atgcccgagatcgtggacacctgcagcctggccagccccgccagcgtgtgcagaaccaagcacctgcacctgagatgcagcgtggacttcaccagaagaaccctgaccggcaccgccgccctgaccgtgcagagccaggaggacaacctgagaagcctggtgctggacaccaaggacctgaccatcgagaaggtggtgatcaacggccaggaggtgaagtacgccctgggcgagagacagagctacaagggcagccccatggagatcagcctgcccatcgccctgagcaagaaccaggagatcgtgatcgagatcagcttcgagaccagccccaagagcagcgccctgcagtggctgacccccgagcagaccagcggcaaggagcacccctacctgttcagccagtgccaggccatccactgcagagccatcctgccctgccaggacacccccagcgtgaagctgacctacaccgccgaggtgagcgtgcccaaggagctggtggccctgatgagcgccatcagagacggcgagacccccgaccccgaggaccccagcagaaagatctacaagttcatccagaaggtgcccatcccctgctacctgatcgccctggtggtgggcgccctggagagcagacagatcggccccagaaccctggtgtggagcgagaaggagcaggtggagaagagcgcctacgagttcagcgagaccgagagcatgctgaagatcgccgaggacctgggcggcccctacgtgtggggccagtacgacctgctggtgctgccccccagcttcccctacggcggcatggagaacccctgcctgaccttcgtgacccccaccctgctggccggcgacaagagcctgagcaacgtgatcgcccacgagatcagccacagctggaccggcaacctggtgaccaacaagacctgggaccacttctggctgaacgagggccacaccgtgtacctggagagacacatctgcggcagactgttcggcgagaagttcagacacttcaacgccctgggcggctggggcgagctgcagaacagcgtgaagaccttcggcgagacccaccccttcaccaagctggtggtggacctgaccgacatcgaccccgacgtggcctacagcagcgtgccctacgagaagggcttcgccctgctgttctacctggagcagctgctgggcggccccgagatcttcctgggcttcctgaaggcctacgtggagaagttcagctacaagagcatcaccaccgacgactggaaggacttcctgtacagctacttcaaggacaaggtggacgtgctgaaccaggtggactggaacgcctggctgtacagccccggcctgccccccatcaagcccaactacgacatgaccctgaccaacgcctgcatcgccctgagccagagatggatcaccgccaaggaggacgacctgaacagcttcaacgccaccgacctgaaggacctgagcagccaccagctgaacgagttcctggcccagaccctgcagagagcccccctgcccctgggccacatcaagagaatgcaggaggtgtacaacttcaacgccatcaacaacagcgagatcagattcagatggctgagactgtgcatccagagcaagtgggaggacgccatccccctggccctgaagatggccaccgagcagggcagaatgaagttcaccagacccctgttcaaggacctggccgccttcgacaagagccacgaccaggccgtgagaacctaccaggagcacaaggccagcatgcaccccgtgaccgccatgctggtgggcaaggacctgaaggtggactag

SEQ ID NO: 16844 - protein, 520 aa, Artificial Sequence
  derived and/or modified sequence
MPQLSLSSLGLWPMAASPWLLLLLVGASWLLARILAWTYTFYDNCCRLRCFPQPPKRNWFLGHLGLIHSSEEGLLYTQSLACTFGDMCCWWVGPWHAIVRIFHPTYIKPVLFAPAAIVPKDKVFYSFLKPWLGDGLLLSAGEKWSRHRRMLTPAFHFNILKPYMKIFNESVNIMHAKWQLLASEGSARLDMFEHISLMTLDSLQKCVFSFDSHCQEKPSEYIAAILELSALVTKRHQQILLYIDFLYYLTPDGQRFRRACRLVHDFTDAVIQERRRTLPSQGVDDFLQAKAKSKTLDFIDVLLLSKDEDGKKLSDEDIRAEADTFMFEGHDTTASGLSWVLYHLAKHPEYQERCRQEVQELLKDREPKEIEWDDLAQLPFLTMCIKESLRLHPPVPAVSRCCTQDIVLPDGRVIPKGIICLISVFGTHHNPAVWPDPEVYDPFRFDPKNIKERSPLAFIPFSAGPRNCIGQAFAMAEMKVVLGLTLLRFRVLPDHTEPRRKPELVLRAEGGLWLRVEPLS

SEQ ID NO: 16845 - DNA, 1563 bp, Artificial Sequence
  derived and/or modified sequence
atgccccagctgagcctgagcagcctgggcctgtggcccatggccgccagcccctggctgctgctgctgctggtgggcgccagctggctgctggccagaatcctggcctggacctacaccttctacgacaactgctgcagactgagatgcttcccccagccccccaagagaaactggttcctgggccacctgggcctgatccacagcagcgaggagggcctgctgtacacccagagcctggcctgcaccttcggcgacatgtgctgctggtgggtgggcccctggcacgccatcgtgagaatcttccaccccacctacatcaagcccgtgctgttcgcccccgccgccatcgtgcccaaggacaaggtgttctacagcttcctgaagccctggctgggcgacggcctgctgctgagcgccggcgagaagtggagcagacacagaagaatgctgacccccgccttccacttcaacatcctgaagccctacatgaagatcttcaacgagagcgtgaacatcatgcacgccaagtggcagctgctggccagcgagggcagcgccagactggacatgttcgagcacatcagcctgatgaccctggacagcctgcagaagtgcgtgttcagcttcgacagccactgccaggagaagcccagcgagtacatcgccgccatcctggagctgagcgccctggtgaccaagagacaccagcagatcctgctgtacatcgacttcctgtactacctgacccccgacggccagagattcagaagagcctgcagactggtgcacgacttcaccgacgccgtgatccaggagagaagaagaaccctgcccagccagggcgtggacgacttcctgcaggccaaggccaagagcaagaccctggacttcatcgacgtgctgctgctgagcaaggacgaggacggcaagaagctgagcgacgaggacatcagagccgaggccgacaccttcatgttcgagggccacgacaccaccgccagcggcctgagctgggtgctgtaccacctggccaagcaccccgagtaccaggagagatgcagacaggaggtgcaggagctgctgaaggacagagagcccaaggagatcgagtgggacgacctggcccagctgcccttcctgaccatgtgcatcaaggagagcctgagactgcacccccccgtgcccgccgtgagcagatgctgcacccaggacatcgtgctgcccgacggcagagtgatccccaagggcatcatctgcctgatcagcgtgttcggcacccaccacaaccccgccgtgtggcccgaccccgaggtgtacgaccccttcagattcgaccccaagaacatcaaggagagaagccccctggccttcatccccttcagcgccggccccagaaactgcatcggccaggccttcgccatggccgagatgaaggtggtgctgggcctgaccctgctgagattcagagtgctgcccgaccacaccgagcccagaagaaagcccgagctggtgctgagagccgagggcggcctgtggctgagagtggagcccctgagctag

SEQ ID NO: 16846 - DNA, 1563 bp, Artificial Sequence
  derived and/or modified sequence
atgcctcagctcagtttgtcctccctgggactttggcccatggcagcatccccgtggctactcttgctgttggtgggcgcgtcttggctcctggcccgaattctggcgtggacttacaccttctacgataattgctgcaggttaagatgtttccctcagccccccaaacgcaattggttccttgggcacttaggactcattcacagcagtgaagaaggactgctgtatacgcaatctctggcttgtacattcggcgacatgtgctgttggtgggttggaccatggcacgctatagtgagaatttttcatccgacctacatcaagccagtcctctttgcaccagcagccatcgtccctaaagataaagtgttttactcattcctgaaaccttggttaggagacgggttgttgttgtcagccggggaaaagtggagtcgtcataggaggatgctcacaccagcgtttcacttcaatatcctaaagccatatatgaaaatcttcaacgaaagcgttaatatcatgcacgcaaagtggcagctgctggcctccgagggttcagcccgtctcgacatgtttgagcacatcagcctcatgacactggactcactgcagaaatgtgttttcagttttgattcccactgccaggagaaaccctccgaatacatagcggccattcttgaactttccgcgctggtgaccaaacgccaccagcagattctgctttacatcgacttcctctactacctgaccccggacgggcagaggtttaggcgggcttgcagactcgtccacgatttcaccgacgccgtgatacaggaacgaaggagaacgctcccaagccagggcgtcgatgacttcctgcaggcaaaagcgaaatcaaaaacgttggatttcattgatgttctgctcctgtccaaagatgaagacgggaagaagctgtctgacgaggatattcgggcggaggccgacacgtttatgtttgaaggccatgacacaactgcctcgggactgtcctgggttctctaccatctcgccaagcatcccgaataccaggaacggtgtaggcaagaggttcaggagcttctaaaggatcgagagccaaaggagattgaatgggacgacctggcccagctgccatttctgacgatgtgcattaaggaatcactgcgcctgcaccccccggttccagctgtgtccagatgttgcacacaggatattgtgctacctgatggaagagtgatacccaaaggtatcatatgcctgatctcagtatttggcacccaccacaaccccgccgtctggccagaccccgaggtctacgatccctttaggtttgatcccaagaacatcaaagagagatctccccttgccttcattcctttttcagcgggtccccgaaattgtatcgggcaggcatttgcaatggccgaaatgaaagtcgttctgggtctcaccttgctgagattcagggtcttgccagatcacaccgaacctcggaggaaacccgaactggtcctgcgcgctgaaggagggctttggctgcgggtggaaccgctgtcttag

SEQ ID NO: 16847 - DNA, 1563 bp, Artificial Sequence
  derived and/or modified sequence
atgccccagctgagcctgagcagcctgggcctgtggcccatggccgccagcccctggctgctgctgctgctggtgggcgcctcctggctgctggcccgcatcctggcctggacctacaccttctatgacaactgctgccgcctgcgctgcttcccccagccccccaagaggaactggttcctgggccacctgggcctcatccacagcagcgaggagggcctgctgtacacccagagcctggcctgcaccttcggggacatgtgctgctggtgggtgggcccctggcacgccatcgtgcgcatcttccaccccacctacatcaagcctgtgctgtttgccccagctgccatcgtgcccaaggacaaggtgttctacagcttcctgaagccctggctgggagatggcctgctgctgtctgctggggagaagtggagccgccacaggaggatgctgaccccagccttccacttcaacatcctgaagccctacatgaagatcttcaatgaatctgtgaacatcatgcacgccaagtggcagctgctggccagcgagggcagcgcccggctggacatgtttgagcacatcagcctgatgaccctggacagcctgcagaagtgtgtgttctcctttgacagccactgccaggagaagcccagcgagtacatcgccgccatcctggagctgagcgccctggtgaccaagaggcaccagcagatcctgctgtacatcgacttcctgtactacctgaccccagatggccagcgcttcagaagagcctgccgcctggtgcatgacttcacagatgctgtgatccaggagaggaggaggaccctgcccagccagggcgtggatgacttcctgcaggccaaggccaagagcaagaccctggacttcattgatgtgctgctgctgagcaaggatgaagatggcaagaagctgagtgatgaggacatccgggcagaggccgacaccttcatgtttgagggccatgacaccacagccagcggcctgtcctgggtgctgtaccacctggccaagcaccctgagtaccaggagcgctgccggcaggaggtgcaggagctgctgaaggaccgggagcccaaggagattgagtgggatgacctggcccagctgcccttcctgaccatgtgcatcaaggagagcctgcggctgcacccccctgtgcctgctgtgagccgctgctgcacccaggacatcgtgctgcctgatggccgggtcatccccaagggcatcatctgcctgatctctgtgtttggcacccaccacaacccagctgtgtggccagaccctgaggtgtatgaccccttccgctttgaccccaagaacatcaaggagaggagccccctggccttcatccccttctctgctggccccaggaactgcatcggccaggcctttgccatggccgagatgaaggtggtgctgggcctgaccctgctgcgcttccgggtgctgcctgaccacacagagcccaggaggaagccagagctggtgctgcgggcagagggcggcctgtggctgcgggtggagcccctgtcctag

SEQ ID NO: 16848 - DNA, 1563 bp, Artificial Sequence
  derived and/or modified sequence
atgccccagctgagcctgagcagcctgggcctgtggcccatggccgcctctccctggctactcctccttctcgtgggcgcgtcctggctgctggcgcgcatactggcctggacttacacattttacgacaactgttgccgcctgcggtgttttccccagcctccaaaacgtaattggtttctcgggcacctgggcctcatccattcttctgaagagggattgctttacacgcaaagcctcgcttgtacttttggagacatgtgttgttggtgggttggtccgtggcacgcgattgtgaggatctttcatccaacgtatatcaagccagtcctcttcgcgcccgccgccatcgtacctaaggacaaggtgttctatagctttctcaagccctggttgggagatggtttgctgctaagcgctggagagaaatggagcagacatagaagaatgctcactcccgcctttcactttaacattctgaaaccatacatgaagatcttcaacgaatccgtcaatatcatgcacgcaaagtggcagctcttggcttcagagggatcggccagactggacatgttcgagcacatttccttgatgactttggattccctccagaagtgcgttttcagctttgactcccactgtcaagaaaagccgagcgaatacatcgccgccattctggaactctcagccctggtgactaaacgccatcagcagatcctcctttacatcgactttctgtattaccttacacccgatgggcagcgcttcaggagagcatgccgcctggtccacgatttcaccgacgccgtgatccaggagagaaggcgcactctcccaagccaaggagtggatgacttccttcaggccaaagctaagtcaaagaccttagatttcattgatgtgctattgctgtcaaaagatgaggatgggaaaaaactgtctgacgaagacattcgcgccgaagccgatactttcatgttcgaaggacatgatactaccgccagtggcttgtcctgggtgctgtaccatctggcaaagcaccctgagtaccaggagcggtgccgacaagaggtacaagagctgctgaaagaccgcgagcccaaggaaatcgagtgggacgacttggcccaactcccatttctgactatgtgtatcaaggagagcctacggttgcaccctcccgtgccggccgtttcccggtgttgcactcaggatatcgtgctgcccgacggccgggttatcccaaaaggaataatctgtctgatttccgtttttggtacacaccataacccagccgtttggccagacccagaggtgtatgacccatttcggtttgaccctaagaacatcaaggaacgcagccctcttgccttcataccattctccgccggtcctcgtaactgcattggtcaggcgttcgctatggcagagatgaaggtagtccttggactgaccctgctaagattcagagtgctcccagatcacacggaaccccgaaggaagccagagttagtgttaagagccgaaggcggcctgtggctgagggttgagcctctctcctag

SEQ ID NO: 16849 - DNA, 1563 bp, Artificial Sequence
  derived and/or modified sequence
atgcctcaactgagcttatcttctttgggactgtggccaatggccgcatcgccctggttgctgctcctcctcgtcggcgcaagctggttactggctcggatccttgcttggacttacactttctacgataattgttgccgactccgctgctttcctcaaccacctaagcggaattggttcttagggcatctcgggttgatccattcaagcgaggaaggcctgctctacacacagagtctggcctgtaccttcggagatatgtgttgttggtgggttggaccatggcatgctatcgtgcgaatttttcatccgacttatatcaaaccggttctctttgcgccagcggcaatagtgcccaaagataaggtcttttactcatttctgaaaccgtggctgggggacggcctcctgcttagtgccggagaaaaatggtctagacatcggagaatgctgacaccagcctttcactttaacattctgaagccatacatgaaaatctttaacgagagcgtcaatatcatgcatgctaagtggcagttactcgcttcagagggatctgctaggctcgatatgtttgaacacatatccttgatgacattagattccctgcaaaagtgcgtctttagcttcgacagtcactgtcaggaaaagccctctgagtatatcgccgcaatcttggaactgagtgcacttgttaccaagagacaccagcagatacttctttatatcgacttcctctattacttgacccctgacggacagcgctttagacgcgcttgtagactggtgcatgacttcactgatgccgtcatccaagagcggcgtcggactctcccctctcaaggcgttgacgacttcctgcaggctaaggcaaagagcaaaacattagattttatcgatgtactgctcctgtctaaagacgaggatggaaaaaaactcagtgatgaggacatacgggctgaggccgacaccttcatgtttgaaggacacgacaccaccgcaagcggcctgtcttgggtgctgtatcatctggcgaaacacccggagtaccaggaaagatgtcggcaagaagtgcaagagctgcttaaggacagagagccaaaagaaatcgaatgggatgacctggcccagctgccattcttaacgatgtgtatcaaagagtctttgaggctgcaccctccagtccctgccgtctccagatgttgtactcaagatattgtattgcccgacggcagggtgattcccaagggaattatctgtctgatatcagttttcggaactcatcataatcccgcagtgtggcccgatcccgaagtatatgacccctttagattcgaccctaaaaacattaaggagcgttctccattagcctttatacccttctctgctgggccaagaaattgcatcggccaagccttcgcaatggccgaaatgaaggtcgtgctgggcttgacattgctgcgttttcgagtgctccctgaccacacagaaccacggaggaagccagaactagtgttgagagcagagggcggactgtggctcagagtggaaccactgagttag

SEQ ID NO: 16850 - DNA, 5052 bp, Artificial Sequence
  derived and/or modified sequence
agaagaaggggagaggaggttgtgtgggacaaggtgctcctgacagaaggatgccacagctgagcctgtcctcgctgggcctttggccaatggcagcatccccgtggctgctcctgctgctggttggggcctcctggctcctggcccgcatcctggcctggacctataccttctatgacaactgctgccgcctccggtgtttcccgcaacccccgaaacggaattggttcttgggtcacctgggcctgattcacagctcggaggaaggtctcctatacacacaaagcctggcatgcaccttcggtgatatgtgctgctggtgggtggggccctggcacgcaatcgtccgcatcttccaccccacctacatcaagcctgtgctctttgctccagctgccattgtaccaaaggacaaggtcttctacagcttcctgaagccctggctgggggatgggctcctgctgagtgctggtgaaaagtggagccgccaccgtcggatgctgacgcctgccttccatttcaacatcctgaagccctatatgaagattttcaatgagagtgtgaacatcatgcatgccaagtggcagctcctggcctcagagggtagtgcccgtctggacatgtttgagcacatcagcctcatgaccttggacagtctgcagaaatgtgtcttcagctttgacagccattgccaggagaagcccagtgaatatattgccgccatcttggagctcagtgcccttgtgacaaaaagacaccagcagatcctcctgtacatagacttcctgtattatctcacccctgatgggcagcgtttccgcagggcctgccgcctggtgcacgacttcacagatgccgtcatccaggagcggcgccgcaccctccctagccagggtgttgatgacttcctccaagccaaggccaaatccaagactttggacttcattgatgtactcctgctgagcaaggatgaagatgggaagaagttgtccgatgaggacataagagcagaagctgacacctttatgtttgagggccatgacaccacagccagtggtctctcctgggtcctgtaccaccttgcaaagcacccggaataccaggagcgctgtcggcaggaggtgcaagagcttctgaaggaccgtgagcctaaagagattgaatgggacgacctggcccagctgcccttcctgaccatgtgcattaaggagagcctgaggctgcatcccccagtccctgccgtctctcgctgctgcacccaagacattgtgctcccagacggccgggtcatccccaaaggcattatctgcctcatcagtgtttttggaacccatcacaacccagccgtgtggccggaccctgaggtctatgacccctttcgctttgacccaaagaacatcaaggagaggtcacctctggcttttattcccttctcagcagggcccaggaactgcatcgggcaggcgttcgcgatggcggagatgaaggtggtcctggggctcacgctgctgcgcttccgcgtcctgcctgaccacaccgagccccgcaggaagccggagctggtcctgcgcgcagagggcggactttggctgcgggtggagcccctgagctgagttctgcagagacccactctgaccccactaaaatgacccctgattcatcaaaagtgaggcctagaattaccctaagaccctgttccacagtcctgtattccatcctagatatctactcaaaataattgagacaagtgttcaaacagaaagacgcttgtgcgtgaatgttcatggcagccctattcacagtagccaaacgatgaaaacaaccccaagctatatattaccagatgaaaggataaacaaaatatggtccatccatacaatggagtattacacagccataaaaaggaatgaagcagtgatccccactacactgtggatgaaccttgaatgcatgatactgaatgaaagacatcagatgcaaaaggtcacatagtgtactgtccttttatatgaaatttccagaacaggccaatctgaagagatgtatagtggattggtggctttcagcagctgtggggaggtgggactgaggagcgactgctaatcaggatggggtttcctcctgggatggtgaaaatgttccggacctagatagtgatgaaggtagcacgacactgtgagtgcactaaatgctattgaattggacactttagaatggttgaaatagtgatttttatgtgaattctacctaaacatgctattacagctcatatatactttttccatctggattcttcacaaaagaatatgttgtgagcatctttccatgatattaaatcatcttaggaaacattattttgtgttcttcaaaatgtgcatgttaagtattcaaatcagtcttaaatttttaaaaatatgtaattttagaaaataatttaaaaggttttgtttcagtttgtaagatttcttttctggcactttaatggcttgaggtatcattatcagttacaaattgagttattcttcatcaaatgacttttggagtagagattttatttttatagcaatagatgcacagatattcctgtaagatacaggtgtggttagacacttttctagaacaggcatgccctgcaaactccacagacactgactgtttttgtcctattaagaagtagaccactgagaagggagaaggtgacattttagctttcccaggtaaaagtggttttcatcctcacaccaattttatggactggacgttaactctcttgctcaaggtcactctgagtggaagagtggggataaatctggttcgtttggcatcagaggccatgacttttcctaccacagaagtaattttcaaagtaagtctctgccctaggcacatcagatcacctggggaccactccagagtgagtagacaagactttgacaggggtgcctaatttttttttttttttgagatggagtctcgctctgttgcccaggctggagtgcagtggcatgatctcagttcactgcaacctccgcctcctgcgttcaagtgattgtcctgtctcagcctcccaagtagctgggattacaggcacccaccaccacatccagctaattgttgtatttttaatagaggcggggtttcgccatgttgcactggctggtgttgaactcctaacctcaggtgatccacccgcctcggcctcccaaagtgctgggattacaggcccggtccagtttgatagtttgttatcatgttatacgtacacttagaataatgatccagccatctcattctaacagcaatgagaacttaggctcccctctctactaaaatacaaaagttagctggtcatggtggtgcgggcctgtaatcccagctactcgggaggctgatgcgggagaatcacttgaaacccacaggcggaggttgcagtgagctgaggtggtgccactacgctccagcctgggggagggggacatagcgagactcggtctcaaaaacaaaacaaaacaaaacaaaacaaaacaaaaacaaaacaaaacaaaacaaaacactgccaaactgtttccaaagcatctgcatcgtgtttaatttccataagtaacgtatgagaattctaggtcctccaaataattagcagtccttcgtagtgtcagtttttgtttcagccttccttatgggtatgctgtggcatatccctgagattttaattcgcattttccagtgactaagggtgttgaaccactcgtgccttcctgtgcctatttgacactcctatattttctttggtgaagtgtctgttcaatcatctgctcattaaattttccttcggttgtttgccttcttattgttggattttgagagttctatgtacaagtcctttgtcagtcgtgtgatttgcaagtcttcttcctagtctctgaagtttctttctttcatagagcaaacgttttaaatttttatgaagtaagacttctcagttttatttttggtgaattatgtttatactgccatatataggaactctttgcttaactggaggtcatggagattttctcctacattttcttttaaaagttttatagtttcagagtttacatgtaattccataatctccatttagttaaattttgtatggggtgtgaactgtggtttgactgttttcttgtatatggatatccaattgtttcacacaatttttttgaaaagaatatccttggcagggcacggtagctcacacctgtaatcccagcactttaggaggtcaaggtgggcagatcatgaggtcaggagtttgagaccagcctggccaatatggtgaaaccacgtctctattaaaaatagaaaaattagccaggcgtggtggtgtgtgcctgtattcacagctgcttggatggctgaggcaggagaatcgcttgaacccaggagtcagaggtttcagtgagccgagattgtgccactgcactccagcctgggtgaaagagctagattctctctctcaaaaaaaaaaaaaaaaaaaaggaaagaaagaaagaaaagaaaagaaaatcctttttgctttaacttgccttgcaggtttgtagaaaactcaattgttgaaatttgggtggatatatttctggattttctattctattccatgttggaccaataccacactgccctagtcactgttgcattatagtatatctttaaaggagtaatgggaatccttcaactacattttttccccaataatttttggctattctgcttcctttgtgtttctatgtaaattttatcatcagtgtgtctatttctacaaatagtcctgatagggtttgaattgggatttctgtgaatctatagatcaatctgaggagacttaataatgatattgattctcccaattcatgaatatagtatacccctgtatttatttgttttcttgaatttcttttatcattgttttgtagttttcaccatgacagtcttgcacatattttgttaaatgtacagctgagaatttaattttttctggtgtacaatgctaataaaatggtgctttaaaag

SEQ ID NO: 16851 - protein, 520 aa, Artificial Sequence
  derived and/or modified sequence
MSNKCDVVVVGGGISGMAAAKLLHDSGLNVVVLEARDRVGGRTYTLRNQKVKYVDLGGSYVGPTQNRILRLAKELGLETYKVNEVERLIHHVKGKSYPFRGPFPPVWNPITYLDHNNFWRTMDDMGREIPSDAPWKAPLAEEWDNMTMKELLDKLCWTESAKQLATLFVNLCVTAETHEVSALWFLWYVKQCGGTTRIISTTNGGQERKFVGGSGQVSERIMDLLGDRVKLERPVIYIDQTRENVLVETLNHEMYEAKYVISAIPPTLGMKIHFNPPLPMMRNQMITRVPLGSVIKCIVYYKEPFWRKKDYCGTMIIDGEEAPVAYTLDDTKPEGNYAAIMGFILAHKARKLARLTKEERLKKLCELYAKVLGSLEALEPVHYEEKNWCEEQYSGGCYTTYFPPGILTQYGRVLRQPVDRIYFAGTETATHWSGYMEGAVEAGERAAREILHAMGKIPEDEIWQSEPESVDVPAQPITTTFLERHLPSVPGLLRLIGLTTIFSATALGFLAHKRGLLVRV

SEQ ID NO: 16852 - protein, 504 aa, Artificial Sequence
  derived and/or modified sequence
MAAAKLLHDSGLNVVVLEARDRVGGRTYTLRNQKVKYVDLGGSYVGPTQNRILRLAKELGLETYKVNEVERLIHHVKGKSYPFRGPFPPVWNPITYLDHNNFWRTMDDMGREIPSDAPWKAPLAEEWDNMTMKELLDKLCWTESAKQLATLFVNLCVTAETHEVSALWFLWYVKQCGGTTRIISTTNGGQERKFVGGSGQVSERIMDLLGDRVKLERPVIYIDQTRENVLVETLNHEMYEAKYVISAIPPTLGMKIHFNPPLPMMRNQMITRVPLGSVIKCIVYYKEPFWRKKDYCGTMIIDGEEAPVAYTLDDTKPEGNYAAIMGFILAHKARKLARLTKEERLKKLCELYAKVLGSLEALEPVHYEEKNWCEEQYSGGCYTTYFPPGILTQYGRVLRQPVDRIYFAGTETATHWSGYMEGAVEAGERAAREILHAMGKIPEDEIWQSEPESVDVPAQPITTTFLERHLPSVPGLLRLIGLTTIFSATALGFLAHKRGLLVRV

SEQ ID NO: 16853 - DNA, 1563 bp, Artificial Sequence
  derived and/or modified sequence
atgagcaacaaatgtgacgtggttgttgttggcgggggcatctcaggcatggctgctgccaagttattgcacgattccggactgaacgtggtggttctggaggctcgcgatagggtgggcggcaggacatacactctgcgaaaccagaaagtgaagtatgtcgacctgggaggatcatatgttggtccaactcagaacagaattctcagactagccaaggagttaggccttgagacctacaaagttaatgaagtcgagcgcctgatccaccatgtaaagggcaaatcctatccttttcgtgggccttttccacccgtatggaaccctattacataccttgaccataataacttttggcgaacaatggatgacatgggcagggaaattcccagtgacgctccttggaaagcaccattagcagaggagtgggacaacatgaccatgaaagagctgcttgacaagctgtgctggaccgaaagcgcgaaacagttggccaccttgtttgtgaatctgtgtgtcaccgccgagactcacgaggtttccgctctttggttcctctggtatgtgaagcaatgcggggggaccacccgcatcatctccacaacaaatggtggccaggagcgcaagttcgtcggtggctccggtcaggtttccgaaagaataatggatctcctcggcgaccgggtcaaactcgagagacctgtcatctacattgaccaaacaagggaaaacgtactggtggaaaccctgaatcacgaaatgtacgaggcaaagtatgtgatctcagcaatccccccaaccctgggtatgaagatacatttcaatccaccccttccaatgatgaggaatcagatgatcacccgagtgccactaggctccgtcataaagtgcatcgtgtattacaaagagccattttggcgtaaaaaggactactgcggaaccatgataatcgacggggaagaggcccctgtcgcttacactttagacgacacaaaaccagagggcaactacgctgcaattatgggtttcatcttagcacacaaggctcgcaaacttgctcgcctgaccaaagaagaacggttgaagaaactttgtgagctgtatgcgaaggtcctgggctcactggaggccctcgaaccagtgcactacgaggaaaaaaactggtgtgaggaacaatattcaggggggtgttatactacctacttcccgcctggtatactgacccagtacggccgggtcctgcgacagccggtggaccggatctatttcgctggcacagagacagccacccactggtccggatatatggaaggagccgtggaagccggcgagagggcagccagggagattctgcacgcaatggggaaaatacctgaagatgaaatttggcagtctgagcctgagtcggtggacgtccccgcacaacctataaccacaactttcctggagcgacatctgccaagtgtccctggattgcttcgcctaatcggcctcactacgatctttagtgcaacagcactaggctttctggcacacaagagggggctgttggttagagtctag

SEQ ID NO: 16854 - DNA, 1563 bp, Artificial Sequence
  derived and/or modified sequence
atgagcaacaagtgtgatgtggtggtggtgggcggcggcatcagcggcatggctgctgccaagctgctgcatgacagcggcctgaatgtggtggtgctggaggcccgggacagagtgggcggccgcacctacaccctgaggaaccagaaggtgaagtatgtggacctgggcggcagctatgtgggccccacccagaaccgcatcctgcggctggccaaggagctgggcctggagacctacaaggtgaatgaggtggagcggctcatccaccacgtgaagggcaagagctaccccttccggggccccttcccccctgtgtggaaccccatcacctacctggaccacaacaacttctggaggaccatggatgacatgggccgggagatccccagtgatgccccctggaaggcccccctggccgaggagtgggacaacatgaccatgaaggagctgctggacaagctgtgctggacagagagcgccaagcagctggccaccctgtttgtgaacctgtgtgtgacagctgagacccatgaggtgtctgccctgtggttcctgtggtacgtgaagcagtgtggcggcaccacccgcatcatcagcaccaccaatggaggccaggagaggaagtttgtgggcggcagcggccaggtgtctgagcgcatcatggacctgctgggggacagagtgaagctggagaggcctgtgatctacatcgaccagaccagagaaaatgtgctggtggagaccctgaaccacgagatgtatgaggccaagtatgtgatcagcgccatcccccccaccctgggcatgaagatccacttcaacccccccctgcccatgatgaggaaccagatgatcaccagggtgcccctgggcagcgtcatcaagtgcatcgtgtactacaaggagcccttctggaggaagaaggactactgcggcaccatgatcattgatggagaggaggcccctgtggcctacaccctggatgacaccaagccagagggcaactatgctgccatcatgggcttcatcctggcccacaaggccaggaagctggcccggctgaccaaggaggagcggctgaagaagctgtgtgagctgtatgccaaggtgctgggcagcctggaggccctggagcctgtgcactatgaggagaagaactggtgtgaggagcagtacagcggcggctgctacaccacctacttccccccaggcatcctgacccagtatggccgggtgctgcggcagcctgtggaccgcatctactttgctggaacagaaacagccacccactggagcggctacatggagggcgctgtggaggccggggagcgggccgcccgggagatcctgcacgccatgggcaagatcccagaagatgagatctggcagagcgagcctgagagcgtggatgtgcctgcccagcccatcaccaccaccttcctggagcggcacctgcccagcgtgcccggcctgctgcggctcatcggcctgaccaccatcttcagcgccacagccctgggcttcctggcccacaagaggggcctgctggtgcgggtgtag

SEQ ID NO: 16855 - DNA, 2566 bp, Artificial Sequence
  derived and/or modified sequence
atagcggctcgccgaggcgctggtgcacgggggcagcgcgcagcaggccggcgggcaggcgggcgggctggctggcacgcaggactgggatcgaggcccagaaaacggagcagcgggcaccagggaggcctggaacggggcgagcgccatgagcaacaaatgcgacgtggtcgtggtggggggcggcatctcaggtatggcagcagccaaacttctgcatgactctggactgaatgtggttgttctggaagcccgggaccgtgtgggaggcaggacttacactcttaggaaccaaaaggttaaatatgtggaccttggaggatcctatgttggaccaacccagaatcgtatcttgagattagccaaggagctaggattggagacctacaaagtgaatgaggttgagcgtctgatccaccatgtaaagggcaaatcataccccttcagggggccattcccacctgtatggaatccaattacctacttagatcataacaacttttggaggacaatggatgacatggggcgagagattccgagtgatgccccatggaaggctccccttgcagaagagtgggacaacatgacaatgaaggagctactggacaagctctgctggactgaatctgcaaagcagcttgccactctctttgtgaacctgtgtgtcactgcagagacccatgaggtctctgctctctggttcctgtggtatgtgaagcagtgtggaggcacaacaagaatcatctcgacaacaaatggaggacaggagaggaaatttgtgggcggatctggtcaagtgagtgagcggataatggacctccttggagaccgagtgaagctggagaggcctgtgatctacattgaccagacaagagaaaatgtccttgtggagaccctaaaccatgagatgtatgaggctaaatatgtgattagtgctattcctcctactctgggcatgaagattcacttcaatccccctctgccaatgatgagaaaccagatgatcactcgtgtgcctttgggttcagtcatcaagtgtatagtttattataaagagcctttctggaggaaaaaggattactgtggaaccatgattattgatggagaagaagctccagttgcctacacgttggatgataccaaacctgaaggcaactatgctgccataatgggatttatcctggcccacaaagccagaaaactggcacgtcttaccaaagaggaaaggttgaagaaactttgtgaactctatgccaaggttctgggttccctagaagctctggagccagtgcattatgaagaaaagaactggtgtgaggagcagtactctgggggctgctacacaacttatttcccccctgggatcctgactcaatatggaagggttctacgccagccagtggacaggatttactttgcaggcaccgagactgccacacactggagcggctacatggagggggctgtagaggccggggagagagcagcccgagagatcctgcatgccatggggaagattccagaggatgaaatctggcagtcagaaccagagtctgtggatgtccctgcacagcccatcaccaccacctttttggagagacatttgccctccgtgccaggcctgctcaggctgattggattgaccaccatcttttcagcaacggctcttggcttcctggcccacaaaagggggctacttgtgagagtctaaagagagagggtgtctgtaatcacactctcttcttactgtatttgggatatgagtttggggaaagagttgcagtaaagttccatgaagacaaatagtgtggagtgaggcggggagcatgaagataaatccaactctgactgtaaaatacatggtatctctttctccgttgtggcccctgcttagtgtcccttacctggcttagcgttctgtttcaccagtttccaagtttattgccctcaaaatctttagaatagttaaattggcttgtttaaggttcttgctgccccacaacacaccttgcccatgcacaaggaatgaattttttcctaccattatggctttgtgcttgttcttcctcttacctgtaatagcctcaccttccctagttctttgcattcgtccttagaatactgtattgttacagctgaaagacagtaaagaccatttagtcctcaccttctgttttagagttgagcaaactgaagcccacagaggtggaacttaattacctaagagccacaataagccactggtatctgggggactagaacacaaatccaacgcttttcccacctctttggatgttttccccaattatcctccttcactccctgtcatagttaccgatggtgtcccgttgtgtgggtttactctgtgctaagttgtcttacacttctcaaatgctactcagtatatagccttaagtcttactgttttgtgcggtgtgtctccagctgattttaacttttttgatggtagaaattttatctcttcttccttttgtatcctccattgtatcttcatacaaaggacagtacacacttgggtaattaaaaataaaagttgattgaccat

SEQ ID NO: 16856 - DNA, 1660 bp, Artificial Sequence
  derived and/or modified sequence
aagccagtttgaacttaaggaggaggaactatttggccaaaacacctcctaatatgtagttcagtagagatgccctggagaatgctgcactgttccacatgcctgcaaatattcctctaatgatacagtcccaaggctttggacattgatagactccaggtatggcagcagccaaacttctgcatgactctggactgaatgtggttgttctggaagcccgggaccgtgtgggaggcaggacttacactcttaggaaccaaaaggttaaatatgtggaccttggaggatcctatgttggaccaacccagaatcgtatcttgagattagccaaggagctaggattggagacctacaaagtgaatgaggttgagcgtctgatccaccatgtaaagggcaaatcataccccttcagggggccattcccacctgtatggaatccaattacctacttagatcataacaacttttggaggacaatggatgacatggggcgagagattccgagtgatgccccatggaaggctccccttgcagaagagtgggacaacatgacaatgaaggagctactggacaagctctgctggactgaatctgcaaagcagcttgccactctctttgtgaacctgtgtgtcactgcagagacccatgaggtctctgctctctggttcctgtggtatgtgaagcagtgtggaggcacaacaagaatcatctcgacaacaaatggaggacaggagaggaaatttgtgggcggatctggtcaagtgagtgagcggataatggacctccttggagaccgagtgaagctggagaggcctgtgatctacattgaccagacaagagaaaatgtccttgtggagaccctaaaccatgagatgtatgaggctaaatatgtgattagtgctattcctcctactctgggcatgaagattcacttcaatccccctctgccaatgatgagaaaccagatgatcactcgtgtgcctttgggttcagtcatcaagtgtatagtttattataaagagcctttctggaggaaaaaggattactgtggaaccatgattattgatggagaagaagctccagttgcctacacgttggatgataccaaacctgaaggcaactatgctgccataatgggatttatcctggcccacaaagccagaaaactggcacgtcttaccaaagaggaaaggttgaagaaactttgtgaactctatgccaaggttctgggttccctagaagctctggagggttctacgccagccagtggacaggatttactttgcaggcaccgagactgccacacactggagcggctacatggagggggctgtagaggccggggagagagcagcccgagagatcctgcatgccatggggaagattccagaggatgaaatctggcagtcagaaccagagtctgtggatgtccctgcacagcccatcaccaccacctttttggagagacatttgccctccgtgccaggcctgctcaggctgattggattgaccaccatcttttcagcaacggctcttggcttcctggcccacaaaagggggctacttgtgagagtctaaagagagagggtgtctgtaatcacactctcttcttactgtatttgggatatgagtttggggaaagagttgcagtaaagttcca

SEQ ID NO: 16857 - DNA, 1563 bp, Artificial Sequence
  derived and/or modified sequence
atgagcaacaagtgcgacgtggtggtggtgggcggcggcatcagcgggatggcggccgccaagctgctccacgacagcggacttaatgtcgtcgtgttagaggctcgagacagagtgggcggacgcacatacacgttgcggaaccagaaagtgaagtacgtcgatctgggcggctcatatgtgggccctacccagaacagaatcttgcgattggcgaaggaactgggccttgaaacttataaggtaaatgaggtcgaacggcttatccaccacgtgaagggtaagtcctacccattcagggggccattccccccagtgtggaacccaataacttacctggatcacaacaacttttggcggactatggatgatatggggcgggagatcccaagtgatgccccctggaaagctcccctggcggaagagtgggacaacatgacgatgaaagagctgctggacaagttgtgttggaccgagagcgcaaaacagctagccacattgttcgtgaatctgtgcgtcactgccgagacccatgaggtttccgcactgtggtttctctggtacgtcaagcagtgtgggggcacaactcgcatcatttcaacaaccaatggcggacaagaaaggaagtttgtgggtggttctggccaggtttcagagcgtataatggatcttttgggcgaccgtgttaagttagagagaccagttatatatattgaccagacgagggaaaacgttctggtcgaaacgctgaatcacgagatgtacgaagctaaatacgtgataagcgcaatcccgccaacactgggaatgaagatccacttcaatccacctctccctatgatgcggaatcagatgattacacgcgtgcccttgggaagcgtgatcaagtgcattgtatattacaaggaacccttctggagaaaaaaggattactgcggcaccatgatcatcgacggcgaggaagctcctgtagcctatactcttgacgacacaaagcccgagggaaattacgctgctataatggggtttatccttgctcacaaggcacgtaagctcgcccggctgactaaggaggaaagattgaagaagctttgtgaactgtacgcaaaggtgctgggcagtttggaggctctggagcccgtacactatgaggaaaaaaactggtgtgaggagcagtattccggtggctgttatactacatatttccctccgggtatactaacccagtacggccgcgttctgaggcagcccgtggatcgaatctattttgcaggcacggagaccgccacccattggagcggctacatggagggagcggtagaggctggtgagagagcagctagagagattctccacgcgatgggtaagatccctgaggacgagatttggcagtccgagcctgaaagtgtggacgtccccgcgcaacctattactactacctttttggagagacacctgccaagcgtgcctggactgcttcgcctaatcggacttacaacaattttttcggccactgctctaggatttctggcccacaaacgggggttactcgttagggtatag

SEQ ID NO: 16858 - DNA, 1563 bp, Artificial Sequence
  derived and/or modified sequence
atgagcaacaagtgtgatgtggttgtcgtgggcggtggcattagcggtatggctgcagccaagctccttcatgattccggacttaatgttgtggtcctggaagccagagatagggtgggcggaagaacctatacactcaggaaccagaaggtcaaatacgtggacctgggcggtagctacgttggtcctacacagaaccgaatcctgcggctggcaaaagagctgggcctggagacatataaagtgaatgaagtcgaacggctgattcaccacgtcaagggaaagtcatacccgtttaggggaccgttcccaccagtgtggaatccaatcacatacctggaccacaataatttttggaggacgatggatgacatggggagagaaatcccctctgacgcaccatggaaagcaccactggccgaagagtgggacaacatgactatgaaagaattactggataaactgtgctggactgagagtgcaaagcagctggccacactgtttgttaacttgtgcgtcaccgctgagacacacgaagtatcagccctatggtttctgtggtacgtcaaacagtgtggcggaacaacaagaataatcagtaccacgaacgggggtcaagaaaggaaatttgtgggtggatccggacaggtcagcgagcgtattatggatctcctgggtgacagggttaagctggaacgcccagtcatttacatcgatcagacccgggagaatgtgctggtggaaactctcaaccacgagatgtacgaagctaagtacgtcataagtgcaataccccctacgttgggaatgaaaatccattttaacccacctctgcctatgatgagaaaccagatgatcacacgcgtgcctttaggaagcgtgatcaagtgtattgtttactataaggagccgttttggcgaaagaaagattactgcggaactatgattatcgacggcgaagaagcaccagtggcatatacactggacgatacaaaaccagaggggaactacgccgctattatgggttttattcttgctcataaggctaggaaactggctagacttactaaggaggagcgtctgaagaagctctgcgagctctacgccaaagtcctggggtccctagaggccctggaaccagttcattacgaagagaagaactggtgcgaggagcaatactccgggggttgttacaccacttattttcctccgggaatcttgacacagtatgggagagttctacgccagccggttgaccgcatatattttgccggaaccgaaacagctacccattggtcaggatacatggaaggcgcagttgaggcaggcgaacgtgccgctcgggaaatactgcacgccatgggtaaaatacccgaggacgaaatctggcagtccgaaccggagtcagtggacgtcccagcgcaacccattactaccacctttttggaacgtcatttaccatccgtgccaggtcttttacgactgattggcttgactactatcttttccgctacagccctcgggtttctggctcacaagcggggactgctggtcagggtgtag

SEQ ID NO: 16859 - DNA, 1563 bp, Artificial Sequence
  derived and/or modified sequence
atgagcaacaagtgcgacgtggtggtggtgggcggcggcatcagcggcatggccgccgccaagctgctgcacgacagcggcctgaacgtggtggtgctggaggccagagacagagtgggcggcagaacctacaccctgagaaaccagaaggtgaagtacgtggacctgggcggcagctacgtgggccccacccagaacagaatcctgagactggccaaggagctgggcctggagacctacaaggtgaacgaggtggagagactgatccaccacgtgaagggcaagagctaccccttcagaggccccttcccccccgtgtggaaccccatcacctacctggaccacaacaacttctggagaaccatggacgacatgggcagagagatccccagcgacgccccctggaaggcccccctggccgaggagtgggacaacatgaccatgaaggagctgctggacaagctgtgctggaccgagagcgccaagcagctggccaccctgttcgtgaacctgtgcgtgaccgccgagacccacgaggtgagcgccctgtggttcctgtggtacgtgaagcagtgcggcggcaccaccagaatcatcagcaccaccaacggcggccaggagagaaagttcgtgggcggcagcggccaggtgagcgagagaatcatggacctgctgggcgacagagtgaagctggagagacccgtgatctacatcgaccagaccagagagaacgtgctggtggagaccctgaaccacgagatgtacgaggccaagtacgtgatcagcgccatcccccccaccctgggcatgaagatccacttcaacccccccctgcccatgatgagaaaccagatgatcaccagagtgcccctgggcagcgtgatcaagtgcatcgtgtactacaaggagcccttctggagaaagaaggactactgcggcaccatgatcatcgacggcgaggaggcccccgtggcctacaccctggacgacaccaagcccgagggcaactacgccgccatcatgggcttcatcctggcccacaaggccagaaagctggccagactgaccaaggaggagagactgaagaagctgtgcgagctgtacgccaaggtgctgggcagcctggaggccctggagcccgtgcactacgaggagaagaactggtgcgaggagcagtacagcggcggctgctacaccacctacttcccccccggcatcctgacccagtacggcagagtgctgagacagcccgtggacagaatctacttcgccggcaccgagaccgccacccactggagcggctacatggagggcgccgtggaggccggcgagagagccgccagagagatcctgcacgccatgggcaagatccccgaggacgagatctggcagagcgagcccgagagcgtggacgtgcccgcccagcccatcaccaccaccttcctggagagacacctgcccagcgtgcccggcctgctgagactgatcggcctgaccaccatcttcagcgccaccgccctgggcttcctggcccacaagagaggcctgctggtgagagtgtag

SEQ ID NO: 16860 - protein, 273 aa, Artificial Sequence
  derived and/or modified sequence
MKKTQTWILTCIYLQLLLFNPLVKTEGICRNRVTNNVKDVTKLVANLPKDYMITLKYVPGMDVLPSHCWISEMVVQLSDSLTDLLDKFSNISEGLSNYSIIDKLVNIVDDLVECVKENSSKDLKKSFKSPEPRLFTPEEFFRIFNRSIDAFKDFVVASETSDCVVSSTLSPEKDSRVSVTKPFMLPPVAASSLRNDSSSSNRKAKNPPGDSSLHWAAMALPALFSLIIGFAFGALYWKKRQPSLTRAVENIQINEEDNEISMLQEKEREFQEV

SEQ ID NO: 16861 - protein, 20 aa, Artificial Sequence
  derived and/or modified sequence
AVENIQINEEDNEISMLQEK

SEQ ID NO: 16862 - DNA, 819 bp, Artificial Sequence
  derived and/or modified sequence
atgaagaagacccagacctggatactgacatgcatctatttgcagcttcttctgttcaacccgctcgtcaagactgagggcatttgcagaaatcgcgtcacaaacaatgttaaggatgtgacaaagttggttgccaacctccctaaagattatatgatcactctgaaatacgtccccgggatggacgtgctgccctcccattgctggataagcgagatggtggtccagctctccgacagcctgacagaccttctggataagttttctaacatttcagagggtcttagtaattattccatcatcgataagctggtgaacatagtagacgatctggtggagtgtgtgaaggagaatagcagcaaggacctgaaaaagagcttcaaatcccctgagcccaggctcttcactccggaagaatttttcaggattttcaatcgaagcatcgatgcattcaaggatttcgtagtagcttctgagacaagcgattgtgtcgtcagttccacactctcacccgagaaggacagtagggtttccgtgaccaagccatttatgctgccccctgtggccgcatcttctctgcgcaatgactcctcaagttccaatagaaaggccaaaaacccccccggggattctagccttcattgggccgccatggccctgcccgcactgttctcccttatcatcgggttcgccttcggcgccctgtattggaagaagcggcagccatccctgactagggccgtcgagaacatccagataaatgaggaggacaatgagatctctatgctgcaagaaaaagaaagagaatttcaggaggta

SEQ ID NO: 16863 - DNA, 819 bp, Artificial Sequence
  derived and/or modified sequence
atgaagaagacccagacctggattttgacctgtatttacctgcaacttttgcttttcaaccccctggttaagacagaggggatctgtcgcaatcgcgtcacgaacaacgtcaaagacgtgacgaaactggttgcaaacctgccgaaggactacatgatcacccttaaatatgtgccaggtatggacgtgctgccatcccattgctggataagtgaaatggtggtgcagctatccgacagcctgactgacttactggataaattctctaatatttctgaggggctgagtaactactctattatcgacaaactagtgaatattgtcgacgacctcgtggaatgtgtgaaagaaaactctagcaaagacttaaagaagagttttaagtcacccgagcccagactttttactcccgaagagtttttccgtatcttcaaccggtctatagatgcattcaaggactttgtggttgcgtcggagacgagcgactgcgtggtgtcctccacgctgtcaccggagaaggatagtcgggtatccgttaccaaacctttcatgcttcccccagtcgcagcctctagtctgagaaacgactcatctagctctaatcgaaaagccaagaaccctccaggagactcatcactgcattgggctgctatggcactgcctgctttgttctccctgatcatcgggttcgcgtttggagctttgtactggaaaaagcgccagccttcgctgactagagcagttgaaaatattcagataaacgaggaagataatgagatctccatgctacaggagaaagaacgcgagtttcaggaggtg

SEQ ID NO: 16864 - DNA, 819 bp, Artificial Sequence
  derived and/or modified sequence
atgaagaagacacaaacctggatccttacctgcatctacctccagcttttactcttcaatccactagtgaagacagagggaatttgccggaacagagtgacaaacaatgtcaaagacgtgacaaagctggttgccaatctgcctaaggattacatgatcaccctgaagtacgtgccggggatggacgttctgcctagtcattgctggattagcgagatggtggtccagttgtcagacagcctgactgatttactcgataaattttctaatataagcgagggcctctccaattactctattattgataaactggttaacatcgttgatgacctggtcgagtgcgtgaaagagaatagctcaaaagacctgaagaagagcttcaaatcacctgagcctcgtctgtttacacctgaggaattctttaggatattcaatcggagcattgatgctttcaaggatttcgtggtggccagcgagacaagcgactgtgtggtcagttctaccctgtcaccggagaaagactcccgtgtgtctgttaccaagcctttcatgctcccgcccgtcgctgcatcctccctgaggaacgattccagcagttctaacaggaaggctaagaatccccctggcgatagcagcctccactgggccgccatggcccttcccgctcttttcagcttgattattggcttcgcctttggtgccctgtattggaaaaaacggcagcctagcctcacgcgtgcagttgagaacatccaaatcaatgaagaggataatgagatttccatgctgcaggaaaaggagcgtgagttccaggaggtc

SEQ ID NO: 16865 - DNA, 819 bp, Artificial Sequence
  derived and/or modified sequence
atgaaaaagactcagacgtggattcttacctgtatctaccttcagcttcttctgtttaaccctttggtgaaaacggaagggatctgccgcaatagagtgaccaacaacgtgaaggatgtgaccaagctggtcgccaacctgcccaaagattacatgattactctcaaatacgtccccggaatggatgtgctcccttcacattgttggatctccgaaatggtcgtgcaactttcggattcccttactgacctgcttgataagtttagcaacatctccgaaggactttccaattactcgattattgataaacttgtgaatattgtcgatgatctggtcgaatgtgtgaaggaaaactcgagcaaggatttgaagaagagctttaagtcccctgagccacgcctttttactcctgaagaattctttcgaattttcaacagatcgattgatgcatttaaggactttgtcgttgcctcggaaacttcggattgtgttgtctcgtccactctgagcccagaaaaagacagcagagtgtccgtgactaaaccattcatgctcccacctgtcgcggcctcctcccttcggaatgacagctccagttcgaatcggaaagccaaaaatccacccggtgactcgtcgctgcactgggctgccatggcccttccagccctcttttcactcatcatcggattcgcattcggtgcactttactggaagaaaaggcaaccttcacttactcgggcagtggagaacattcagattaacgaagaagataacgagatctcgatgctgcaagaaaaagagagagagttccaagaagtg

SEQ ID NO: 16866 - DNA, 819 bp, Artificial Sequence
  derived and/or modified sequence
atgaagaaaacccagacttggatactaacctgcatttatctgcagttgctcctatttaatcctctggtgaaaacggagggcatctgtcggaacagggtgacaaacaacgtcaaggacgtgactaagctggtcgcaaatctgcctaaagactatatgataacattgaagtacgtcccgggcatggatgtgctcccatcccattgttggatctccgaaatggtagttcagctcagcgatagcctgacagacctcctggataaattcagcaacatcagcgagggactctccaactactcaatcatagacaagctggtaaatatagtggatgatttggttgaatgtgtgaaagagaactcgtccaaggatctcaagaagtccttcaagagtccagaaccccgtctgttcacccctgaggagttttttcgtatatttaaccgttccatagacgcctttaaggatttcgttgtggcctcagagaccagtgactgcgtcgtgtcgtctaccttgtcccctgagaaggactctcgagtgtcagtgacgaaaccattcatgctgcctcccgtggctgcaagttcattgaggaacgactcctccagcagtaatcgcaaagctaagaatcccccaggcgactcttcgctgcactgggcagccatggctctgcctgcactgttctcactcataattgggtttgcatttggggcactgtactggaaaaaacggcagccttctctgacgagagccgtggaaaacattcaaattaacgaggaggacaatgagatcagtatgctgcaggaaaaggaacgagaattccaggaggtt

SEQ ID NO: 16867 - DNA, 819 bp, Artificial Sequence
  derived and/or modified sequence
atgaaaaagactcaaacttggattctcacttgcatctacctgcagttgctccttttcaacccgctggtgaaaactgaaggaatctgccgcaatcgggtgacgaacaatgtgaaggatgtgaccaagctggtggcgaacctcccgaaggactacatgattacgctgaagtacgtgccgggaatggatgtgctcccgtcgcattgctggatttcagagatggtggtgcaacttagcgactcactgaccgatctgttggacaagttcagtaatatcagcgaaggattgtcaaattacagcataatcgataagctggtgaacattgtagacgacctcgtggagtgcgtcaaggagaattcctcgaaagacctcaagaagtcattcaagtcgcccgagcccagacttttcacgcccgaggagttcttcagaatctttaacagatcgatcgatgcattcaaggacttcgttgtcgcaagcgaaacctccgactgtgtggtgagcagcaccctgagcccggagaaggactccagagtgtctgttactaagcctttcatgctgccgccggtcgcggctagttcgctccgcaacgactcgagctcctcaaaccgaaaggcgaaaaaccctccaggcgacagctcactccactgggcagccatggccctcccggcactgttttcactcatcatcggcttcgcgttcggggccctgtactggaagaagcggcaaccgtcgctgacgcgcgctgtggaaaacatccagatcaatgaagaagataacgaaatctccatgctgcaggaaaaggagcgcgagtttcaggaagtg

SEQ ID NO: 16868 - DNA, 819 bp, Artificial Sequence
  derived and/or modified sequence
atgaagaagacccagacatggatccttacctgtatttatctccagctgctcctcttcaacccgctcgttaagaccgagggaatttgccgcaacagagtgaccaacaacgtcaaggacgtaactaagctggttgccaacctccccaaggattacatgatcactctgaagtacgtcccaggtatggacgtgctgccttcccactgttggatttccgagatggtagtacaactgtctgacagcctgacggacctgttggacaagttttctaacatctctgaaggactgtccaattactcaatcattgataagcttgtcaatatcgtggacgatctcgttgaatgcgttaaggagaatagctccaaggacctgaaaaagagctttaaaagtccagaacccaggctgttcacccctgaggaatttttcaggatctttaacaggtcaatcgatgcattcaaggacttcgtggtggctagcgagactagcgactgtgtggtttcttccaccctgagtcccgaaaaagattcacgcgttagcgttactaaaccgttcatgttgccaccagtggccgccagcagcctcaggaatgattcaagttcatcaaatagaaaagcgaagaaccctccaggcgactcttcattgcactgggcagccatggctctgcccgctctgttctcactgattattggattcgcctttggtgcactctactggaagaagagacaaccatcactgacccgcgccgtggaaaacatccagatcaacgaagaggataatgagatatccatgctgcaagagaaggagagggagtttcaggaggtg

SEQ ID NO: 16869 - DNA, 819 bp, Artificial Sequence
  derived and/or modified sequence
atgaagaaaacacagacttggatcctgacctgcatttatctccagcttctgctttttaacccactggtcaaaactgagggtatatgtcgaaatagagtgacaaataatgtaaaagacgtgacaaaactagtggctaatctgcccaaagactatatgattactctcaagtacgtgcccggaatggatgtactcccaagtcactgttggatctctgaaatggtggtgcagctaagtgatagtttgacggatctcctcgacaaattttcaaatatatcggaggggctgagtaattattcaataatcgacaagcttgtgaatattgtggacgacctggtggagtgtgtaaaagagaattcatctaaagatttgaagaagagcttcaagtctccggagcctaggttgttcacacctgaagaattttttcggatctttaatcgcagtatcgatgccttcaaagatttcgtagtggccagcgaaacatcagattgtgtggtaagctctacactgtcccccgagaaagattccagagtaagtgtaactaagccgtttatgttgcctccagtagccgccagctcccttcgcaatgatagctcttcatccaacaggaaagctaaaaatccccctggggactcctctctgcattgggctgccatggctctgccggcattgttctcactcattatcggtttcgcctttggcgccctgtactggaagaagcggcagccatccctgacacgtgccgtcgaaaacatccagatcaatgaagaagacaacgagatctccatgcttcaggagaaggaaagagagtttcaggaagtg

SEQ ID NO: 16870 - DNA, 819 bp, Artificial Sequence
  derived and/or modified sequence
atgaaaaagacgcagacctggatcctgacttgcatttatctgcaactgctcctctttaatccgttggtgaaaaccgaggggatctgtcgcaatcgggtgaccaacaacgtgaaagatgtcaccaagctggttgcaaatcttccaaaggattacatgatcaccctgaagtacgttcctggaatggacgtcctccctagccattgctggatcagtgagatggtggtgcaactttcggactccctgactgacctgctggacaaattctcgaacatttcggagggattgtccaattactcgatcatagacaagctggtgaacatcgtggacgacttggtggaatgcgtgaaagaaaactccagcaaggacttgaagaagtccttcaaatcgccggaaccgagattgttcactccagaagaattctttcggatcttcaaccgatcgatcgacgctttcaaggactttgtcgtcgcgtcagagacttcggactgcgtggtttctagcaccctctcgcccgaaaaggactcacgggtatccgtcactaagccattcatgctgcctcccgtggctgcatcgagccttcggaatgactcgtcaagctcaaatcggaaggccaagaatccgccgggcgattcatcgctgcattgggccgcaatggccctcccagccctgttcagcctgattatcggattcgccttcggagcactgtattggaagaagcggcagccgtccctcacgcgcgcagtggaaaacatccagatcaatgaggaggacaatgagatctcaatgctgcaggaaaaagaacgcgagttccaggaggtc

SEQ ID NO: 16871 - DNA, 819 bp, Artificial Sequence
  derived and/or modified sequence
atgaaaaagactcagacgtggattctgacgtgtatataccttcaacttctccttttcaacccgcttgtcaagactgagggcatctgtcgcaatagggtgactaacaatgtcaaagatgtgaccaagctggtggcaaatctccctaaagactacatgatcacgttgaagtacgtgcctggaatggacgtgctgccatcccattgctggatatcagaaatggtcgtccagctctcggattcgcttactgatctgctggataagttctcgaatatctcggaaggtctgtcgaattactccatcattgataaacttgtcaacattgtcgacgatctggtggaatgcgtcaaggagaacagctccaaggatctgaagaaatcgtttaagtcgcctgaacccagactctttaccccagaggaattcttccgcattttcaatagatcgattgacgcattcaaagattttgtggtcgcgtccgaaacttcggattgtgtggtgtcctctaccctttcccccgaaaaggattcacgcgtgtcagtgactaagccgttcatgcttcctccggtggctgcctcgtcgttgagaaacgactcgtcgtcctccaatcgtaaagccaaaaatcccccaggggattcatcactccattgggcagcgatggcactgcccgcacttttctcactgattattggcttcgcctttggtgctctgtactggaagaagaggcaaccatcgctcaccagggcagtggaaaacattcagatcaacgaagaagataatgaaatctcgatgttgcaagaaaaagaacgggagttccaggaagtg

SEQ ID NO: 16872 - DNA, 819 bp, Artificial Sequence
  derived and/or modified sequence
atgaaaaagacccaaacttggattctcacctgtatatacctccaactgcttttgtttaacccgctcgttaagacggagggtatttgtaggaaccgcgtgaccaacaatgtgaaggatgtgaccaagctggtggcaaatctcccaaaggactacatgattaccctgaaatatgtgcctggtatggatgtgctcccatcccattgttggatatcggaaatggtggtgcagctctcagatagccttactgatctgctggataagttcagcaacatttccgagggcttgagcaactactctatcattgataagttggtcaacatcgtggacgatctggtggaatgcgtgaaggaaaattcgtcaaaggatctgaagaaatcattcaagtcacccgaaccaaggctgtttactccagaggaattctttaggatctttaaccgatccattgacgcattcaaagattttgtggtcgcgtcagaaacttccgattgtgtcgtgtcatccacccttagtccagagaaggatagcagggtgtccgttacgaaaccatttatgctgccgcctgtggctgctagctccctcagaaacgactcatcgtcatcgaatagaaaggctaagaacccacctggtgactcctctctgcattgggcagcaatggccctgccggcgctgtttagccttatcatcggattcgcattcggagccctttactggaagaaaagacagccatcattgacccgtgcagtggagaatattcaaatcaacgaagaagataatgaaatttccatgctccaggagaaggaaagagaattccaagaggtc

SEQ ID NO: 16873 - DNA, 819 bp, Artificial Sequence
  derived and/or modified sequence
atgaagaaaacgcagacttggatcctaacctgcatctacctgcaactcctgttgttcaatcccttagtgaaaacagaaggcatctgccgtaacagagttacaaacaacgttaaagatgtgacaaagttggtggctaatcttccgaaggattacatgattacactgaagtacgtgcccggcatggatgtgctcccatcgcattgctggatctcggagatggtggtgcagttgtctgactccttgacagatctgcttgataaattttcgaacatcagcgagggcctctccaactactccatcattgataagctggtcaacattgtggatgatttggttgagtgcgtgaaggagaacagtagcaaggacctgaagaagtcctttaaatcaccggaacccaggctgttcacccctgaagaattttttcggatttttaatcgctcgatcgacgcattcaaagactttgtcgtggcatccgagacttccgactgcgtggtgagtagcaccctttcgccggagaaggattcccgcgtgtcggtcactaaaccatttatgcttccgccggtggccgcttcttctctgagaaacgatagtagcagttccaatcgcaaagccaaaaacccccccggagattcttcgctgcactgggctgctatggctttgcccgcactgttcagcttgatcattggatttgcatttggcgcactgtattggaaaaaacgtcagccgtccctgacgcgcgccgtggagaatattcaaataaatgaggaagataacgagatttcgatgctgcaggaaaaagagcgggagtttcaagaagtc

SEQ ID NO: 16874 - DNA, 819 bp, Artificial Sequence
  derived and/or modified sequence
atgaagaagacgcagacttggattcttacctgcatttatctacagctgctactatttaatccattggtgaagacagagggcatctgtagaaatcgagtaactaacaatgtcaaagatgttacaaaactagtcgccaacttaccaaaagattatatgataaccctcaagtatgttcccggtatggacgttctgccttcacactgttggatttccgagatggtagtgcagctttccgatagccttacagacctactcgacaaatttagcaatatcagtgaggggctgagtaattactcaattatagataagctcgttaacattgtggacgacctcgttgagtgtgtgaaagaaaactcctccaaggacctgaaaaagtcctttaaaagtcccgaacccaggttattcacgcctgaagagtttttcagaatcttcaacaggtcaatagacgccttcaaggatttcgtggttgcgtctgaaacctctgactgcgtggtgagttccaccctgagtcccgaaaaagactcgcgggtgtccgtgaccaaacccttcatgcttccccccgttgcggcctcctcattgcggaacgactctagtagttctaaccgcaaggctaagaacccgcccggagactcaagcctgcattgggctgccatggccctgcccgccctttttagcttgataatcggattcgcatttggcgctctttattggaagaagcggcagccatctctgacaagagccgttgaaaacatccaaatcaatgaggaggacaatgagatatccatgctacaggaaaaggagcgggaatttcaggaagta

SEQ ID NO: 16875 - DNA, 819 bp, Artificial Sequence
  derived and/or modified sequence
atgaaaaagacccagacttggattctgacttgtatctacttgcaactattgctattcaatcccctggttaaaacagaaggtatctgcagaaaccgggtgactaataacgtgaaagacgtgactaaactcgtggccaacctgcccaaagattacatgatcaccttaaaatacgttccggggatggacgttctaccatctcattgttggattagtgagatggtggtgcagttgtctgattcgttgactgatctgctcgataagtttagtaacatctccgaaggtctctccaactattcgataatagacaagctagtcaacattgtagatgacctggtggaatgcgttaaggagaactcctcaaaagaccttaaaaagtccttcaaatctccagagccgcgactgtttacccctgaggaattcttcaggatcttcaacaggagtatcgatgcattcaaagattttgtcgttgcttcagaaaccagtgattgtgtggtcagctccacacttagccctgagaaggatagccgggtttccgtgaccaaacctttcatgcttcccccggtggctgctagcagtcttagaaacgactctagttccagtaaccgaaaggccaagaatccccccggcgatagcagtctgcactgggctgctatggcgcttccagcgttgttcagccttattatcggcttcgcattcggtgccctgtattggaaaaagcgccagccaagcctcactcgggctgtggagaacatacagataaatgaggaagataatgagataagtatgctccaagagaaagagcgggagttccaagaagtg

SEQ ID NO: 16876 - DNA, 819 bp, Artificial Sequence
  derived and/or modified sequence
atgaaaaagacccaaacctggatcctgacctgcatctacctgcaactcttgctgtttaatcctctcgtcaagactgaaggtatctgcagaaatcgtgtcaccaacaacgtgaaggacgttactaagctggtcgctaacctgccgaaagactacatgatcactctgaagtacgtcccgggaatggatgtgttgccatcacattgttggatttccgaaatggtggttcagctgtccgactcgctgaccgacctcctggataagttctccaacatctcagaggggctgtcgaactactccatcatcgataagttggtgaacatcgtggacgatctggtggaatgtgtgaaggagaactcgtccaaggacctcaaaaaatcgttcaaaagcccagaaccgcggctcttcactcccgaggaattcttccgcattttcaacaggtctatcgatgcgtttaaggacttcgtcgtggcgtcggaaacctcagactgcgtggtgagctcaactctgtcacccgagaaggattcgcgcgtgagcgtcactaagccttttatgctcccgccagtcgctgccagcagccttcggaatgacagctcgtccagcaatcgcaaggctaagaaccctcctggcgactcgagcctgcattgggcagccatggcactccccgcgctgttctcccttataatcgggttcgcgttcggagccctgtactggaaaaagcgccagccgtccctcacccgcgctgtggaaaatatccagattaacgaggaagacaatgaaatctcaatgctccaggaaaaggaaagggaattccaggaagtg

SEQ ID NO: 16877 - DNA, 819 bp, Artificial Sequence
  derived and/or modified sequence
atgaaaaaaacacaaacctggatcctaacgtgtatttatttgcagcttttgttgttcaacccgttggttaagacggagggcatatgtagaaacagagtgaccaataacgtgaaagatgtgactaagcttgtcgccaaccttcctaaggactatatgatcactttgaaatacgtccccggaatggacgtcttgccttcgcactgctggatttcggaaatggtcgtgcagctcagtgattcattaacagacttgttggataaattcagcaacatctcagaaggtttaagtaactattcaatcattgacaagctcgtgaatattgtcgacgatttggttgaatgtgtgaaggagaactcatcaaaggacctcaagaaatcgttcaaatcaccagagccgaggttgttcaccccagaggagttctttcgcattttcaacagatcgattgatgcctttaaggatttcgtggttgcatcggagacatccgactgtgttgtgtcttcgacactatcaccggaaaaagacagcagggtgagtgtgaccaagcccttcatgcttcctccagtcgcagcttcttccctaaggaatgattcttccagtagcaatcggaaagctaaaaacccaccaggagatagttcgctgcattgggcggcaatggcccttccagcccttttttcgttgatcattggatttgcattcggtgctctctactggaaaaagcggcaaccatctctcactcgtgctgttgaaaatatccaaataaacgaagaggacaatgagatctctatgttacaagaaaaagaacgggaatttcaagaagtt

SEQ ID NO: 16878 - DNA, 819 bp, Artificial Sequence
  derived and/or modified sequence
atgaagaaaactcagacttggatactcacatgcatatatctgcagctcctgttgtttaacccacttgtaaaaaccgaaggaatctgccgaaatcgagtgaccaataacgtcaaggacgtgacgaagttggtcgccaacctacccaaagactatatgattacacttaagtacgtccccggcatggatgtcttgccaagccattgctggatctcagaaatggttgtgcaactcagtgacagtctgaccgatctgctggataaattctctaatattagtgaggggttgagcaactactctatcatcgataaattggtgaacattgtggacgacctcgtcgaatgtgtgaaggaaaattcctccaaagatctaaagaagtcttttaagtcccctgaaccaaggctgttcaccccagaggaattcttccggattttcaatagaagtattgatgcgttcaaggattttgtcgtagcaagcgagacaagtgattgcgtggtttcatctaccctgtctccagagaaagattcacgggtatctgtaactaaaccctttatgttgccaccggtggccgcctcatcacttagaaatgacagctcatcctcaaatcgaaaggcaaaaaatccccccggcgactcgtccctgcactgggctgcgatggcactccccgcgttgttctcacttatcataggcttcgctttcggtgccctttactggaaaaagcgacaacctagtctgactagggccgtggaaaatatacagatcaacgaggaggataatgagatctccatgttgcaagagaaggaaagagagtttcaggaagtc

SEQ ID NO: 16879 - DNA, 819 bp, Artificial Sequence
  derived and/or modified sequence
atgaagaagacccagacttggattctgacttgtatttacctacagcttctgctctttaatcccctggtcaagaccgagggcatctgcagaaatcgggtaaccaacaacgtcaaagatgtcacaaaattggtggccaatctaccaaaggattacatgattaccctgaaatacgtccctggcatggatgttttaccaagtcattgctggatatccgaaatggtcgtgcagctgagcgactcattgactgacctgctggacaagtttagcaatatcagtgagggactctccaattactccataattgacaagctggtcaacattgtcgacgacttagttgagtgtgtgaaggagaacagttctaaggatctgaagaagtcttttaaatccccagaaccacggctgtttacccctgaagaattcttcaggatcttcaacagaagcattgatgccttcaaggacttcgtggtagcttccgagacttccgattgcgttgttagcagtactctgtccccagagaaggatagccgggttagcgttaccaagcctttcatgctgccaccagtggctgcctcctctttacgcaatgacagctcaagcagtaaccgcaaggccaagaatcctcccggtgatagtagtctacactgggccgctatggctctgcctgccctgttctcattaattatcgggttcgctttcggcgccttatattggaaaaaaagacagccatcattaactagagccgtggagaatatacagatcaatgaggaggataacgaaatatcaatgctgcaggaaaaggaacgagagttccaagaggtt

SEQ ID NO: 16880 - DNA, 819 bp, Artificial Sequence
  derived and/or modified sequence
atgaaaaagacccaaacttggattcttacttgcatatacctccaactgcttctgtttaaccctcttgttaagaccgagggcatctgccgaaatagagtgactaataacgtgaaagatgtgaccaagctggtcgcaaacctgccgaaagactacatgattacgcttaagtacgtgccaggaatggacgtgttgccaagccactgctggatctcggaaatggtggtccaacttagcgattcgctcaccgatctccttgacaagtttagcaacatttccgagggattgtcaaactactcaatcattgacaaacttgtcaacattgtggacgatctggtggagtgcgtcaaggaaaactcgtcgaaggatcttaagaagtcattcaagtcgccagagcctagactgttcacccccgaggaattcttccgcatctttaacagatcaatcgacgcatttaaggatttcgtggtcgcgtccgaaacttccgattgcgtcgtgtcctccactctttcccctgaaaaggatagtcgggtttccgtgaccaagccattcatgctgcctcctgtcgccgcgtcgtcacttaggaacgactcctcgtccagcaataggaaagccaagaaccccccaggtgattcgtcgcttcattgggcagcaatggcgttgcctgcactgtttagcttgattataggatttgcatttggtgcactttactggaaaaagaggcaaccctccttgactagggccgtggagaatattcagatcaacgaggaagataacgaaattagcatgcttcaggaaaaagagcgcgagtttcaagaagtg

SEQ ID NO: 16881 - DNA, 819 bp, Artificial Sequence
  derived and/or modified sequence
atgaagaaaacccagacctggatcctgacctgtatctacctgcagcttctgctgttcaatcctctggtcaagactgagggaatctgccgcaaccgggtcaccaataatgtcaaagatgtgaccaagctcgtcgccaaccttcctaaggactacatgattacgcttaagtatgtgcctggaatggacgtgctgccttcacactgctggatctccgaaatggtggtgcagttgtcggattcgctgaccgatctgctggacaagttctcgaatatctccgaaggactgtccaactattctatcatcgataagctcgtcaatatcgtcgatgatctggtggaatgtgtgaaggaaaactcgtccaaggatttgaaaaagagcttcaaatcgccggaaccccggctgttcactccggaagagttttttcggatcttcaaccggtccatcgatgccttcaaagacttcgtggtggcgagcgaaactagcgattgcgtggtgtcatcgaccctgtcaccggaaaaagactcacgagttagcgtgacgaagccttttatgctcccgcccgtggccgcatcgtccctcaggaacgactcgtcatcgtctaatagaaaggccaagaacccaccaggggacagcagcttgcactgggcggcgatggctcttccagctctttttagcctgatcatcggatttgccttcggagctctgtactggaagaaaagacagccttcgctcacccgggctgtggagaacatccagattaacgaagaggacaatgaaatctcgatgctccaagaaaaggagcgcgagttccaggaggtg

SEQ ID NO: 16882 - DNA, 819 bp, Artificial Sequence
  derived and/or modified sequence
atgaaaaagacccagacttggattctcacctgcatttacctgcagctgctgctcttcaaccctctggtcaagactgagggcatatgccgtaaccgggtgactaacaatgtgaaggatgtgaccaagctggtcgccaatcttcctaaggattacatgataactttgaaatacgtgccagggatggacgtgcttccgtcccactgttggatttccgaaatggtcgtgcaactttctgactccctgacggatctccttgataagttttcgaacatttcggaaggcctttcaaactactccattatagataaacttgttaacatagtggacgatctggtggagtgtgtgaaggagaattcgtccaaggatctcaaaaagtccttcaagtcccccgagccgcgcctttttacccctgaggaattcttcagaatcttcaaccgtagcattgatgcttttaaggacttcgtggtcgcctcggagacttcggattgcgttgtctcgtcaaccctgtcccctgaaaaagactcgcgggtgagcgtgaccaagccatttatgcttcctcctgtggcagcctcgtccctgagaaacgattcctccagctcgaaccgaaaggctaagaacccacctggagattcgtcactgcattgggcagcgatggcgcttccagcactgttttcactgatcatcggttttgctttcggcgcgctttattggaagaagcggcaaccttcgcttactagagcagtcgaaaacatccagattaatgaagaggacaacgaaatctccatgctccaggaaaaggaacgggagttccaagaagtc

SEQ ID NO: 16883 - DNA, 819 bp, Artificial Sequence
  derived and/or modified sequence
atgaaaaagacccagacctggatcctcacgtgcatctacttgcagctccttctttttaatccattagtaaagaccgagggcatctgccgtaatcgggtcaccaataatgtgaaggacgtgaccaaactggtggcaaaccttccaaaggactacatgatcacactaaaatacgtgccggggatggatgttctgccctctcactgctggataagcgagatggttgtacagctgtctgactcactgactgatctgttggataagttctccaatatcagcgaaggcttgagcaattacagcattattgacaagctcgtgaatattgtggatgatctagtggagtgtgtaaaagaaaactcaagtaaagacctgaagaagtccttcaagtcccctgaacccaggctgttcacccccgaggaattttttcggatcttcaatcggtccatagacgcatttaaggattttgtggtagcctccgagacatccgactgtgtggtaagcagtacgttgtctcctgaaaaagacagccgcgtgagtgtcacaaaaccgtttatgttacctcctgtggccgcctctagtctgcgcaacgattcttctagctcgaaccgaaaagccaaaaaccctccgggagacagcagcctgcactgggctgccatggccctgccggcgctgttcagcctgatcattgggttcgcgttcggtgccttatattggaagaaacgccagccatccctgacgcgcgcggttgaaaacatccagataaacgaggaagataacgagatttcaatgctgcaagaaaaagagcgggaattccaggaggtc

SEQ ID NO: 16884 - DNA, 819 bp, Artificial Sequence
  derived and/or modified sequence
atgaaaaagacccaaacctggattcttacctgtatctacctccaactcttgcttttcaacccacttgtcaagaccgaaggaatttgccggaacagagtgaccaacaatgtcaaagatgtgactaagctcgtcgcaaaccttcctaaggattacatgattacccttaagtacgtccctggaatggacgtgctcccctcgcattgttggatctcggagatggtcgtgcagctcagtgattctctgaccgacctcttggataagttttccaacatttcggaaggcctgtcgaattactccatcattgacaaactggtgaatatcgtggacgaccttgtggaatgcgtgaaggagaactcctccaaagaccttaagaagtcgttcaaatctccagaaccccgcttgtttactcctgaggagttttttcgcattttcaatcggtcaatagatgcattcaaagattttgtcgttgcatctgaaacttcagactgcgtcgtctctagcactctttccccagaaaaggattccagagtgtccgtcaccaaaccctttatgctgccgcctgttgcggcgtcctcacttcgcaatgacagctcctcatcgaaccggaaggcaaaaaaccctccaggagactcgagcctgcattgggccgcaatggctctgcctgcccttttcagccttatcataggattcgcatttggagcactctactggaaaaagaggcaaccttcgctgacccgtgctgtggaaaacatacagatcaacgaggaagataacgaaatttccatgctccaagagaaggagagagaatttcaagaggtg

SEQ ID NO: 16885 - DNA, 819 bp, Artificial Sequence
  derived and/or modified sequence
atgaaaaaaacccagacatggatcttaacatgcatctatctacagctgctgctgttcaatcccttggtgaagaccgaggggatatgccggaatcgagttaccaacaatgtgaaggacgtcacaaagttagtggctaacctccctaaagattacatgataacattaaaatacgtgcccgggatggatgtcctgccatcccactgttggatatccgaaatggtggtacaactgtctgactcactcacagacctcttggataaattctcaaatatatcagaaggtctctctaattatagtatcatcgataagctcgtgaatattgttgacgatctggtggaatgtgtgaaagaaaactcttctaaggaccttaagaaatcatttaagtctcccgagcccagactcttcactcctgaagagtttttccggattttcaaccggagcattgatgcgttcaaggacttcgtggtggcatccgaaacgtccgactgtgtggtatctagcacgttgtcaccagagaaggactccagagtttctgtgacaaagcctttcatgctgccgccggtcgcggcttcctcgctccgcaatgattcaagcagctccaatcgtaaagctaaaaatccacccggcgacagtagtctgcattgggctgctatggctctccctgctttgtttagcctcatcattgggttcgcattcggggccctgtactggaagaagcggcagccttccctgacccgcgccgtcgaaaatattcaaatcaacgaggaagacaacgagatttctatgcttcaggagaaggagcgagagtttcaggaagtg

SEQ ID NO: 16886 - DNA, 819 bp, Artificial Sequence
  derived and/or modified sequence
atgaaaaagactcagacctggattctgacctgcatttatctgcagctccttcttttcaaccctctggtgaaaactgagggaatttgccggaacagagtgacgaataatgtgaaggatgtcactaagctggtggcaaatcttccaaaagattacatgatcactctgaagtacgtcccaggaatggacgtgttgccttcgcattgctggatctctgaaatggtggtccaattgagcgattcactgaccgatcttcttgataagttttcgaacatctccgaaggtctgtcgaattactccattattgacaaacttgtgaatattgtcgacgacctggtggaatgcgtgaaggaaaacagctcaaaggatctgaagaaatcgtttaagtcgcctgaacctcgcctctttacccctgaagagttttttcgtatctttaatcgttcgatcgatgcgttcaaggattttgtggtcgcatcggagacgtccgactgtgtggtgtcctccactctgtcccctgaaaaggattcaagagtgtcggtgactaagccattcatgctgccacccgtggcagccagctccctgcggaacgactctagctcgtcaaatcggaaagcaaagaaccccccaggagactcctctttgcattgggctgctatggcactgccagcactgttttcgcttatcattggatttgcgtttggcgcactttactggaagaagagacaaccctcactgactagagcagtggagaacatccagataaacgaggaagataacgaaatcagcatgcttcaagagaaggagagagagtttcaagaagtc

SEQ ID NO: 16887 - DNA, 819 bp, Artificial Sequence
  derived and/or modified sequence
atgaagaaaactcaaacctggatcctgacttgcatatacttgcaactgcttctcttcaacccgctggtcaagacggagggaatctgtcgcaaccgggtgactaacaacgttaaagatgtgaccaagctcgtggccaatctgcccaaggactatatgattactctgaagtacgtcccaggaatggacgttcttccatcccactgctggatcagcgagatggtggtccagctgtccgactcacttaccgacctgctcgataagttctcgaacatttctgagggactctcgaactattcaatcatcgacaagctggtcaacatcgttgacgacttggtcgagtgcgtgaaagaaaattcatccaaggacctgaaaaagtcctttaagtcgcctgaaccgcgcctgttcaccccggaggaattcttccggattttcaaccgctcgatcgatgcgtttaaagacttcgtggtggcctccgagactagcgactgcgtggtgtcgtcaactttgtcgccggaaaaggatagcagagtgtcagtgactaagccatttatgctgccgccggtcgcggcgtcctcgctccgcaatgattcaagctcctccaaccgcaaagcgaagaaccctccgggtgattcctcgctgcactgggcagcgatggccctgccagctctgttttccctgatcatcggttttgcgttcggcgccctgtactggaagaaacgccaacccagcttgacgcgcgcggtggaaaacatccagattaatgaagaggacaacgaaatctccatgctccaggaaaaagagcgcgagttccaggaggtc

SEQ ID NO: 16888 - DNA, 819 bp, Artificial Sequence
  derived and/or modified sequence
atgaagaaaacccagacttggattctcacctgtatctaccttcagctccttttgttcaaccctctggtgaaaaccgaaggaatttgtagaaaccgcgtaaccaataatgtgaaagatgtgactaaattggttgctaatctgcctaaggattacatgattactctcaaatacgtccctggaatggacgtcctcccgtcacactgctggatctcggaaatggtcgtccaactgagcgattctctcaccgaccttcttgacaagttttcgaacatttccgaaggcctgagcaactactcaatcatagacaaattggttaacatcgtggatgatcttgtggagtgtgtgaaggaaaacagcagcaaggatctcaagaagtcctttaagtccccggaaccccgtctgtttacccctgaagagttcttccggatctttaacagatcgatcgatgcatttaaggactttgttgtcgcatctgaaacttcggattgtgtggtgagctcaactctttcgcccgagaaagattctagggtgtcagtgactaaaccatttatgcttcctccagtggctgcatccagcctcagaaatgatagctcatcatcaaacagaaaggcgaaaaacccgccaggtgacagctccctgcattgggcagcgatggctcttcctgcgctcttctccttgattataggatttgcatttggagccctctactggaagaaacgacagccatccctcacccgagcagtcgaaaacattcaaatcaacgaggaagataacgagatctccatgttgcaggagaaggaaagagaattccaagaagtg

SEQ ID NO: 16889 - DNA, 819 bp, Artificial Sequence
  derived and/or modified sequence
atgaaaaagacacaaacctggatactgacctgtatctacctccagctgttgctgttcaatcccctcgtgaaaacggaagggatatgccgcaaccgggtgacaaacaacgttaaggatgtcacaaagctggtggccaaccttcctaaggactatatgatcaccctgaagtacgtacccgggatggatgtgctaccctcacactgctggatcagtgagatggttgtgcagcttagcgactccctgacagatctgctggataaattctctaacatctcagagggactttccaattactccatcatagacaagctggtgaatattgtggatgaccttgtcgaatgcgtgaaagagaacagcagcaaggatctgaaaaaaagctttaaatcccctgaacctcggttgttcacccccgaagaattcttcagaatcttcaatagatcaatcgacgccttcaaagattttgtggtggcatcagagacttccgactgcgtggtctcttccactctgagtcccgaaaaagactcaagggtctcagtgacaaaacccttcatgctccctcccgtggcggcatcttctcttaggaacgacagctcctccagcaatcggaaagccaagaacccgcccggcgactcctctcttcactgggctgccatggctcttccggccctgttcagtctgataatcgggttcgcatttggggccctctattggaaaaagcgccagcccagccttaccagggccgtcgagaacatccagataaatgaggaggataatgaaatcagtatgctacaggaaaaagaaagggagtttcaggaggtg

SEQ ID NO: 16890 - DNA, 819 bp, Artificial Sequence
  derived and/or modified sequence
atgaagaaaacccaaacctggatcttgacttgtatctaccttcagctgctgctgttcaacccgctggtcaagacggaaggaatttgccgcaatcgcgttaccaacaacgtcaaggacgtaaccaagctcgtggcgaacctccccaaggactacatgatcacgctcaagtacgtgccgggcatggacgtgttgccatcgcactgctggatttcggaaatggtggtgcagttgtcagacagccttactgatcttctggataagttctccaacatatcagaaggactgtctaattactcgatcatcgataaactggtgaacatcgtggacgacctggtggaatgcgtcaaggagaattcctctaaggacctgaagaagagtttcaaatcaccggaacctcggctgttcaccccggaggagtttttcagaatctttaaccgctcgatcgatgcctttaaagatttcgtcgtggcctccgagacttccgactgcgtggtatcgtcaaccctctcgccggagaaggactcgcgggtgtccgtgactaagccattcatgctgccaccagttgctgcaagctcactcaggaacgattccagctccagtaacagaaaagccaagaaccctccgggtgacagttctctccattgggcagcgatggccctccccgcgctgttctcacttatcatcggattcgcctttggggctctctattggaaaaagcggcaaccttcgcttactcgtgcagtcgagaatatccagattaatgaggaagataatgaaatctccatgctgcaagaaaaggagcgagaattccaggaagtg

SEQ ID NO: 16891 - DNA, 819 bp, Artificial Sequence
  derived and/or modified sequence
atgaaaaaaacccagacatggatactgacctgtatttatctgcagttactgctgttcaaccccttggttaaaacggagggtatctgtcgcaatcgggtgaccaataatgtcaaggatgtgactaagctggtggcaaacctgcctaaggactacatgatcaccctgaaatatgtgcccggcatggatgtgctccctagtcactgctggatttcagaaatggtggttcagctaagcgactccttaacagacctgctggataagttctcgaacatatctgaagggctgtccaattacagtatcatagataagctagtaaatatcgtcgacgacttagtggagtgcgtcaaggaaaacagttctaaggatttgaaaaagagtttcaagtcacctgagccccggctgtttacaccagaggagttctttcggatattcaatcgcagcattgatgcattcaaggacttcgttgtcgctagtgagactagcgactgtgtggtgtccagcactctgtcaccggaaaaggactctcgggtttccgtaacaaagcccttcatgctgccgcccgttgccgcctcctcgctgagaaatgattcatcttcttcaaatcgcaaggccaagaaccctccgggcgacagcagcctacactgggcagcaatggcgctccccgctctattctctctgatcatcggatttgcctttggtgcgttatattggaaaaagcgccaacccagtctcactcgggcggtcgaaaacatccagattaatgaggaagataacgagatctcaatgcttcaggagaaagaacgggagttccaggaggtg

SEQ ID NO: 16892 - DNA, 819 bp, Artificial Sequence
  derived and/or modified sequence
atgaaaaagactcagacctggatcctcacttgcatttatctccaactactgctgttcaatccgctggtcaaaacagagggcatctgtcggaaccgagtgacaaataatgtgaaggacgtgaccaagttggtagcaaatttgcctaaggattatatgattaccctcaaatacgtgccgggcatggatgttctgcctagccactgttggatttcagagatggtagtgcagctttccgatagcctgactgatctgctcgacaaattttcgaatatctctgaaggactcagcaactattccatcatcgacaagctcgtgaatatcgtggatgacctggtagagtgcgtgaaagaaaactcctcaaaggaccttaaaaagtcttttaaatctcctgagcctcgacttttcaccccagaagaattcttcagaatttttaacaggtccatcgacgccttcaaggactttgttgttgcgtcagagacaagcgactgtgtggtcagctccacactgagcccagagaaagactctcgtgtgtctgtcaccaaaccttttatgctcccacctgtggctgcaagcagtcttcgcaatgacagttctagctccaatcggaaggccaaaaacccacctggtgactcgtcactacattgggctgccatggcgttgcctgccctcttttctctaataatcgggtttgctttcggggcgctgtattggaaaaagaggcagccatccctgaccagagctgtggagaatatccagataaatgaggaggacaatgagatatctatgctgcaagagaaagaacgagagtttcaagaagtc

SEQ ID NO: 16893 - DNA, 819 bp, Artificial Sequence
  derived and/or modified sequence
atgaaaaaaactcagacctggattcttacctgtatatatctgcagcttctcttgttcaaccccctcgtgaaaacagaaggcatctgtcgcaaccgtgtgactaacaatgtgaaagatgtgaccaagctcgtagcgaatctgcctaaggactacatgataacactcaaatatgttcctggcatggacgtcctgccgagccactgctggatctcagagatggttgtccagctgagcgattctttgaccgatctattggataagttctcgaacatcagtgagggactttcaaattacagcattattgataagctcgtgaacattgtcgacgacttagtggaatgcgtcaaggaaaactcaagcaaagatctcaaaaagtcatttaaatcgccggagcccagattgtttacccctgaagaattcttccgcatctttaaccggagcatcgatgcctttaaggacttcgtcgtggcatcagagacgtcagattgtgtggtttcatccactctgtcgccagaaaaagattcaagagtctcagtgaccaaacctttcatgctcccaccagtcgccgccagttctttgcgaaacgattcttcgagtagtaaccgtaaggcgaagaacccgcccggcgactcgtccctccattgggccgcaatggcactgccagctctgttcagtctaattattgggtttgcctttggggcgctatactggaaaaaaaggcagcctagcttaacccgcgctgtggaaaatattcagattaatgaggaggataatgagatctcgatgctacaagaaaaggaacgtgagttccaagaagtc

SEQ ID NO: 16894 - DNA, 819 bp, Artificial Sequence
  derived and/or modified sequence
atgaaaaagacccagacctggattctgacctgtatctacctgcaactgcttttgtttaatcctcttgtgaaaaccgaagggatttgcagaaatcgcgtgaccaataacgtgaaggacgtgaccaagctggtggctaacctgcccaaggactacatgattactcttaagtatgtccccggaatggacgtgctgccttcgcattgttggatctccgagatggtcgtgcaactctccgactcgctgactgaccttttggataagttttcaaacatttcggagggactctccaactacagcataatcgataagctggtgaatatcgtggatgatctggtggagtgtgtgaaagaaaacagctcgaaggatttgaaaaagtccttcaaatcaccagaaccccgactttttactcctgaggaattctttcgaatattcaatcgatccatcgatgcattcaaggatttcgtggtggcctcagaaacttccgattgcgtggtatcttccacgttgagccccgaaaaggactcccgcgtgagcgtgactaaacctttcatgctgccacctgtcgcagcgagttctctgcggaacgattcctcatcctccaacagaaaggcaaagaaccctccaggcgactcctcgttgcactgggccgcaatggcacttcccgcacttttttcactcattattggtttcgcatttggtgcactgtactggaagaaaagacagccatccctgacccgcgctgtcgagaatatccagatcaacgaagaggataacgaaatctcgatgctgcaagaaaaggagcgcgaattccaagaagtg

SEQ ID NO: 16895 - DNA, 819 bp, Artificial Sequence
  derived and/or modified sequence
atgaaaaaaacacagacatggatcctcacatgtatatatctgcagctgttactatttaatcctttagtgaaaacagaagggatctgtcgtaaccgggtaactaacaatgtgaaggatgtcacaaaactcgtggccaatttacccaaagattatatgataacgttaaaatatgtacccgggatggatgttcttcccagtcattgctggatctctgaaatggtggtgcagctatcggattcactcactgatctcctcgacaaattttccaacatttctgaggggctttcaaactatagtataatcgataaacttgtaaatattgtggatgatctcgtcgaatgtgtgaaagagaattcctcgaaagatctgaagaaatctttcaaaagtcctgagcctaggctgttcacacccgaagaatttttcaggatctttaaccggtcaatcgatgcattcaaggattttgtcgtagcttcagaaacaagtgattgcgtagtgtcctccactctctcaccagagaaagactctagggtgtccgtaactaaacccttcatgcttcctcccgttgctgcatcctcactacggaatgattccagttcctctaacagaaaagcaaaaaacccccctggggattcaagtctgcattgggctgctatggctctaccagctctgttctctctgataattggatttgccttcggagctctctactggaaaaaacggcaaccctccttgacaagggccgtcgaaaacatacagattaatgaagaagataacgaaatatccatgctccaggaaaaagaacgggaattccaggaagtc

SEQ ID NO: 16896 - DNA, 819 bp, Artificial Sequence
  derived and/or modified sequence
atgaaaaagacccaaacttggatcttgacttgtatttacctgcagctgctgcttttcaacccgctggttaagactgagggaatctgtcggaacagagtcaccaacaatgtgaaagatgtcactaagctcgtcgctaacctcccaaaggactatatgattaccctcaaatacgtacctggaatggatgtgctgccgtcacactgctggatatccgagatggtggtgcaactgtccgacagccttaccgatctcctcgacaaattctcaaatatcagcgagggtttgagtaactactcgatcattgataagctggtgaacatcgtggacgatttggtcgaatgcgtaaaggagaactcgtcgaaggatttgaaaaagtcgtttaagtcgcccgagccgcggctgtttacgccggaagaattctttcggatcttcaatcgatcaatcgacgcattcaaagatttcgtggtggcctctgaaacgtccgactgcgtcgtctcctcaactctgtccccagagaaggattccagagtctccgtgactaagcctttcatgctccctccggtggctgcctccagccttcgcaacgactcgtcgagctccaaccgcaaggccaaaaatccgccgggggactcatctctgcattgggctgcaatggcactgccggcacttttctcactgatcatcggattcgccttcggcgcgctgtactggaagaagcggcagccgtccctgacccgcgccgtggaaaacatccagataaatgaagaggacaatgagatcagcatgctgcaagagaaagagagagaatttcaggaagtg

SEQ ID NO: 16897 - DNA, 819 bp, Artificial Sequence
  derived and/or modified sequence
atgaagaagactcagacatggattctgacctgcatctatctccagttgttgctgtttaaccctctagtgaagacagagggcatatgtcgcaaccgcgtgaccaacaacgtcaaggacgtcactaagctggtggccaacctacccaaagattacatgatcactctcaagtatgtgcccgggatggatgtgctaccaagtcactgctggatcagcgagatggttgtgcaactgtccgatagcttgactgacttgctggataaattctctaatatttccgaagggttaagcaattattcgattattgataagctcgtgaacatcgtcgatgatctggttgaatgtgttaaggagaattcaagcaaagatcttaagaagtcatttaagagtcccgagcctcgattgtttacccccgaggagttcttcaggatcttcaatcgctcaatcgatgctttcaaggacttcgtggtggcctctgaaacatctgattgcgtggtctcctccacactgtccccagagaaggatagtagggtaagtgtcaccaagccgttcatgctgccacctgtggctgcttcctcccttagaaatgacagttcttccagcaatcggaaggccaagaatccccctggtgacagcagcctacactgggccgccatggcattgcctgctttgttttcgctgataatagggttcgcattcggagctttgtattggaagaaaaggcaaccgtcattgaccagggccgtcgagaatatccagatcaatgaagaggacaatgagatcagtatgctccaggaaaaagagcgcgagttccaggaagtg

SEQ ID NO: 16898 - DNA, 819 bp, Artificial Sequence
  derived and/or modified sequence
atgaagaaaactcaaacctggatcctgacgtgcatctatttacagttgctcctgtttaatccccttgttaagaccgaaggcatatgtcgcaaccgcgtcactaataatgtaaaggatgtgaccaagctggtagccaacctacctaaagattacatgataactctgaagtacgtgcccggtatggatgtcctgccaagtcattgttggatttcagagatggtagttcagctgtccgattcactcacagatctgcttgacaaattctccaatatcagtgaaggcctttcaaactatagcataatcgacaagttggtgaatattgtcgacgatctcgtcgaatgcgtgaaggaaaattccagtaaggaccttaagaaaagttttaaaagcccagagcctaggctgttcactcccgaggagttttttaggatcttcaaccgttcaatcgatgcttttaaggatttcgtggtagctagtgagacctcagactgcgtggtgtccagtacgctctccccagaaaaagattctagggtttccgttactaagccatttatgttgcccccagtcgccgcttcttccctacgcaatgactccagctccagtaatcgcaaggcaaagaacccaccaggcgacagctctttgcactgggctgcaatggccctgcctgcgctgttcagcctgattataggttttgccttcggggccctgtattggaagaaacgccagccgtctttgacacgtgctgtggaaaatattcagatcaatgaggaagacaatgaaattagcatgctccaggagaaggagcgagaattccaggaggtg

SEQ ID NO: 16899 - DNA, 819 bp, Artificial Sequence
  derived and/or modified sequence
atgaagaaaacccagacgtggattctgacctgcatctacctgcaattactgctgtttaaccctctggtgaaaaccgagggaatctgtcgaaacagggttaccaataacgttaaagatgttactaagctggtggccaatttacctaaggactatatgatcacacttaaatatgtcccaggcatggatgttctccctagccactgctggatctctgagatggtagtgcaacttagtgactccctgacagacttactcgacaaatttagcaatatttctgagggtttgagcaattacagcatcatagataaacttgttaacatagttgacgacttagtggagtgcgtaaaggagaattctagtaaggacctgaaaaagtccttcaagtcccctgagccccgcctgttcacgcctgaggagttcttcaggatatttaatcggtcgatcgatgcatttaaagactttgtggtcgcctcggaaacctctgactgcgtggtaagttctaccctgtcccctgagaaggattccagagtgtctgtcaccaagccattcatgctaccgcctgttgcggccagctccctgaggaatgactcctctagcagcaatcggaaggcaaagaatccgccaggggactcttccctacattgggctgctatggcactgcccgccttgttctcacttatcatcggctttgccttcggagccctttactggaagaagcggcagccttcgctgacgcgtgccgtcgaaaacatccagataaatgaggaagacaatgaaatatcaatgttgcaggagaaggagagagagtttcaggaagtg

SEQ ID NO: 16900 - DNA, 819 bp, Artificial Sequence
  derived and/or modified sequence
atgaagaagacacagacatggattctgacttgtatctacctgcagctgcttcttttcaaccccctggtgaagaccgaaggaatttgccggaatagagtcaccaacaacgtaaaggatgtgacaaaactggtcgccaacctcccaaaagactatatgatcacacttaaatatgtcccgggaatggacgttctcccttcccattgttggatctccgagatggtagttcagctgtcagattctttgacagacctcctggataaattctctaacattagcgagggcctgagcaactactctattattgacaagcttgtgaatattgtagatgatcttgttgagtgtgtcaaggagaattcctctaaggatctcaaaaagagctttaagagtcctgagcctcgccttttcactcctgaggagtttttccgaatcttcaacaggtccattgatgcctttaaagactttgtggttgcctccgaaacatccgactgcgtggtgtctagcacactgtctccagagaaggacagccgggtgagcgtcaccaagccctttatgttgccgcctgtcgcggcaagctctctgaggaatgattcctcctcctctaacaggaaagctaaaaacccaccgggcgattcctctctgcactgggcagccatggctcttcccgctctgtttagtctgatcatcggattcgcctttggagccctgtactggaagaaacgccagccaagtttgacgcgcgctgttgaaaacatacagattaatgaggaggacaacgagatttccatgctgcaggaaaaggagagagagttccaggaggta

SEQ ID NO: 16901 - DNA, 819 bp, Artificial Sequence
  derived and/or modified sequence
atgaagaaaacccagacctggattctgacctgcatctacctgcagcttctgctgttcaacccgctggtgaaaaccgaaggaatctgccggaatcgggtgaccaataatgtgaaagatgtgaccaagctcgtcgctaacctcccgaaggactacatgattaccctcaagtacgtgccgggcatggacgtgctgccttcccattgctggatttcggaaatggtggtgcaactgtcggattccctgactgaccttttggacaaattctccaacatctctgaagggctctcgaactactcgattatcgacaagctcgtcaatatcgtcgatgatctggttgagtgcgtcaaggaaaactccagcaaagatttgaagaagtctttcaagtccccggagccgcgcctgttcacgcctgaagagttcttccgaatctttaaccggtccatcgacgcctttaaggatttcgtggtagcctcagaaacctcagattgcgtggtgagctccaccttgtcacctgagaaggattcgcgagtgtccgtcactaagcctttcatgctgccaccggtcgcagcaagttctctcagaaacgattcaagctcatcgaacagaaaggcgaagaaccccccgggtgactcgtccttgcactgggctgcgatggccttgccggcgctcttctccctcatcatcggattcgcctttggagcactctactggaagaagcgccagccctcgctgactcgcgcggtcgagaatatccagattaatgaggaagataacgagatctccatgctgcaggaaaaggagcgcgaattccaggaagtg

SEQ ID NO: 16902 - DNA, 819 bp, Artificial Sequence
  derived and/or modified sequence
atgaagaagactcaaacctggattctgacctgtatttacttgcaattgctattattcaaccctctggtgaagacggaggggatttgtagaaacagagttacaaacaacgttaaagacgtgactaagctcgttgctaatcttccaaaagactatatgattactctcaaatacgtcccaggcatggacgtacttccatcccattgttggatatcagaaatggtggtacagctatccgattcactgactgatctactggataaattcagcaacatttccgagggcttgagcaactactccataattgacaagttggtaaacatagtggatgatctagtcgaatgtgtgaaggaaaattcctccaaggacctgaaaaagtcctttaaaagccctgagccaagattgttcactcccgaggagttctttaggatcttcaaccggtccattgacgctttcaaggactttgttgtggcttctgagaccagtgattgcgttgtgtcctcaacactcagccccgagaaggactctcgtgtgtcagtgactaagccctttatgctgccaccagtggccgcttcaagcctgcggaacgacagtagctcctccaatagaaaagctaaaaatcccccaggcgactcaagccttcactgggcagcaatggctcttccagcgctattctcccttatcatagggtttgcatttggcgccctgtattggaagaagcggcagccaagtctgacccgagctgtcgagaatatacagatcaacgaagaagacaatgaaattagcatgctgcaagaaaaggaacgggaatttcaggaagta

SEQ ID NO: 16903 - DNA, 819 bp, Artificial Sequence
  derived and/or modified sequence
atgaagaaaactcaaacgtggatcttgacctgtatctaccttcagcttctgcttttcaatccacttgtaaagaccgagggaatttgcagaaatcgcgtgactaataacgtgaaagatgtgaccaaacttgtggcaaatctgcctaaggattacatgataactctcaaatacgtgcccgggatggatgtcctgccctctcactgttggattagcgaaatggtcgtgcaactctcggatagcttgactgaccttctcgataagttttcaaacatcagcgagggactgagcaattactcgattattgataagctcgtgaacatcgtggatgaccttgtggagtgtgtgaaggaaaattcatcgaaggacctcaagaagtccttcaagtcccccgagccacgtctgttcacgccagaagagtttttcagaatctttaacagatcgattgacgcctttaaggactttgtggtggcaagcgagactagcgactgtgtggtgtccagcactctgtcgcccgagaaagactcccgcgtgtcggtcaccaagccttttatgcttcctccggtggcggcatcctcgcttaggaatgatagctcgtcgtccaacagaaaggctaagaaccctccaggtgatagctctctgcactgggccgcaatggcactgcctgcgctgttctcattgatcattggatttgcatttggagcactgtactggaaaaagagacagccgagcttgactcgagccgtggagaacattcaaatcaacgaagaagataatgaaatcagcatgctccaagaaaaggaaagagaatttcaggaagtg

SEQ ID NO: 16904 - DNA, 819 bp, Artificial Sequence
  derived and/or modified sequence
atgaagaagacacagacttggattcttacgtgcatctatttgcagctgttgttattcaaccctctcgtgaaaacggaggggatatgtcgcaatagagtaacaaacaatgttaaagacgtgaccaaactggtggccaacctgcccaaagactatatgattactctgaaatacgtgccaggaatggacgttctgcctagtcactgttggatatcagaaatggtcgtccagttgtctgactcacttaccgatctccttgataaattctccaatatctctgaaggactttccaattactccattatcgacaagcttgtgaacatcgtcgatgacttagtggaatgtgttaaagagaacagctcaaaggaccttaagaaaagttttaagtcaccagagccccgtctgtttactcccgaagagttttttcgtatcttcaatagatctattgacgccttcaaagactttgtggtcgcttcagagacctcagactgcgtcgtctcatctactttatcaccagaaaaggatagccgcgtcagcgtcacaaaacctttcatgttgccaccagtcgctgcttcttcgctaaggaacgattcgagctcttccaataggaaggccaaaaatccccccggggattcaagcctacactgggctgctatggcgctaccagcgttattttctctgatcatcggctttgcattcggcgccttgtattggaaaaagcgccaaccctctctgacccgagccgtggaaaatatacagatcaatgaagaagacaacgagatctcaatgttgcaggagaaggaaagggagttccaggaagtc

SEQ ID NO: 16905 - DNA, 819 bp, Artificial Sequence
  derived and/or modified sequence
atgaaaaagacacagacgtggattttgacctgtatctatctgcagttactgctgtttaatccactcgtcaagacagaggggatctgtaggaaccgagttaccaacaacgtgaaggacgtcaccaagttggttgccaatctgcctaaggactatatgatcaccttgaaatatgtccccggcatggacgtactgccctcacattgctggatcagtgaaatggtcgtacagttgtctgatagtctcacagacctcctggacaaatttagtaatatctcagaagggctgtccaattactctattattgataaattggtaaacatcgtggatgacctagtagaatgcgtaaaggaaaatagctcaaaagatcttaaaaaatcattcaagtccccagagccgagactttttacaccagaagagtttttccgcatatttaaccggtccatcgatgcattcaaagatttcgtcgtggcgtctgagacatccgactgtgtcgtatccagcacactttccccggaaaaagatagtcgcgtgtccgtgaccaaaccctttatgcttcctcccgtcgctgcatcttctttgcgcaatgactccagttcatccaaccggaaggcaaaaaatccaccaggagactcctccctgcactgggcggccatggcccttcctgcccttttctccctgataatcgggttcgcgtttggcgcactgtactggaaaaagcgccaacctagcctgactcgcgcagtggaaaatatacagatcaatgaggaagacaatgagataagtatgctgcaggaaaaagagagggaattccaggaggtg

SEQ ID NO: 16906 - DNA, 819 bp, Artificial Sequence
  derived and/or modified sequence
atgaagaaaacgcaaacttggatccttacctgtatttacctgcagcttctgctctttaacccactcgtcaaaacggagggcatttgcagaaatcgggtcactaacaacgtcaaagatgttactaagctggtcgcaaatcttcccaaggattacatgatcactcttaagtatgtgccgggaatggatgtgcttccgtcgcattgttggattagcgaaatggtggtccaactttcggactccttgaccgatctcctcgataagttttccaacatttcggaaggactcagcaactactccatcatcgataagctggtgaacattgtggatgacctggtcgaatgtgtgaaggagaattcctcgaaggatctgaaaaagtcattcaaatcgcccgagccacgtctgttcacgccggaagagttttttcggatcttcaaccgctcgatcgatgcgttcaaagatttcgtcgtggcatccgaaacttcggattgcgtggtgagctctaccctgagcccagagaaggattcaagagtgtctgtgaccaagccttttatgcttcctccagtggcagcgtcgtctctgagaaacgattcctccagctcgaatagaaaagccaagaatcctcctggtgactcatccttgcactgggcggctatggctctgcctgcactttttagcctcataattggatttgcgtttggcgctttgtactggaagaagcgacagccatcactgaccagggcagtggagaatattcaaatcaatgaggaagataatgagatctcgatgctccaggaaaaagaaagggagtttcaagaagtc

SEQ ID NO: 16907 - DNA, 819 bp, Artificial Sequence
  derived and/or modified sequence
atgaaaaagacccagacatggatcttaacgtgtatatatctccaactgctgctgtttaacccccttgttaaaaccgaaggcatttgtcggaacagggtaacaaataatgtcaaggacgtgactaaactagtagccaatctgcctaaggattatatgatcacgctcaagtacgtgccaggcatggatgtcctaccgagtcactgttggatcagcgaaatggtggtgcagttatcagacagtcttactgacctgctggacaagtttagtaacatcagtgagggtctctctaactactcaattatcgataagctggtaaacatcgtcgatgacttagtggagtgcgtaaaagaaaattccagcaaggatctcaaaaagtccttcaagagtcctgagccacggctctttacccctgaggaatttttccgtatcttcaatcggtccatagatgcctttaaggactttgtggtcgcctccgaaactagcgattgcgtggtgtcatccaccctttccccagaaaaggattccagggtgtcagtgacgaagcctttcatgttaccccctgttgccgcgagtagcctccgtaatgacagctcttctagtaatagaaaggctaagaatcccccaggcgattcctcccttcattgggctgccatggcgcttcccgcattatttagcctcataatcggttttgccttcggggctctgtactggaaaaagcggcagccttctctgactcgagcagttgaaaacatccagatcaacgaggaggacaacgaaatctccatgttgcaggagaaagaacgcgagttccaggaagtg

SEQ ID NO: 16908 - DNA, 819 bp, Artificial Sequence
  derived and/or modified sequence
atgaagaagacccagacttggattctgacctgcatctacctgcaacttctcctgttcaacccattggtcaagacggagggcatctgccggaaccgtgttactaacaacgttaaggatgttacaaaactagtcgcaaatctgcccaaggactatatgatcactcttaaatatgtgcccggtatggacgtcctgcctagtcattgctggatttccgagatggtggtacagctgtcagacagtctgacggatctgctggacaaattctctaacatcagtgaggggctgagtaactattccattattgataagctagtaaacatcgttgatgacctagtagaatgcgtgaaagaaaattcttccaaggacctcaaaaaaagcttcaagtctcctgagccaagattatttacacccgaggagtttttcaggatttttaatcgttcgatcgatgccttcaaagactttgtcgtcgcctcagagacgagtgattgtgtcgtgtcctctaccctctcccccgagaaagacagtagagtttctgtcacgaaaccctttatgcttccacccgtggccgcttcatccctgcggaacgactcaagctcctcgaatcgtaaagccaaaaatccccccggagatagcagtttacattgggcagccatggccttgcccgcgctgttttcactaattatcggatttgcgtttggcgctttgtactggaagaaaaggcagccatctctcacgcgcgcagttgagaatattcagatcaacgaggaagacaatgagataagcatgctgcaagaaaaggagagggaattccaggaagtc

SEQ ID NO: 16909 - DNA, 819 bp, Artificial Sequence
  derived and/or modified sequence
atgaaaaaaactcagacttggattctcacatgtatctatctccagcttctactctttaatcccctcgtgaaaactgaaggaatatgccgaaaccgggttacgaacaatgtaaaggacgtcactaaactggttgcaaacctgcccaaggattacatgataacactcaaatatgtgccagggatggacgtacttccttcgcattgttggataagtgaaatggtggtccagctgtctgactccctaacagatctattggataagtttagtaacatatcagaagggctatcaaactactctataatcgataaacttgtcaatatcgttgatgatttggtggaatgtgtcaaagaaaattcctcaaaagatctgaaaaagagtttcaaatcacctgaaccacggctgttcactcctgaagagttctttagaatctttaatagatctatcgatgcctttaaagacttcgttgtggcctctgaaacttccgactgtgttgtctcgtctactctctcgcctgaaaaagattctagagtgtctgtaactaaaccttttatgttacctcccgtagcagcaagttctttacgcaatgattcttcatcaagtaaccgaaaagccaaaaacccaccaggggattcttcattgcattgggctgcaatggctttaccagcccttttttcactcatcattgggtttgccttcggagccctctattggaaaaaaagacagccttcactcacacgggctgtggaaaatatccaaataaacgaggaagataacgaaatatcaatgctacaggagaaagagcgagaattccaggaagtg

SEQ ID NO: 16910 - DNA, 819 bp, Artificial Sequence
  derived and/or modified sequence
atgaagaaaacgcaaacctggatactcacttgtatctacctgcaactgctgttgtttaacccactggtgaaaactgaaggaatctgcaggaatcgggtgactaacaacgtgaaagatgtcactaagctggtggcgaatctccctaaggactacatgattacgctgaagtacgtgcccgggatggatgtgctcccatcccattgttggatctcagaaatggtggtgcagctttcggacagcctgactgacctgcttgataagttctcaaacatctcggaagggctctcgaactactctattatcgacaagctggtcaatattgtggacgatctggtggaatgcgtgaaggaaaactcctcaaaggatctcaagaagagctttaagtccccggaaccccggctctttacccctgaggaattctttcgtatcttcaatagatccattgatgcattcaaagattttgtcgtggcgtcggagactagcgattgcgtcgtgtcgagcacgctgtcgcccgaaaaggactccagagtgtccgtgactaaaccattcatgctgcctcccgtggctgcctcgtcccttcgaaacgactcgagctcgtccaaccgaaaggcgaagaacccacctggtgattcctcgcttcactgggcagctatggcactgcccgcgctcttctcactgatcatcggatttgcatttggagccctttactggaagaagagacagccttcgcttacccgggcggtggaaaacatccagatcaacgaagaagataatgagatttcgatgctccaagaaaaagagagagaatttcaagaggtg

SEQ ID NO: 16911 - DNA, 819 bp, Artificial Sequence
  derived and/or modified sequence
atgaagaaaacccaaacctggattcttacttgtatttacctgcagcttcttcttttcaatccgctcgtcaaaactgaaggaatttgtcggaatcgggtcacgaataatgtcaaggacgtcactaagctggtcgcgaacctgcctaaggactacatgattactctcaaatacgtgcccggaatggatgtgctgccttcgcattgttggatcagcgaaatggtggtccagctttcggactccctcacggatttgctggataagtttagcaatatctccgaaggtctgtcgaattactcgattatcgataagctggtcaatatcgtggacgacctggtcgaatgcgttaaagaaaactctagtaaggatcttaagaagtcgtttaagtcgccggagcctcgcttgttcaccccggaggagttctttagaattttcaacagaagcattgatgcgtttaaagactttgtcgtggcatcagagacttcggattgtgtggtgagctcaacgctctcgcccgaaaaggattcaagagtgtcggtgaccaaaccatttatgctccctcctgtggctgcatcatcgctgcggaacgacagctcctcgtccaaccgaaaggcgaaaaacccaccgggtgactcttccctccactgggcggccatggcgcttcccgccctgttctcgctgatcatcggctttgcatttggtgcactgtactggaaaaagcgacaacctagcttgaccagggccgtggagaatattcaaatcaatgaggaggataacgaaatctccatgcttcaagaaaaggaaagagagtttcaagaagtg

SEQ ID NO: 16912 - DNA, 819 bp, Artificial Sequence
  derived and/or modified sequence
atgaaaaagacccagacctggattctgacttgtatatacctgcagctcctgctgtttaatcctctcgtgaaaaccgaaggaatctgtcgcaatagagtgaccaacaacgtcaaggatgtcactaagctggttgcaaaccttcccaaggattacatgattactctcaagtacgtgccagggatggacgtccttccttctcattgctggatctcggaaatggtggtgcaactctccgacagcctgaccgatcttcttgacaaattctccaatatctcggaaggcctgagcaactactcgataattgataaactggtgaatattgtggatgatctcgtcgaatgtgtcaaggaaaacagctcaaaggacttgaagaaatcatttaagtcgcctgaacctcggctgtttaccccggaggaattcttccgcatctttaatcgatcaatcgatgcatttaaggattttgtggtggcgtcggaaacttcggattgcgtggtcagttcgaccctgagcccggagaaggattcccgggtatcagtcaccaaacccttcatgcttcctcctgtggcagcatcgagcctgagaaatgattcctcatcatccaacaggaaagccaagaatcctcctggagattccagccttcactgggcggccatggcactgccggcgttgttttcactcatcattggttttgcatttggtgcactgtactggaaaaagcggcagccttcgctgacccgggccgtcgagaatattcaaatcaatgaagaggataacgagatcagcatgttgcaggagaaggaacgggaatttcaagaggtc

SEQ ID NO: 16913 - DNA, 819 bp, Artificial Sequence
  derived and/or modified sequence
atgaagaagacacagacctggattctgacttgtatctacctccagctgctgctgttcaaccctctcgtgaagacagagggaatctgccggaacagggtcacaaacaacgtgaaagacgttaccaagttagtagcaaatctgccgaaagactacatgatcaccttaaaatacgtaccgggtatggacgtactgccttctcattgctggatttcagaaatggtagtgcaactgtccgatagcctcactgacctgctggacaaattctcgaacatcagcgaagggctgtcaaattacagcattattgataagttggtgaatattgtcgatgatctcgtggagtgtgtaaaggaaaacagtagtaaagatttgaagaagagcttcaagtcaccagagcccagactctttactcctgaagaattcttccgaatattcaataggagcatcgatgcctttaaggacttcgtcgttgcttcggagacctccgactgtgtcgtctcttccacgttgtccccggagaaagatagtagggttagtgtcactaagccgttcatgctccctcccgttgctgcctcctccctgagaaacgattcttcttcttcaaatagaaaggctaaaaacccccctggggattcatcccttcactgggctgccatggctcttcctgccctgttttccctgatcatcgggttcgctttcggcgccctctattggaagaagcgacagccatcactgacccgcgccgtggaaaacatccagatcaatgaggaggataatgaaatctcaatgttgcaggagaaggagagggagttccaggaagtg

SEQ ID NO: 16914 - DNA, 819 bp, Artificial Sequence
  derived and/or modified sequence
atgaagaaaacccagacctggatcttgacctgtatttacctgcagctgctgctgtttaacccgttggtcaaaaccgagggtatctgccgcaatcgcgtgaccaacaacgtgaaagacgtcactaaactggttgcgaacctccctaaggactacatgatcacgttgaagtacgtgcccggaatggatgtgctgccttcgcattgctggatctccgaaatggtggtgcagctttcagactctctgactgacctgctggacaaattcagcaacatctccgagggactttcaaactactcaatcattgacaagctcgtgaatattgtagacgatctcgtggagtgcgtgaaggagaactctagcaaggatctgaagaagtccttcaagagcccggaacccagactgtttactccagaggagttttttcggatcttcaaccggtcaatcgatgcatttaaggattttgtggtcgcttcagaaacctccgactgtgtcgtctcaagcactctcagcccggagaaagactcgagagtgtcagtgactaaacctttcatgttgccgccggtggctgcgtcctcgctgagaaatgactcgtcctccagcaaccggaaggccaaaaacccgccaggagactcgtccctgcactgggccgccatggcgctgccggccctgttctccctgatcatcggctttgcgttcggggccctgtactggaagaagcgccagcccagcctgaccagagcagtagaaaacatccaaatcaacgaggaagataacgaaatctccatgcttcaagaaaaggaacgcgagttccaagaggtg

SEQ ID NO: 16915 - DNA, 819 bp, Artificial Sequence
  derived and/or modified sequence
atgaaaaagacccagacctggatcctgacgtgcatctatctgcagctgctgctattcaatccactggtgaaaaccgagggaatttgccgcaatagggttactaacaatgtcaaggacgttactaaactggttgcgaatctgcctaaagattatatgatcaccctgaagtacgttccaggaatggatgtgctgccatcccactgttggatctcggagatggtagtgcagctgagcgatagtttgacagatctcttggataagtttagcaacatctcggagggcctaagcaattactccattattgataagctggtgaacatcgtcgatgacttggtggaatgtgtgaaagaaaacagctccaaagacctgaaaaaaagctttaagagcccggagccgcgcctgtttactccagaggaattttttcgcatcttcaatcgctctatcgacgcgtttaaagactttgttgtcgcttcggaaacgtccgactgcgtggtgagctcaacgctaagccccgagaaagacagccgcgtgagcgtcacgaagccatttatgttgcccccagttgcggcgagcagcctcaggaatgacagttcaagctcgaatcgcaaagcgaagaatccaccgggggacagcagcctgcattgggcggctatggccttacccgctctgtttagcctgatcatcgggtttgcttttggcgctctgtactggaagaagcgccagccctccctgacccgtgccgttgagaacattcaaatcaacgaggaggataacgaaattagtatgctgcaggagaaggagcgggagtttcaagaggtg

SEQ ID NO: 16916 - DNA, 819 bp, Artificial Sequence
  derived and/or modified sequence
atgaagaagacacagacatggatcttgacctgcatctatttgcagttacttctgttcaacccgttggtgaagacagagggtatctgcaggaacagagttactaacaacgtaaaggacgtgaccaaactggtggcgaacctccctaaagactatatgatcactttgaagtacgtccctgggatggacgttctgcctagccactgttggatttccgaaatggtcgtgcagctctccgatagcctgacagatttgctcgataaatttagtaacatcagcgaggggctttcaaattactctatcattgataagttggttaatattgtcgatgacctcgtggaatgtgttaaggagaatagcagtaaggatctgaagaaaagtttcaagtctcctgagccgaggctgttcacaccagaggagttttttagaatcttcaaccgctctatcgacgcattcaaggactttgtggtcgccagtgagacaagcgactgcgttgttagttcgactctgtcaccggagaaggattctagagtaagcgtgaccaagccattcatgttgcctcctgtggcagccagctccctgagaaacgactcatctagctctaacagaaaggccaaaaacccgccaggcgattcttctctgcactgggctgccatggcactgcccgctctgttcagcctcatcattgggtttgcttttggtgccctgtactggaagaagagacagcccagcctgacccgagccgtggaaaatatacagatcaacgaagaagacaatgagatcagcatgctgcaggagaaggagcgcgagttccaggaggtt

SEQ ID NO: 16917 - DNA, 819 bp, Artificial Sequence
  derived and/or modified sequence
atgaagaaaacccagacttggattttgacctgcatctatctccaactgctgctgttcaatcctctcgtcaaaaccgaggggatctgccggaaccgggtgactaacaacgtaaaggacgttactaagctggtcgctaacctgccgaaagattacatgatcactctcaaatacgtaccgggaatggatgttctcccatctcattgttggatttcggaaatggtggtgcagctttccgacagcctgacggacttgttggacaagttctcaaatatctcggagggtctgagcaattactccatcatcgataagctggtgaacatcgtcgatgatttggtggaatgcgtgaaggaaaattcgtctaaggacctgaaaaagtccttcaagtcgccggaaccacgcctcttcaccccggaagagttctttagaatctttaatcgtagcatcgacgccttcaaggattttgtggtggcgtctgaaacctcagactgcgtggtgagctcaaccctgtccccggaaaaagactcccgcgtgtcagtcactaagcctttcatgctgcctccggtcgccgccagctcccttaggaacgacagttcatcttccaaccgcaaggcaaagaatccacccggagacagttcgttgcactgggctgccatggcgctcccagcgcttttttcgctgatcattggcttcgcattcggagccctctactggaagaagcgccagccctctctgactagagcagtcgaaaacattcaaatcaacgaggaagataacgagatcagcatgctccaagagaaagagcgggagttccaggaagtg

SEQ ID NO: 16918 - DNA, 819 bp, Artificial Sequence
  derived and/or modified sequence
atgaaaaagacgcagacatggattcttacttgtatatatctgcagctcttactctttaatcccttagtcaagacggaagggatttgccggaacagagtaaccaacaacgttaaggatgtcaccaagctagttgccaaccttccaaaggactatatgattacactgaaatatgtgcccggcatggatgtgctcccaagccactgttggatatctgagatggtggttcaacttagtgactctctcaccgacctgctagacaaatttagtaacatctcagagggcctgagtaactatagcattatcgacaagttagtgaatatcgtggatgacttagtggagtgtgtgaaggagaattcatccaaagacctgaaaaaaagctttaaatcccccgaaccacgcctgttcacccctgaagagttttttagaatattcaatcgctccattgatgcttttaaagacttcgtggtggccagcgagaccagcgactgtgtagtttcatctaccctcagcccagagaaggactcccgagtgtcagtgacaaaaccattcatgctgcctccagtggctgcctctagtctccggaatgactcctcttccagtaaccgcaaggctaagaacccgccgggcgacagtagccttcactgggcggcaatggctcttcccgcactcttctctcttattatcgggttcgcctttggggctctatattggaaaaagcgccagccatcacttacccgcgccgtggagaatatccaaattaatgaagaagataacgagataagcatgctgcaggagaaggaacgcgagtttcaggaggtg

SEQ ID NO: 16919 - DNA, 819 bp, Artificial Sequence
  derived and/or modified sequence
atgaagaaaactcaaacttggatcctgacttgcatttatctgcaactcctcctgtttaatcctcttgtaaaaaccgaagggatctgcaggaaccgggtgaccaacaatgtgaaggatgtgacgaagctggtggccaacctcccgaaggactatatgatcaccttgaagtacgtcccggggatggacgtgctcccttcacactgctggataagcgagatggtggtgcagctgtcggattcgctgaccgacctgctcgacaaattctcgaatatcagcgaaggcctgagtaactactccatcatcgacaagctggtgaacattgtggatgacctggtcgaatgtgtcaaagagaactcctctaaagatctcaaaaagtcgttcaaatcgccggaacctaggctgttcactccagaagagtttttccggatattcaacagatcaatcgacgcttttaaggacttcgtcgtcgcaagcgaaaccagcgattgcgttgtgtcctccacgctctccccagaaaaagatagccgggtttcggttaccaagcccttcatgttgcctcctgtggctgcgtcatccctgcgtaacgatagctctagctcaaatagaaaggccaagaatcccccaggcgattcgtccctccattgggcagctatggcccttccagcacttttttcgttgatcattggattcgctttcggagccctctactggaagaaacgccagccgtcactcactcgcgcggtggaaaacatccaaatcaatgaggaggacaacgaaatcagtatgctgcaggaaaaggaaagagagttccaggaagtg

SEQ ID NO: 16920 - DNA, 819 bp, Artificial Sequence
  derived and/or modified sequence
atgaagaagacacaaacctggattctgacctgtatctacctgcaactcctgttattcaatcccctagtcaaaactgaagggatttgtaggaacagggtgacaaacaacgtcaaggatgttactaaactggtggcgaacctacctaaggactatatgatcacattgaagtatgtcccaggtatggatgtacttccatcacattgctggatttcggagatggtcgtgcagctatcagattctctcactgacctcttggataagttcagtaacatctctgagggactgtcgaactactcgattattgataagcttgtcaatatcgtggatgatctcgtcgaatgtgtcaaagagaacagtagtaaggacctcaagaaatctttcaaatctcctgagccgcgccttttcacaccggaggagttctttcgcatcttcaaccgttcaattgatgcgttcaaggatttcgtcgtcgcctctgagacatctgactgcgtcgtcagtagtacactgtcccccgaaaaggactcccgagtaagtgtcaccaaacctttcatgctacctcccgtggctgcttcctcgctgaggaacgattctagctcatccaacaggaaggccaagaatcccccgggggatagttcccttcattgggctgccatggcgctacctgccctgttcagcttaatcatcggcttcgcgtttggggcgttgtattggaagaagaggcagccatcgctaacgagagccgtagaaaacatccagatcaacgaggaggacaatgaaatttcgatgcttcaggaaaaggaacgcgaattccaggaggtc

SEQ ID NO: 16921 - DNA, 819 bp, Artificial Sequence
  derived and/or modified sequence
atgaaaaagactcaaacctggatccttacttgtatatacctgcaacttctgctctttaatcctttggtaaagaccgaaggaatctgtcgcaacagagtgactaataacgtgaaggacgttaccaagctcgtcgcgaaccttccaaaagactatatgatcacccttaagtacgtgccgggaatggacgtcttgccctcgcattgctggatctcagagatggtggtgcagctgtccgacagcctgacggatcttctcgacaagttctccaacatctccgaagggttgagtaactactctattatcgacaaactcgtgaacatcgtggacgatctggtcgaatgcgtgaaggaaaacagcagcaaagatctgaagaagagcttcaaatccccggagccgaggttgttcactcctgaggagtttttccgcatcttcaacagatcaatcgacgcgtttaaggattttgtggtggcgtccgaaacctcagactgcgttgtgagcagtaccctctcacctgaaaaggactcccgggtgtcagtcactaagcctttcatgctcccacctgtagctgcctcgtctctgcgcaatgattcctcatcctcgaatagaaaggccaagaatccgccaggggattcgagcctccactgggctgcaatggctctgccagccctgttcagcctgatcattggtttcgccttcggcgcactctactggaaaaagaggcaaccctcactcacccgggctgtcgagaacatccagatcaacgaggaggataatgaaattagcatgctgcaggaaaaggaacgagaattccaggaagtg

SEQ ID NO: 16922 - DNA, 819 bp, Artificial Sequence
  derived and/or modified sequence
atgaaaaagactcagacatggatcttgacctgcatctacctgcagctgctgctgttcaatccattggtcaaaaccgagggtatatgcagaaatagagtaacaaataatgtgaaagacgtgacaaaactcgttgccaatctgcccaaggactatatgattacactcaaatacgtgccaggcatggacgtattgccatctcactgctggatatctgagatggtggtgcaactatctgactcgctcacggacctccttgacaagtttagtaacatttcagaagggctgagtaactattccattatcgacaaactggtcaacatcgtagacgacctggtagaatgtgtgaaagagaattcatccaaagacctgaaaaagtcctttaaaagcccagagcctagactttttaccccagaggagttttttagaatctttaaccgttccattgacgctttcaaggattttgttgtggccagtgaaaccagcgattgcgtcgtgtctagtactctgagccccgagaaggattccagggttagcgtcactaagcccttcatgctgccccctgtggctgcctcaagcctgagaaacgattccagttcatctaaccggaaggcaaagaacccccccggtgactctagcctgcactgggccgccatggctctccccgctctcttttccctcatcatagggttcgcattcggggcactatattggaaaaagcgccaaccatccctgacacgcgccgtcgaaaatattcagataaatgaggaagataacgagatttccatgttgcaggagaaggaaagagagttccaggaagtg

SEQ ID NO: 16923 - DNA, 819 bp, Artificial Sequence
  derived and/or modified sequence
atgaaaaagactcagacttggattctgacatgcatatacctccagctgctgctgtttaaccccctcgttaaaactgagggtatatgcaggaaccgtgtgaccaacaatgtgaaggatgtaactaaactcgtggctaacttgccaaaggattatatgattaccctgaaatatgtgcccggtatggacgtcttgccaagccactgttggatatctgaaatggtggtgcagctttctgactcccttaccgatttgctggacaagttttccaacatttccgagggcctctccaactatagtatcattgacaagctggtgaacatcgtcgacgatctcgttgaatgcgttaaagagaattcaagcaaggatttgaagaagagcttcaagtcccccgaacccagattgttcacccccgaggagtttttcaggatttttaaccgctccatcgacgcatttaaggactttgtagtggcttccgagactagtgactgtgttgtgtccagcaccctgtctcccgaaaaggactctcgcgtttctgttacaaagcctttcatgctcccccctgtagccgcttccagtcttaggaatgacagttctagctccaaccgcaaggctaagaacccccctggcgattcctctttgcattgggctgcaatggcattgcccgctcttttcagcctgatcatcggattcgctttcggagccctctactggaaaaaacgccagcccagtctcactcgcgctgttgaaaatatccagatcaacgaggaggataatgaaatatctatgctgcaggaaaaagagagggaattccaggaagta

SEQ ID NO: 16924 - DNA, 819 bp, Artificial Sequence
  derived and/or modified sequence
atgaagaaaacacagacttggatccttacatgtatttacctgcaactgttactgttcaatcctcttgtaaagacagaagggatatgcagaaaccgtgttacgaataacgttaaagacgtaacaaaactggtcgccaacctgccgaaagattatatgatcactcttaagtatgttccgggaatggatgtacttccgagccattgctggatttccgagatggtagtccagttatcggactcactaacagacctcctagacaaattttcaaatattagcgaaggacttagtaattactcaattatcgataagcttgtaaatatcgtagacgatttggtagagtgcgtcaaagagaatagttcaaaagatcttaaaaaatcattcaaatctccagaacctaggttgttcacaccggaagaattttttcgcattttcaatcgctcaatcgatgcgtttaaagactttgtggtggcgtccgaaacgagcgattgtgtcgtcagcagtacgctttctccggaaaaagattctagagtatctgtaaccaagccgtttatgctaccgccggtggcggcttccagtttacggaacgatagctcaagctcaaacaggaaagccaaaaacccgccgggtgattctagtttacattgggctgcgatggcacttccggctttgtttagtttgatcattggttttgcgtttggcgcactttattggaagaagcgacaaccctctctaacacgtgccgtagagaatattcagattaatgaggaagacaacgaaatctctatgcttcaagaaaaagaaagagaatttcaagaagtc

SEQ ID NO: 16925 - DNA, 819 bp, Artificial Sequence
  derived and/or modified sequence
atgaagaaaactcagacctggatcctgacctgtatttacttgcaactgcttctctttaaccctctggtcaagactgaaggaatttgccgcaatcgagtcactaataacgtcaaggacgtcaccaagctcgtggccaacctgcccaaagactatatgattaccctcaagtacgtgccgggaatggacgtgctcccgtctcattgttggatatccgaaatggtggtgcagctgtcagactccctcacggatctgctcgacaaattctccaatatctcggaaggactttccaattacagcattattgataagttggtgaacattgtggatgatcttgtcgaatgtgtgaaggagaactccagcaaggatctgaagaagagcttcaaatccccagagccccgtcttttcacccccgaagagtttttcagaatctttaatcgcagcatcgacgcatttaaggattttgtggtggccagcgagacgtcagattgcgtggtttcatcaactctgtcaccagaaaaggattcacgggtttcggtgaccaaaccttttatgcttcctccggtggccgcgtcatcgcttagaaacgatagctcatcatcgaatcggaaggcaaagaaccctcccggcgactctagcctgcactgggcagcaatggcactcccggctcttttttctcttatcatcggctttgccttcggtgcattgtactggaagaaaagacagccatcccttaccagagcagtcgaaaacatacagattaacgaagaagataacgaaatttccatgcttcaggaaaaagagcgcgagttccaagaagtg

SEQ ID NO: 16926 - DNA, 819 bp, Artificial Sequence
  derived and/or modified sequence
atgaaaaaaacgcaaacgtggatattaacgtgtatatatttacaattattattatttaatccgctagttaaaacggaaggtatatgtcgtaatcgagtaacgaataatgtaaaagatgttacgaaactagtagcgaatttaccgaaagattatatgataacgttaaaatatgtaccgggtatggatgttttaccgtcgcattgttggatatcggaaatggtagttcaattatcggattcgctaacggatttactagataaattttcgaatatatcggaaggtctatcgaattattcgataatagataaattagtaaatatagtagatgatttagttgaatgtgtaaaagaaaattcgtcgaaagatctaaaaaaatcgtttaaatcgccggaaccgcgattatttacgccggaagaattttttcgtatatttaatcgatcgatagatgcgtttaaagattttgtagtagcgtcggaaacgtcggattgtgttgtttcgtcgacgttatcgccggaaaaagattcgcgtgtatcggttacgaaaccgtttatgctaccgccggttgcggcgtcgtcgttacgtaatgattcgtcgtcgtcgaatcgtaaagcgaaaaatccgccgggtgattcgtcgttacattgggcggcgatggcgttaccggcgctattttcgctaataataggttttgcgtttggtgcgctatattggaaaaaacgtcaaccgtcgttaacgcgagcggtagaaaatatacaaataaatgaagaagataatgaaatatcgatgctacaagaaaaagaacgagaatttcaagaagta

SEQ ID NO: 16927 - DNA, 819 bp, Artificial Sequence
  derived and/or modified sequence
atgaagaaaacccaaacctggatccttacctgtatatacctccaactgctcctctttaacccgctcgtgaaaactgaaggaatctgtagaaacagagtcactaataacgtgaaggatgtgaccaagctcgtggctaacctgccaaaggattacatgattaccctcaagtacgtgccaggaatggatgtgcttccttcccactgttggatctccgaaatggtggtccagcttagcgattctcttacggatctgcttgataagttctcgaacattagtgaaggtctttccaattacagcatcatcgacaagctggtcaatatcgtggatgatctggtggagtgtgtcaaagaaaactcatcgaaagatctgaaaaagtcctttaagtccccagagccgagactgttcacccctgaggaattcttccggatattcaacaggtcgattgacgcatttaaggattttgtcgtcgcttcggagacttcagattgcgtggtgtcctcgactttgtcaccagagaaggatagcagagtgtccgtgaccaagcctttcatgcttcccccagttgccgcatcctcacttcgaaacgatagctcaagcagcaatcggaaagcaaagaatcctccaggtgattcttccctgcactgggccgcaatggcacttccagctcttttttcgctgattatcggatttgcgtttggggccctgtactggaagaagagacaaccttctctcaccagagcagtggagaacattcagataaatgaggaggacaatgaaatttccatgcttcaagagaaagaaagagaatttcaagaagtg

SEQ ID NO: 16928 - DNA, 819 bp, Artificial Sequence
  derived and/or modified sequence
atgaagaagactcaaacgtggatactcacatgtatataccttcagttgctgctatttaacccgctggtaaaaaccgagggtatttgtaggaatcgagtcacaaataatgtcaaggatgtcaccaaattggtagccaatctcccaaaggactacatgatcacactcaaatacgtgcccggcatggacgtgctgcccagccattgctggatttctgaaatggtggttcagctttccgactctctgaccgacctgctcgataaattttctaacatatctgaagggctgagtaactacagcatcatcgacaaactggtcaatatagtggacgatctggtcgagtgtgtgaaagaaaactcctcgaaagatctgaagaagtcctttaagagccccgagcctcgcctgttcaccccggaggagttcttccggattttcaaccgctccattgatgcattcaaggacttcgttgttgcgtctgagacttccgactgtgtagtgtcgagcacactcagcccagaaaaagatagcagagtgagtgtcaccaagccctttatgctgccccccgtggctgccagtagcctgcgaaatgatagctcaagtagcaatcgaaaggctaagaatcctcctggtgacagcagcttacactgggccgctatggccttgcccgccttgttttctttgatcatcggattcgctttcggggctctgtactggaagaaaagacagccctcactgacgagagctgtggagaatattcagattaatgaggaagacaatgagatctcaatgctgcaggagaaagaaagagaatttcaggaagtg

SEQ ID NO: 16929 - DNA, 819 bp, Artificial Sequence
  derived and/or modified sequence
atgaagaagacccaaacgtggattctcacttgcatctacctccagttacttttgttcaacccgctggtgaagactgagggtatatgccgtaacagagtcacgaacaacgtcaaggacgttactaagctcgtcgctaacttgcccaaggattacatgatcaccttgaagtatgttcccggcatggacgtgcttccctcccactgctggatttcggagatggtcgtgcagctgagcgactcgctaactgacctgcttgataagttcagcaatatctcagaaggcctctccaactattctatcatcgacaagctggtgaacattgtcgatgatttggtcgagtgtgtgaaggagaactcatccaaggacttgaagaagtcttttaagagtcctgagcctcggctgttcacgccggaggagttcttccgaattttcaatagatccatcgacgcctttaaggacttcgtcgttgcatcagagacctcggattgcgtcgtgtcttccaccctgtccccggagaaagactcccgagtgtcggtcactaagccctttatgcttccgcctgttgccgccagcagtctccgtaacgattccagcagttcgaatcgtaaggcgaagaacccccccggtgatagcagcctgcactgggccgcaatggcactgcctgcccttttcagccttatcattggattcgcctttggtgcgctgtactggaagaaacgacagccaagcctaacgagggcggtcgaaaacatccaaataaacgaggaagacaacgagatcagtatgctgcaggagaaggagcgcgaattccaggaggtg

SEQ ID NO: 16930 - DNA, 819 bp, Artificial Sequence
  derived and/or modified sequence
atgaagaaaacccagacttggatcctcacttgcatctacttgcaactgttgctgttcaacccgctggtcaagaccgagggaatctgccggaacagggtgaccaacaacgtgaaagatgtgactaagctcgtcgccaacctgccgaaggactacatgatcactctgaagtacgtgcctggaatggatgtgcttcctagccactgttggatctcggaaatggtcgtgcagctgtcggactcgctgaccgatctcctggataagttttcaaatatctcagagggactgagcaattactcaatcatcgacaagctggtcaatattgttgacgacctcgtggaatgcgttaaggaaaactcctccaaggatctgaaaaagagcttcaaatcaccagagcctcggctcttcactccggaagagttcttccggatctttaatcgttcgatcgacgccttcaaagatttcgtggtggcctccgagacttcagattgcgtggtcagctcaaccctgtccccggaaaaggacagccgcgtgagcgtgaccaagccatttatgctccccccggtggcggcttcctcgctcagaaatgactcctcgtcgtccaaccggaaggcaaagaacccgccgggagattcatcactgcactgggccgcaatggcactgccagccctttttagccttatcattggattcgcgttcggggcgctgtactggaaaaagcgccagcccagcttgactcgggcagtggagaatatacagatcaacgaggaggacaacgaaatctcgatgctccaagagaaagagagagagttccaggaggtg

SEQ ID NO: 16931 - DNA, 819 bp, Artificial Sequence
  derived and/or modified sequence
atgaagaaaacacagacctggatccttacatgtatctacctgcagctcctcctgtttaacccgctggttaaaacagaaggtatatgtaggaacagggtaacaaacaacgttaaagatgttaccaaactggtggctaacttgcccaaggactatatgataactctgaagtacgtccccggaatggacgtgttgccgtcacactgttggattagcgagatggtggtgcagcttagcgattctctgacagacctgttggacaaattcagcaatatttcagagggcctgtccaactattctatcatcgataaattggtcaatatcgttgacgatctggtcgagtgcgtcaaagagaacagcagcaaagatcttaagaagtcctttaagagccctgagccgagactgttcacccctgaagagtttttccgcatctttaaccgcagcatcgacgcctttaaagatttcgttgtagccagtgagacctctgattgcgtggtgagttctactctgagtcctgaaaaagactccagagttagcgtgaccaaaccatttatgctgccccctgtggccgcatctagtctgaggaatgattcctcatcttccaacagaaaggctaaaaaccctcccggtgattctagcctgcattgggctgcaatggctcttcctgctttattcagcctcatcatcggcttcgcatttggtgcattgtattggaaaaagcggcagccgtcccttacaagagcggtggagaatatccagatcaacgaagaagacaacgagatatcaatgctgcaagaaaaggaacgagagttccaagaagtt

SEQ ID NO: 16932 - DNA, 819 bp, Artificial Sequence
  derived and/or modified sequence
atgaagaagactcagacctggatcctcacctgtatttacctgcaacttttgctttttaatcccctcgtgaaaacggagggcatatgcaggaaccgggtgactaacaatgttaaggatgtgacgaaactggtggccaatctgcccaaggactacatgatcactctgaagtacgtgcctgggatggatgtgcttccctcacactgttggatatctgaaatggtggtacagctctctgattccctgaccgacctcctcgacaaattttccaacatctctgaaggcctgtcaaattattctatcatcgataagcttgtcaacatcgtggatgacctggtcgaatgcgtaaaggagaatagttcaaaagaccttaagaagagctttaagagcccagaaccccgattgtttacccctgaggaatttttcaggatctttaatcggtccattgatgcttttaaggattttgtcgtcgcctctgagaccagcgactgcgttgtgtccagcacactctctcctgaaaaggactctagagtgagtgtgacgaagccctttatgcttcccccagtggctgccagctccctgaggaatgacagttcatcatctaaccgcaaagccaaaaaccccccgggcgacagctctctgcattgggccgccatggccctgcccgcactgttttccttgatcatcgggttcgcttttggcgccttgtattggaaaaagagacagccgagccttacacgcgccgtagagaatatacagatcaatgaagaggataacgagatctcaatgcttcaggagaaggaaagagagtttcaggaggta

SEQ ID NO: 16933 - DNA, 819 bp, Artificial Sequence
  derived and/or modified sequence
atgaagaaaactcagacctggattctcacctgcatctacttgcaacttctgctgtttaaccctctggttaaaacggaaggtatatgccgcaatcgagtcacgaacaatgtgaaagatgtaaccaaactggtggcaaatcttccgaaggattacatgatcactctgaagtacgtccctggaatggacgtgctgccatcccattgctggatctccgaaatggtggtacagctttcggacagcctcaccgatctgctggacaagttctctaacatctcggagggcttgtcgaactactcaatcatagacaaactcgtgaatatcgtggatgatttggtcgagtgcgtcaaggagaattcctccaaggacctcaaaaagtccttcaagtcaccggaacctcggctcttcaccccggaggagttcttcagaatcttcaaccggagcattgacgcttttaaggattttgtggtggcctctgagacttccgactgtgtggtgtcctcgactctgtcgcccgaaaaggactcacgggtgtcggttactaagccgtttatgctgcccccggtggccgccagctccctcagaaacgacagttcaagctcaaaccgcaaggcgaaaaacccaccaggcgactcaagcctccactgggccgcgatggcgctgccagccctgttctctctgattattggattcgcattcggggctctttattggaagaaaaggcaaccgtcactcacccgcgcagtggaaaacatccagatcaatgaagaagataacgagatctccatgctgcaggagaaggagcgcgaattccaagaagtc

SEQ ID NO: 16934 - DNA, 819 bp, Artificial Sequence
  derived and/or modified sequence
atgaagaaaactcagacttggattcttacctgtatctacctccagctgctacttttcaatccactcgtcaaaactgaagggatctgcaggaatcgcgtcacgaacaacgtgaaggatgtgaccaagctcgtggctaatctcccgaaagattacatgataacccttaagtacgtgccaggcatggatgttctcccaagccattgttggatctctgagatggtcgtgcagttgagcgactctctgaccgacctattggataagttttcaaatatctccgaggggctgagcaactattcaattattgataagcttgtcaacatcgtggacgatctggtcgagtgcgtaaaagaaaattcctctaaagacctaaaaaaatcctttaaatctcctgagcctcggctattcaccccagaggagttctttcgaatattcaacagatccatcgacgcttttaaagattttgtggtagcttcagagactagcgactgtgtggtgagctcgacactgtcccctgagaaggatagcagagtgagcgtcaccaagcccttcatgctcccgccagtggctgcatccagtctccggaacgatagcagctcttccaatcgcaaagcgaagaacccaccaggggacagcagtttacactgggccgctatggcgctaccagctctgtttagcctaatcataggatttgcgtttggagcactgtactggaagaagcgtcaaccatcgctcactagagctgtcgagaacatacagattaatgaggaggacaacgagatcagcatgttgcaggagaaggagcgcgagtttcaggaagta

SEQ ID NO: 16935 - DNA, 819 bp, Artificial Sequence
  derived and/or modified sequence
atgaagaaaacccagacttggattctgacttgtatctaccttcagcttcttctcttcaacccgttggtcaaaacggaaggaatttgtaggaacagagtgactaacaacgtgaaggatgtgacgaagctcgtggcaaacctcccgaaagactacatgattacccttaagtacgtgccaggaatggatgtgctccccagccactgctggatttcagagatggttgtgcagctcagcgactcgttgaccgatctgttggacaaattcagcaacatttccgagggactctcgaactacagcatcattgataagctcgtcaatattgtcgacgatctggtcgagtgtgtcaaggaaaattcctcgaaagacctgaagaagtcctttaagtcacccgaaccacgcctgtttacccccgaggaattctttaggatcttcaaccgctcgattgatgcctttaaagattttgtcgtcgcatcagagacttcagattgtgtggtgtcgtcaaccctctcacctgagaaggatagtagagtctccgtgacgaagcctttcatgcttcctcctgtggcagcatcgtcgcttcgcaacgacagctcgtcctcgaaccgaaaagcaaagaaccctccaggcgactcttccctgcattgggcagccatggccctgcccgccctgtttagcctcatcattgggtttgcgttcggcgcgctttactggaagaagaggcagccatctctcactcgtgctgttgaaaacatacaaatcaacgaagaggataacgaaatttccatgctgcaggaaaaggaaagagaattccaagaagtc

SEQ ID NO: 16936 - DNA, 819 bp, Artificial Sequence
  derived and/or modified sequence
atgaaaaagacccagacttggattttgacttgtatttacttgcagttgctgttgtttaacccactcgtgaaaaccgaaggcatctgcaggaatagggtgaccaataacgttaaggatgtgaccaagctggtcgccaatctcccgaaggactacatgatcacgctgaaatatgttccaggtatggacgtgcttccgtcgcactgctggatctcggaaatggtcgttcagctgtccgactcactcactgatttgctggataagttcagcaacatttcagaaggactgtcaaactactcaatcatcgacaagctggtcaatatcgtcgacgacctggtggaatgcgtcaaagagaattccagcaaggacctgaagaagtcgtttaagtccccagaacctagactgtttactcctgaagagttcttccgcattttcaaccgctcaatcgatgcatttaaggacttcgtggtggcttcggaaacctcagattgcgtggtcagctctactctctcgccggagaaggattcccgcgtgtcagtgaccaagccgtttatgcttccacccgtcgctgcgagttccctgcggaatgactcatcgtcgtcgaaccggaaggcaaaaaacccgccaggagattcgtcactgcactgggccgcaatggccctgccagccttgttttcgctgatcatcgggttcgctttcggtgcactgtactggaagaagcgccaaccgtctctgacccgcgccgtcgagaatatccagatcaacgaagaagataatgaaatctcgatgcttcaagagaaggagagggagtttcaggaagtg

SEQ ID NO: 16937 - DNA, 819 bp, Artificial Sequence
  derived and/or modified sequence
atgaagaaaacgcaaacttggattttgacatgcatttatctgcaacttttgctttttaatccacttgttaaaacagaaggaatttgtagaaacagagtcactaataatgttaaagatgttacaaaattagtcgctaatctgcctaaagattatatgatcaccttgaagtatgtccctgggatggatgttctgccttcacattgctggattagcgaaatggtcgtccagctgtcggactcattgacagatcttcttgataaattttctaacatttctgaggggctatcgaattacagtataatcgacaaactcgttaatattgttgatgaccttgtggaatgtgttaaagagaattcgtccaaagatttgaaaaagagttttaaaagcccagagccacgattgttcacaccagaagagttttttagaatttttaatcgttcaattgatgccttcaaagacttcgtcgtggcgtcggaaacatctgactgcgtcgttagttcaactctttccccagaaaaggatagtcgagttagcgttactaaaccatttatgttgccacctgtggcagctagttcactcaggaacgatagttcctcttctaatcgtaaagccaagaacccccctggagattcttcattacattgggcagctatggccctcccggctcttttctctttgatcatcggattcgcatttggggcactctactggaaaaagagacagccaagtttgactagagcggtcgaaaacattcagatcaatgaagaggataacgagatctctatgttgcaagaaaaggaacgggaattccaagaagta

SEQ ID NO: 16938 - DNA, 819 bp, Artificial Sequence
  derived and/or modified sequence
atgaaaaagacacaaacatggatccttacttgcatctatttgcagttgctcctgttcaatccactcgtaaaaaccgaaggcatatgtagaaaccgagtgacaaataacgtgaaagatgtgaccaaattggtcgccaacctgccaaaagactacatgattaccctgaagtacgtccccggaatggatgtgttacccagccattgttggattagcgaaatggtggttcagctctctgactctttgaccgaccttctggacaaattctctaacatatcagaaggtctgagcaactactcaatcatcgacaagctggttaacatcgttgacgaccttgttgaatgtgtgaaagagaatagcagcaaggatctgaaaaagagcttcaaatcacctgaaccaaggctgtttacgcctgaagagttctttagaatcttcaaccggagcattgatgcctttaaagacttcgtggtcgcctctgagacttcagactgcgtagtgtcatctaccctgagcccagaaaaggactctcgcgtgtcagtgacaaagccatttatgttgcctcctgtggcggctagctccctgaggaacgatagtagcagctcaaataggaaagcaaaaaatccgcccggagatagctccttgcattgggcagccatggcacttccagctctttttagccttattataggctttgctttcggcgcactgtactggaagaaaaggcagcctagcctgacacgtgctgtcgagaatatccaaattaacgaggaggataacgagatctctatgctgcaggaaaaagagagagaatttcaggaagtg

SEQ ID NO: 16939 - DNA, 819 bp, Artificial Sequence
  derived and/or modified sequence
atgaaaaaaacacaaacatggattttaacatgtatctatttacaattattattatttaacccacttgttaaaacagaaggaatttgtcgtaatagagttacaaacaacgttaaagatgttactaaacttgttgctaatttaccaaaggattatatgattactcttaagtatgtcccagggatggatgttttaccaagtcactgctggatctcagaaatggttgtacaattgtctgattctcttacagaccttttagataaattttcaaatatctcagagggactttcaaattattcaattattgataaattggttaacattgtagatgatttagttgaatgtgttaaggaaaatagttctaaggatttaaaaaaatcattcaagtcacctgaaccaagattatttactccagaagaattttttagaatctttaatcgttcaattgatgcatttaaagattttgttgttgcttctgaaacttcagactgtgttgtttcgagtacactatcgcctgaaaaagattcacgtgtttcagttactaagccatttatgttaccaccagtagcagctagtagtttaagaaatgactcatcatcatcaaatcgaaaagccaaaaatccaccaggagattcatcattacattgggctgcaatggcattaccagctttgttttctttaattataggatttgcatttggagcattatattggaagaaaagacaaccaagtcttacacgtgctgtagaaaatattcaaattaatgaagaagataatgaaatttcaatgttacaagaaaaggaaagagaattccaagaagtt

SEQ ID NO: 16940 - DNA, 819 bp, Artificial Sequence
  derived and/or modified sequence
atgaaaaagactcaaacgtggatcctaacttgtatttacctccaattgttactctttaatccgctggtaaaaaccgagggcatttgccgcaatagagtgaccaataatgtgaaggacgtgacaaagctggttgccaacctgcctaaagattacatgataacactgaagtatgtgccgggtatggatgtccttccatcacattgctggataagtgaaatggttgtccagctctccgactccttgactgatctgttggataagttctcgaacattagcgaagggctttccaactacagcattatcgataagctggtcaatatagtggacgacttagtcgaatgcgttaaggagaacagtagcaaagatctgaagaaatctttcaagtcacctgagcctcgcctgtttactccagaggagttttttagaattttcaatcgcagtatcgatgccttcaaagatttcgtggttgcaagtgaaaccagtgattgcgtggtgtcatccacgctttccccggaaaaggactctagggtgtccgtgacaaaaccctttatgctgcccccggtggctgctagtagtctccggaatgattcatctagctccaatcgtaaggcgaaaaatccgcccggcgattcctcgctgcactgggccgccatggcactgccggcgctcttcagcttgatcatcggtttcgcgttcggagccctttactggaagaagaggcagccctctctgacacgcgcagtcgaaaacatccagattaatgaggaggacaacgagataagtatgctgcaagagaaggagcgagaattccaggaggtc

SEQ ID NO: 16941 - DNA, 819 bp, Artificial Sequence
  derived and/or modified sequence
atgaaaaagactcaaacctggatcctcacttgcatctacttgcagctgctgctgttcaaccctctggtcaagactgagggcatctgtaggaatcgtgtgaccaataacgtgaaggatgtgactaaactggttgcgaacctgccgaaggactacatgatcactctgaagtacgtcccagggatggacgtgctcccctcccactgctggatcagtgagatggtcgtgcagctgagcgactccctcaccgatctcctcgacaagttttctaacatttccgaaggcctgtccaactactcgatcatcgataagctggtgaatatcgtggatgaccttgtggaatgtgtgaaggagaattcgagcaaagatctgaaaaagtctttcaagtcgccggagcctcgactctttaccccagaagagttcttccggatcttcaacagatctattgacgccttcaaagattttgtggtggcgtccgaaacgtcggactgcgtggtgtcatccacgctttcacccgagaaggactccagggtcagtgtcaccaagccgttcatgctcccgccagtcgctgcttctagcctccgcaatgacagctccagctcaaatcgcaaggcaaagaatccacctggtgactccagccttcactgggcagccatggcgcttccagctttgttctccctgatcatcgggttcgcttttggagcactgtactggaagaaacggcaaccatcgctgacccgcgcggtcgaaaacatccagatcaacgaagaagataacgaaatctcaatgctccaggaaaaggaaagggaattccaggaggtc

SEQ ID NO: 16942 - DNA, 819 bp, Artificial Sequence
  derived and/or modified sequence
atgaagaaaacccagacctggattctgacatgtatatatttacagctgttgctgttcaaccccctcgtgaaaacagagggtatttgccgaaatagggtgacaaataacgtgaaggatgtgaccaaacttgtggcaaacttgcctaaggactacatgattactctgaagtacgtgcccgggatggatgttctaccttcccactgttggatttcagagatggtggtgcaattatctgatagtctcaccgacttgctggacaagttctccaatataagcgagggactatctaactactcaatcattgataaactcgttaatatcgttgatgatctggtcgaatgtgtcaaggagaattcatccaaggacctgaagaaatcatttaaaagcccagaaccacgactcttcacccccgaagagttcttccgaatttttaaccgaagcatcgatgcattcaaagacttcgtggttgcaagtgaaacctccgactgcgtcgtgtccagtacgctatctcccgagaaggactccagggtgagcgtgaccaagccttttatgcttcctccagtcgctgccagcagcctgcgaaacgattcgagttcttctaatcgcaaggcaaaaaatcctccaggtgactctagtctgcattgggctgccatggctctgccagcactgttctccttgatcattggatttgcgttcggcgctctgtactggaagaaaagacagccgagtctgacacgcgccgtggagaacattcaaatcaacgaggaagataacgagatctccatgctgcaggaaaaggagcgtgagttccaagaagta

SEQ ID NO: 16943 - DNA, 819 bp, Artificial Sequence
  derived and/or modified sequence
atgaagaaaactcaaacttggatcctcacttgcatttacttgcaacttctgctcttcaatccgcttgtcaaaaccgaaggaatctgccgtaaccgagtcactaacaacgtgaaggacgtgaccaagctggtcgcgaatttgccaaaggactatatgattaccctgaagtacgtgccgggcatggacgtgctcccgagccactgttggatttctgaaatggtggtgcagctgtcagactcactgacggacctgctggacaaattcagcaatatctccgaagggctgagcaactactccatcatcgacaagctggtgaatatcgtggacgatctcgtggagtgcgtcaaggagaactcctcgaaggatttgaagaagagcttcaagagcccggaacctcggctcttcacccccgaggagttctttagaatcttcaacaggtccatcgacgcatttaaggactttgtggttgccagcgaaaccagcgattgtgtggtgtcctcaaccctgtcccccgagaaagactcgcgcgtctcggtcaccaagccattcatgctgccacctgtcgcggcctcgtcactgaggaatgattcctcatcatcaaatcggaaagccaaaaatccaccgggagattcgtcgctccactgggccgcaatggcgctcccggcccttttctccctgatcatcggattcgccttcggggccctgtactggaaaaagagacaaccatcactgacccgggcagtggaaaacattcaaatcaacgaggaagataacgaaatcagcatgctccaggagaaggagagagaatttcaggaagtc

SEQ ID NO: 16944 - DNA, 819 bp, Artificial Sequence
  derived and/or modified sequence
atgaaaaagacccaaacttggatcctgacttgcatctacttgcagctcctgctcttcaacccgctggtcaagaccgagggaatctgccggaaccgcgtcaccaataacgtcaaggacgtgactaagctggttgccaatctgccgaaagactacatgatcacgctgaagtatgtcccaggtatggatgtattgccgtcgcattgctggatctcggaaatggtggtccagctctccgactcgcttaccgatctgttggataaattctcgaatatctcagaaggactgagcaactacagcattatcgacaagctcgtgaacatcgtggacgatctcgtggagtgcgtgaaagaaaattcgtcaaaagatctgaagaagtcattcaagtctccggaaccacggctgttcaccccagaggaatttttccgcatcttcaaccgatctattgatgcgtttaaggattttgttgtggcctccgagacgtcagactgtgtcgtgtcgtccactctttcacccgagaaggactcgcgcgtgagcgtgaccaaaccgttcatgctccctccggtggccgctagctccctgagaaacgacagttcctccagcaacagaaaggctaagaatcctcccggagacagctccctgcactgggccgcaatggcgctcccagcactcttcagcctgatcatcgggttcgcgtttggcgccctctactggaagaagcgccagccttcgctgactcgggcagtggaaaacatacagatcaacgaagaggacaatgaaatttccatgcttcaagagaaagaaagggaattccaagaggtg

SEQ ID NO: 16945 - DNA, 819 bp, Artificial Sequence
  derived and/or modified sequence
atgaagaagacccaaacctggatattgacctgtatctacctgcagcttcttttgtttaatccccttgtcaaaactgaggggatatgccgcaatagagtcaccaacaatgtcaaggatgtgactaaattagtggccaacctaccgaaggattatatgatcacactgaagtatgttcctggaatggacgtacttcccagccattgttggatttcagagatggtcgtgcagttatccgacagtttaactgacctcctcgataagttcagcaacatatcggaaggcctgtccaactattcaattattgataagctggtgaacatagtggatgacctcgtcgaatgcgtgaaagagaactcatccaaggatctcaagaagagctttaagagtcccgagccccggctgttcaccccagaagagttctttcgtatctttaacagatcgatcgatgcattcaaggattttgtcgtagctagcgagacatccgattgtgtcgtgtcttcaacactatcccctgaaaaggactcacgggtgagcgttactaagcctttcatgcttcccccagtagctgcaagctcactgcggaatgatagctcatcctctaacagaaaagccaaaaaccctcccggagactcatccctgcattgggctgccatggctttaccggcactgttttctctgataattggattcgccttcggcgcgctttattggaaaaagcgacaaccgtccttaacgcgcgccgttgagaacatccagatcaacgaggaggacaacgaaatctctatgctgcaagagaaagaaagggaattccaggaggtt

SEQ ID NO: 16946 - DNA, 819 bp, Artificial Sequence
  derived and/or modified sequence
atgaagaagacgcagacttggattctcacttgcatttacttgcagctgctgctgttcaacccgttagtgaagacagaaggaatttgtcgaaacagagtgacgaataacgtgaaagacgtgacgaagctggtggccaatctgcccaaagattacatgattaccctgaagtacgtacctggcatggatgttttgccctctcactgttggatttctgagatggtggttcagcttagtgattctttaaccgatctgctcgataaattcagcaatatttccgagggtctctctaactatagtattatcgataaattggtcaacatcgtcgacgacctcgtcgagtgtgtcaaggagaattccagcaaagatctgaaaaaaagctttaaaagccccgagccaagactgttcactcccgaggaattcttcaggatctttaatcgaagtattgatgcctttaaagatttcgtggtggcctccgagacaagtgattgcgttgtctcctcaacactgagccctgaaaaggactctcgtgtcagtgtcacaaagccgttcatgcttccccccgtcgccgctagctcactaaggaatgactcgtcctcttccaacaggaaggccaaaaaccctccaggtgattctagcctgcattgggctgccatggccctgcccgcactgtttagcctaattatcggctttgcctttggtgctctatactggaagaagcggcagccgagcctcactcgagccgtcgagaacatccagatcaatgaggaggacaacgaaatcagcatgctgcaagaaaaggagagagaattccaggaagtg

SEQ ID NO: 16947 - DNA, 819 bp, Artificial Sequence
  derived and/or modified sequence
atgaaaaagacgcaaacgtggatcctcacgtgtatttacctgcagcttcttctgttcaacccactcgtgaaaactgagggaatctgtcggaaccgggtcacgaataacgtcaaggatgtgactaaactggtcgcaaacttgcctaaggactacatgatcaccctcaaatacgtaccaggcatggatgtcctgccgtcccattgctggatctccgagatggtcgtccagctctcggactcgctcactgatctgttggataagttctccaacatatcagagggactgtccaactactcaatcatcgacaagctggtgaacatcgtcgacgacctggtcgaatgcgtgaaggagaattcgagcaaagatttgaagaagtcctttaagagcccagaaccgagattgttcaccccggaggaattcttccgaatcttcaatcggtccatcgacgccttcaaagacttcgtggtggcctcagaaacctcagactgcgtggtgtcatcgactctgtctccggagaaagactcaagagttagtgtgaccaagccgttcatgctgccgcctgtggcggcctcgtccctgaggaatgactcttcgagcagcaataggaaagctaaaaacccgccgggagattcgtcgctgcactgggccgcaatggcactgcccgcccttttctcgctgatcatcggttttgcttttggagctctctactggaaaaagagacaaccgagcctgacccgcgcagtcgaaaacatacagatcaatgaggaggacaacgaaatctcaatgctccaagaaaaagagcgcgaattccaggaagtg

SEQ ID NO: 16948 - DNA, 968 bp, Artificial Sequence
  derived and/or modified sequence
gggaaataagagagaaaagaagagtaagaagaaatataagagccaccatgaaaaagactcagacatggatcctgacgtgtatctacctccagctgctgttgttcaatccgttggtaaagactgagggtatctgccgcaacagagtgacgaataacgtgaaagacgtgacaaagctggtcgcaaatctccccaaggactatatgatcaccctcaagtacgtccctggcatggatgtgcttccgtcacactgctggatctcagaaatggtcgtccagcttagcgattcgttgaccgaccttcttgataagttctcgaacatttccgaagggctctccaactactccatcattgacaaattggtgaatattgtggatgacctggtggaatgcgtcaaggagaattcgtcaaaagaccttaagaagtcctttaagagccccgaacctcgactttttacgcccgaagagttcttccggatcttcaataggtcgatcgatgcctttaaggactttgtagtcgcgtcagaaacgtcggattgtgtggtatcgtccacattgtcgccggagaaggacagcagggtgtcagtaacaaaaccctttatgttgccgccagtggcggcctcgagccttcgcaatgactcgagctcgtcgaaccggaaagcgaaaaatccgccaggagatagctcactgcattgggcagcgatggcgctccccgcattgttctcattgattatcgggtttgccttcggagccctctattggaagaaacgccagcccagcctcacgagagctgtagagaacattcagatcaacgaggaggataacgagatttcgatgctccaagagaaagagagggaattccaagaggtctgataataggctgccttctgcggggcttgccttctggccatgcccttcttctctcccttgcacctgtacctcttggtctttgaataaagcctgagtaggaag

SEQ ID NO: 16949 - DNA, 1642 bp, Artificial Sequence
  derived and/or modified sequence
ccgcctcgcgccgagactagaagcgctgcgggaagcagggacagtggagagggcgctgcgctcgggctacccaatgcgtggactatctgccgccgctgttcgtgcaatatgctggagctccagaacagctaaacggagtcgccacaccactgtttgtgctggatcgcagcgctgcctttccttatgaagaagacacaaacttggattctcacttgcatttatcttcagctgctcctatttaatcctctcgtcaaaactgaagggatctgcaggaatcgtgtgactaataatgtaaaagacgtcactaaattggtggcaaatcttccaaaagactacatgataaccctcaaatatgtccccgggatggatgttttgccaagtcattgttggataagcgagatggtagtacaattgtcagacagcttgactgatcttctggacaagttttcaaatatttctgaaggcttgagtaattattccatcatagacaaacttgtgaatatagtggatgaccttgtggagtgcgtgaaagaaaactcatctaaggatctaaaaaaatcattcaagagcccagaacccaggctctttactcctgaagaattctttagaatttttaatagatccattgatgccttcaaggactttgtagtggcatctgaaactagtgattgtgtggtttcttcaacattaagtcctgagaaagattccagagtcagtgtcacaaaaccatttatgttaccccctgttgcagccagctcccttaggaatgacagcagtagcagtaataggaaggccaaaaatccccctggagactccagcctacactgggcagccatggcattgccagcattgttttctcttataattggctttgcttttggagccttatactggaagaagagacagccaagtcttacaagggcagttgaaaatatacaaattaatgaagaggataatgagataagtatgttgcaagagaaagagagagagtttcaagaagtgtaattgtggcttgtatcaacactgttactttcgtacattggctggtaacagttcatgtttgcttcataaatgaagcagctttaaacaaattcatattctgtctggagtgacagaccacatctttatctgttcttgctacccatgactttatatggatgattcagaaattggaacagaatgttttactgtgaaactggcactgaattaatcatctataaagaagaacttgcatggagcaggactctattttaaggactgcgggacttgggtctcatttagaacttgcagctgatgttggaagagaaagcacgtgtctcagactgcatgtaccatttgcatggctccagaaatgtctaaatgctgaaaaaacacctagctttattcttcagatacaaactgcagcctgtagttatcctggtctctgcaagtagatttcagcttggatagtgagggtaacaatttttctcaaagggatctggaaaaaatgtttaaaactcagtagtgtcagccactgtacagtgtagaaagcagtgggaactgtgattggatttggcaacatgtcagctttatagttgccgattagtgatatgggtctgatttcgatctcttcctgatgtaaaccatgctcacccatatccca

SEQ ID NO: 16950 - DNA, 822 bp, Artificial Sequence
  derived and/or modified sequence
atgaagaagacccagacctggatcctgacctgcatctacctgcagctgctgctgttcaaccccctggtgaagaccgagggcatctgcagaaacagagtgaccaacaacgtgaaggacgtgaccaagctggtggccaacctgcccaaggactacatgatcaccctgaagtacgtgcccggcatggacgtgctgcccagccactgctggatcagcgagatggtggtgcagctgagcgacagcctgaccgacctgctggacaagttcagcaacatcagcgagggcctgagcaactacagcatcatcgacaagctggtgaacatcgtggacgacctggtggagtgcgtgaaggagaacagcagcaaggacctgaagaagagcttcaagagccccgagcccagactgttcacccccgaggagttcttcagaatcttcaacagaagcatcgacgccttcaaggacttcgtggtggccagcgagaccagcgactgcgtggtgagcagcaccctgagccccgagaaggacagcagagtgagcgtgaccaagcccttcatgctgccccccgtggccgccagcagcctgagaaacgacagcagcagcagcaacagaaaggccaagaacccccccggcgacagcagcctgcactgggccgccatggccctgcccgccctgttcagcctgatcatcggcttcgccttcggcgccctgtactggaagaagagacagcccagcctgaccagagccgtggagaacatccagatcaacgaggaggacaacgagatcagcatgctgcaggagaaggagagagagttccaggaggtgtag

SEQ ID NO: 16951 - DNA, 822 bp, Artificial Sequence
  derived and/or modified sequence
atgaagaagacacagacatggatcctgacctgcatctatctccagctgctcttatttaacccccttgttaaaactgaagggatctgtaggaaccgcgtgacaaataacgtgaaagacgtgacgaagctggttgctaaccttccaaaggattacatgattactttgaaatatgttcccggcatggacgttctaccttctcattgctggatcagcgagatggtggtgcaactctcagacagcctgaccgatctgctggacaagttctctaacatttctgaggggctgtccaactacagtatcatcgacaagctcgtaaacatagtcgatgatctggtagagtgtgtgaaagaaaattcctctaaggaccttaaaaagagctttaagtcaccagaacctcgcttatttactccagaggagttttttagaatattcaatcggagcattgacgccttcaaggatttcgtggtggcatccgagacctcggattgtgtggtctcctctacgctttcaccagagaaggatagccgcgtgtcggttactaaaccattcatgctgccacctgtcgctgctagctcgttgagaaatgacagctcaagcagcaacagaaaagctaagaatccccccggagacagtagccttcactgggcagccatggccctaccggccctgttttctctgatcatcgggttcgcatttggtgccctttactggaagaaacgtcaaccttcattaacccgcgcagtagagaacatccagataaatgaggaagacaatgagatcagcatgttgcaagaaaaagaacgagaatttcaggaggtgtag

SEQ ID NO: 16952 - DNA, 822 bp, Artificial Sequence
  derived and/or modified sequence
atgaagaagacccagacctggatcctgacctgcatctacctgcagctgctgctcttcaaccccctggtgaagacagagggcatctgcaggaacagagtgaccaacaacgtgaaggatgtgaccaagctggtggccaacctgcccaaggactacatgatcaccctgaagtatgtgcccggcatggatgtgctgcccagccactgctggatcagcgagatggtggtgcagctgagtgacagcctgacagacctgctggacaagttcagcaacatcagcgagggcctgagcaactacagcatcatcgacaagctggtgaacatcgtggatgacctggtggagtgtgtgaaggagaacagcagcaaggacctgaagaagagcttcaagagccctgagcccaggctcttcaccccagaggagttcttccgcatcttcaacagaagcattgatgccttcaaggactttgtggtggccagcgagaccagtgactgtgtggtgagcagcaccctgagccctgagaaggacagccgggtgtctgtgaccaagcccttcatgctgccccctgtggccgccagcagcctgagaaatgacagcagcagcagcaacaggaaggccaagaaccccccaggggacagcagcctgcactgggccgccatggccctgcctgccctcttcagcctcatcatcggctttgccttcggggccctgtactggaagaagaggcagcccagcctgaccagggctgtggagaacatccagatcaatgaggaggacaatgagatctccatgctgcaggagaaggagcgggagttccaggaggtgtag

SEQ ID NO: 16953 - DNA, 822 bp, Artificial Sequence
  derived and/or modified sequence
atgaagaagacccagacctggatcctgacctgcatctacctgcagctgctattgttcaacccactcgtgaaaacagagggcatctgtaggaaccgcgttactaataacgtgaaggatgtgactaaactggttgcaaatctgccgaaggattacatgatcactttgaaatatgtgcccgggatggacgtgcttccgtctcactgctggattagcgaaatggtggtgcagttatccgattccttgactgacttgcttgataaattcagcaacatcagcgaaggcctttccaactacagcatcatcgacaaactggtgaatatcgttgatgacctggtggaatgcgtgaaggagaattccagcaaggacctcaaaaaaagttttaagtccccagagcccagactttttactccagaggaattctttaggatcttcaataggtcgattgatgcttttaaagacttcgtggtcgcatcagaaacaagcgactgtgttgtatcctcaaccctgtctccagaaaaggactcgcgtgtgagcgtgacaaagccatttatgctgccacccgtagccgcttcctccttacgcaatgacagcagcagctctaaccgaaaggccaaaaaccctcctggggacagttccctgcattgggccgccatggccctccccgctttatttagtcttataatcggattcgccttcggggcgctgtactggaaaaagcggcagccctccctgacaagagctgttgagaatattcagataaatgaggaggataatgagatcagcatgcttcaagagaaagaaagagagttccaagaggtttag

SEQ ID NO: 16954 - DNA, 822 bp, Artificial Sequence
  derived and/or modified sequence
atgaaaaaaacccaaacgtggattttgacttgtatctatttgcagttgttactgttcaatccacttgtcaaaactgagggtatctgtcgcaaccgggtgaccaataatgtgaaggacgtgactaaattagtcgcaaatctacccaaagattatatgatcactctgaagtatgttccaggaatggatgtgctgcctagtcattgttggatctcagaaatggtggtccagctcagtgatagtctaacagacctcctagacaaattctctaatatcagtgaagggctgtctaattactctatcatcgataaacttgtcaatatcgtggatgacttggtggagtgcgtgaaggaaaattcgagtaaagacctgaaaaagagtttcaagagtcctgagccgcgactgtttacccccgaagaatttttcagaatttttaacaggtcgatcgacgctttcaaagactttgtcgtcgcctcagaaacctccgactgtgtcgtgtcatcaactctgagccccgagaaggatagtcgagtctctgtaaccaagccgttcatgctgccacctgtcgcagcatcaagtctcaggaacgattcatcgtcatccaatcggaaggctaaaaatccgccaggagactcttccctacactgggcagctatggcactgccagctcttttcagcctgatcattggttttgcgtttggtgctctctactggaagaagagacagccctcattgacccgggcagtggagaatatccaaatcaacgaggaagataacgaaatctctatgctacaggaaaaggaacgggaattccaggaagtgtag

SEQ ID NO: 16955 - RNA, 968 nt, Artificial Sequence
  derived and/or modified sequence
gggaaauaagagagaaaagaagaguaagaagaaauauaagagccaccaugaaaaagacucagacauggauccugacguguaucuaccuccagcugcuguuguucaauccguugguaaagacugaggguaucugccgcaacagagugacgaauaacgugaaagacgugacaaagcuggucgcaaaucuccccaaggacuauaugaucacccucaaguacgucccuggcauggaugugcuuccgucacacugcuggaucucagaaauggucguccagcuuagcgauucguugaccgaccuucuugauaaguucucgaacauuuccgaagggcucuccaacuacuccaucauugacaaauuggugaauauuguggaugaccugguggaaugcgucaaggagaauucgucaaaagaccuuaagaaguccuuuaagagccccgaaccucgacuuuuuacgcccgaagaguucuuccggaucuucaauaggucgaucgaugccuuuaaggacuuuguagucgcgucagaaacgucggauugugugguaucguccacauugucgccggagaaggacagcagggugucaguaacaaaacccuuuauguugccgccaguggcggccucgagccuucgcaaugacucgagcucgucgaaccggaaagcgaaaaauccgccaggagauagcucacugcauugggcagcgauggcgcuccccgcauuguucucauugauuaucggguuugccuucggagcccucuauuggaagaaacgccagcccagccucacgagagcuguagagaacauucagaucaacgaggaggauaacgagauuucgaugcuccaagagaaagagagggaauuccaagaggucugauaauaggcugccuucugcggggcuugccuucuggccaugcccuucuucucucccuugcaccuguaccucuuggucuuugaauaaagccugaguaggaag

SEQ ID NO: 16956 - protein, 103 aa, Artificial Sequence
  derived and/or modified sequence
MKSLILLAILAALAVVTLCYESHESMESYELNPFINRRNANTFISPQQRWRAKVQERIRERSKPVHELNREACDDYRLCERYAMVYGYNAAYNRYFRKRRGTK

SEQ ID NO: 16957 - DNA, 1398 bp, Artificial Sequence
  derived and/or modified sequence
ctggttcctcccctctcaactgctctggttcttataaaaacctcacagccttccactaacatcccgtaggagcctctctccctactgctgctacacaagaccctgagactgacctgcaggacgaaaccatgaagagcctgatccttcttgccatcctggccgccttagcggtagtaactttgtgttatgaatcacatgaaagcatggaatcttatgaacttaatcccttcattaacaggagaaatgcaaataccttcatatcccctcagcagagatggagagctaaagtccaagagaggatccgagaacgctctaagcctgtccacgagctcaatagggaagcctgtgatgactacagactttgcgaacgctacgccatggtttatggatacaatgctgcctataatcgctacttcaggaagcgccgagggaccaaatgagactgagggaagaaaaaaaatctctttttttctggaggctggcacctgattttgtatccccctgtagcagcattactgaaatacataggcttatatacaatgcttctttcctgtatattctcttgtctggctgcacccctttttcccgcccccagattgataagtaatgaaagtgcactgcagtgagggtcaaaggagagtcaacatatgtgattgttccataataaacttctggtgtgatactttcatcttgtaaatctgctttcttttgggaagatattgagatatttaaatcatggcccaccttacccaaaataggagattctgttcatctcatatctagtattaattagaaaaataactacataaaaagaaggaagctaagaaggcactcactcagccataaattctctaaaccctctctaccttggaatccgtgaatggaatctggtatgttttttgcaggattttcctattgtaaattgtggcaaatacagggctcccttcatttgcttttcatctcttatgcatcaaagtcaaaaacatttctgaatcaagataatctagaagagaaaaaaggaggaaaaggaaaagagaaagcagaagggacaaataaaagcaattggcaaaaactgtcaataatagtttatacacttaactatatcaataatcacattatatgtaaatagtctaaacaatccaattattttttacttctacttatgttatatttttacttctacatttgttaaaggttccacgctacatttttactattcttgctttaaataattttaataatttcttttaaagtttagataataagaaaatatcccgggccaggcacagtggccacacctgtaatctcagtagccatgaccataccaatgcactccagcctgtgaaacagagtgagactctgtctctacagaaaaataaaaaagaaaagaaagaaaag

SEQ ID NO: 16958 - DNA, 312 bp, Artificial Sequence
  derived and/or modified sequence
atgaagtccttaatcctgctcgcaatactggccgcccttgccgtcgtaaccttgtgttacgagtcccacgagtccatggaatcatatgaactcaacccatttatcaatcgtcgtaatgccaacacctttatctccccacagcaaaggtggcgcgcgaaggtccaggaaagaattcgagaaagaagcaagcccgtacatgaactcaaccgcgaggcttgcgacgattacaggctgtgtgaacgctacgccatggtgtacgggtacaatgccgcatacaaccggtactttaggaagagaagaggaacaaagtag

SEQ ID NO: 16959 - DNA, 312 bp, Artificial Sequence
  derived and/or modified sequence
atgaagagcctcatcctgctggccatcctggccgccctggccgtggtgaccctgtgctatgagagccatgagagcatggagagctatgagctgaaccccttcatcaacagaagaaatgccaacaccttcatcagcccccagcagcgctggagggccaaggtgcaggagcgcatccgggagaggagcaagcctgtgcatgagctgaaccgggaggcctgtgatgactaccgcctgtgtgaaagatatgccatggtgtatggctacaatgctgcctacaaccgctacttcaggaagagaagaggcaccaagtag

SEQ ID NO: 16960 - DNA, 1405 bp, Artificial Sequence
  derived and/or modified sequence
tctcccactggttcctcccctctcaactgctctggttcttataaaaacctcacagccttccactaacatcccgtaggagcctctctccctactgctgctacacaagaccctgagactgacctgcaggacgaaaccatgaagagcctgatccttcttgccatcctggccgccttagcggtagtaactttgtgttatgaatcacatgaaagcatggaatcttatgaacttaatcccttcattaacaggagaaatgcaaataccttcatatcccctcagcagagatggagagctaaagtccaagagaggatccgagaacgctctaagcctgtccacgagctcaatagggaagcctgtgatgactacagactttgcgaacgctacgccatggtttatggatacaatgctgcctataatcgctacttcaggaagcgccgagggaccaaatgagactgagggaagaaaaaaaatctctttttttctggaggctggcacctgattttgtatccccctgtagcagcattacagaaatacataggcttatatacaatgcttctttcctgtatattctcttgtctggctgcacccctttttcccgcccccagattgataagtaatgaaagtgcactgcagtgagggtcaaaggagagtcaacatatgtgattgttccataataaacttctggtgtgatactttcatcttgtaaatctgctttcttttgggaagatattgagatatttaaatcatggcccaccttacccaaaataggagattctgttcatctcatatctagtattaattagaaaaataactacataaaaagaaggaagctaagaaggcactcactcagccataaattctctaaaccctctctaccttggaatccgtgaatggaatctggtatgttttttgcaggattttcctattgtaaattgtggcaaatacagggctcccttcatttgcttttcatctcttatgcatcaaagtcaaaaacatttctgaatcaagataatctagaagagaaaaaaggaggaaaaggaaaagagaaagcagaagggacaaataaaagcaattggcaaaaactgtcaataatagtttatacacttaactatatcaataatcacattatatgtaaatagtctaaacaatccaattattttttacttctacttatgttatatttttacttctacatttgttaaaggttccacgctacatttttactattcttgctttaaataattttaataatttcttttaaagtttagataataagaaaatatcccgggccaggcacagtggccacacctgtaatctcagtagccatgaccataccaatgcactccagcctgtgaaacagagtgagactctgtctctacagaaaaataaaaaagaaaagaaagaaaag

SEQ ID NO: 16961 - DNA, 312 bp, Artificial Sequence
  derived and/or modified sequence
atgaagagcctgatcctgctggccatcctggccgccctggccgtggtgaccctctgctatgagtcacatgagtccatggagagctacgaactcaatcccttcattaacaggcgaaacgccaatacgttcatttcaccgcagcagaggtggagagctaaagtccaggagcggattcgcgagaggtccaaacctgtgcacgagctgaatcgtgaagcatgtgatgattatcgcttgtgcgagcgctatgccatggtttacggctacaacgccgcctataatcgctattttcgcaagaggcggggtactaagtag

SEQ ID NO: 16962 - DNA, 312 bp, Artificial Sequence
  derived and/or modified sequence
atgaaatcccttatactgctggctatactggccgcattggctgttgtgacgctctgctacgagtctcatgaatccatggagagttacgagctgaacccattcattaatcgcaggaacgcgaatactttcatttccccacaacaacggtggcgcgctaaggtccaggagcggattcgggaacgtagtaagcccgtacatgaacttaacagggaggcatgtgatgactaccgcttgtgcgaacggtacgccatggtgtacggatataatgctgcctacaatcgctatttccggaaacgaaggggtacaaaatag

SEQ ID NO: 16963 - DNA, 312 bp, Artificial Sequence
  derived and/or modified sequence
atgaagagcctgatcctgctggccatcctggccgccctggccgtggtgaccctgtgctacgagagccacgagagcatggagagctacgagctgaaccccttcatcaacagaagaaacgccaacaccttcatcagcccccagcagagatggagagccaaggtgcaggagagaatcagagagagaagcaagcccgtgcacgagctgaacagagaggcctgcgacgactacagactgtgcgagagatacgccatggtgtacggctacaacgccgcctacaacagatacttcagaaagagaagaggcaccaagtag

SEQ ID NO: 16964 - protein, 706 aa, Artificial Sequence
  derived and/or modified sequence
METKGYHSLPEGLDMERRWGQVSQAVERSSLGPTERTDENNYMEIVNVSCVSGAIPNNSTQGSSKEKQELLPCLQQDNNRPGILTSDIKTELESKELSATVAESMGLYMDSVRDADYSYEQQNQQGSMSPAKIYQNVEQLVKFYKGNGHRPSTLSCVNTPLRSFMSDSGSSVNGGVMRAVVKSPIMCHEKSPSVCSPLNMTSSVCSPAGINSVSSTTASFGSFPVHSPITQGTPLTCSPNVENRGSRSHSPAHASNVGSPLSSPLSSMKSSISSPPSHCSVKSPVSSPNNVTLRSSVSSPANINNSRCSVSSPSNTNNRSTLSSPAASTVGSICSPVNNAFSYTASGTSAGSSTLRDVVPSPDTQEKGAQEVPFPKTEEVESAISNGVTGQLNIVQYIKPEPDGAFSSSCLGGNSKINSDSSFSVPIKQESTKHSCSGTSFKGNPTVNPFPFMDGSYFSFMDDKDYYSLSGILGPPVPGFDGNCEGSGFPVGIKQEPDDGSYYPEASIPSSAIVGVNSGGQSFHYRIGAQGTISLSRSARDQSFQHLSSFPPVNTLVESWKSHGDLSSRRSDGYPVLEYIPENVSSSTLRSVSTGSSRPSKICLVCGDEASGCHYGVVTCGSCKVFFKRAVEGQHNYLCAGRNDCIIDKIRRKNCPACRLQKCLQAGMNLGERRCISLPCMNYARGCTKSAFSSFDCSSPLKNTPS

SEQ ID NO: 16965 - protein, 984 aa, Artificial Sequence
  derived and/or modified sequence
METKGYHSLPEGLDMERRWGQVSQAVERSSLGPTERTDENNYMEIVNVSCVSGAIPNNSTQGSSKEKQELLPCLQQDNNRPGILTSDIKTELESKELSATVAESMGLYMDSVRDADYSYEQQNQQGSMSPAKIYQNVEQLVKFYKGNGHRPSTLSCVNTPLRSFMSDSGSSVNGGVMRAVVKSPIMCHEKSPSVCSPLNMTSSVCSPAGINSVSSTTASFGSFPVHSPITQGTPLTCSPNVENRGSRSHSPAHASNVGSPLSSPLSSMKSSISSPPSHCSVKSPVSSPNNVTLRSSVSSPANINNSRCSVSSPSNTNNRSTLSSPAASTVGSICSPVNNAFSYTASGTSAGSSTLRDVVPSPDTQEKGAQEVPFPKTEEVESAISNGVTGQLNIVQYIKPEPDGAFSSSCLGGNSKINSDSSFSVPIKQESTKHSCSGTSFKGNPTVNPFPFMDGSYFSFMDDKDYYSLSGILGPPVPGFDGNCEGSGFPVGIKQEPDDGSYYPEASIPSSAIVGVNSGGQSFHYRIGAQGTISLSRSARDQSFQHLSSFPPVNTLVESWKSHGDLSSRRSDGYPVLEYIPENVSSSTLRSVSTGSSRPSKICLVCGDEASGCHYGVVTCGSCKVFFKRAVEGQHNYLCAGRNDCIIDKIRRKNCPACRLQKCLQAGMNLGARKSKKLGKLKGIHEEQPQQQQPPPPPPPPQSPEEGTTYIAPAKEPSVNTALVPQLSTISRALTPSPVMVLENIEPEIVYAGYDSSKPDTAENLLSTLNRLAGKQMIQVVKWAKVLPGFKNLPLEDQITLIQYSWMCLSSFALSWRSYKHTNSQFLYFAPDLVFNEEKMHQSAMYELCQGMHQISLQFVRLQLTFEEYTIMKVLLLLSTIPKDGLKSQAAFEEMRTNYIKELRKMVTKCPNNSGQSWQRFYQLTKLLDSMHDLVSDLLEFCFYTFRESHALKVEFPAMLVEIISDQLPKVESGNAKPLYFHRK

SEQ ID NO: 16966 - DNA, 5915 bp, Artificial Sequence
  derived and/or modified sequence
aaaagggccagccctccagctggcccactccccctccgggctttcgcccgccctctctccctcccttttttgcccgccctggccctgcccctgcccctgccccctcctctcagcccctccgcgcccggggtgtcattgggcccgggagacgggagccaacttcaggctgctcagaggaagcccgtgcagtcagtcacctgggtgcaagagcgttgctgcctcgggctctcccgctgcagggagagcggcactcgctggcctggatgtggttggatttaggggggctccgcagcaggggtttcgtggcggtggcaagcgctgcaacaggtagacggcgagagacggaccccggccgaggcagcgatggagaccaaaggctaccacagtctccctgaaggtctagatatggaaagacggtggggtcaagtttctcaggctgtggagcgttcttccctgggacctacagagaggaccgatgagaataactacatggagattgtcaacgtaagctgtgtttccggtgctattccaaacaacagtactcaaggaagcagcaaagaaaaacaagaactactcccttgccttcagcaagacaataatcggcctgggattttaacatctgatattaaaactgagctggaatctaaggaactttcagcaactgtagctgagtccatgggtttatatatggattctgtaagagatgctgactattcctatgagcagcagaaccaacaaggaagcatgagtccagctaagatttatcagaatgttgaacagctggtgaaattttacaaaggaaatggccatcgtccttccactctaagttgtgtgaacacgcccttgagatcatttatgtctgactctgggagctccgtgaatggtggcgtcatgcgcgccgttgttaaaagccctatcatgtgtcatgagaaaagcccgtctgtttgcagccctctgaacatgacatcttcggtttgcagccctgctggaatcaactctgtgtcctccaccacagccagctttggcagttttccagtgcacagcccaatcacccagggaactcctctgacatgctcccctaatgttgaaaatcgaggctccaggtcgcacagccctgcacatgctagcaatgtgggctctcctctctcaagtccgttaagtagcatgaaatcctcaatttccagccctccaagtcactgcagtgtaaaatctccagtctccagtcccaataatgtcactctgagatcctctgtgtctagccctgcaaatattaacaactcaaggtgctctgtttccagcccttcgaacactaataacagatccacgctttccagtccggcagccagtactgtgggatctatctgtagccctgtaaacaatgccttcagctacactgcttctggcacctctgctggatccagtacattgcgggatgtggttcccagtccagacacgcaggagaaaggtgctcaagaggtcccttttcctaagactgaggaagtagagagtgccatctcaaatggtgtgactggccagcttaatattgtccagtacataaaaccagaaccagatggagcttttagcagctcatgtctaggaggaaatagcaaaataaattcggattcttcattctcagtaccaataaagcaagaatcaaccaagcattcatgttcaggcacctcttttaaagggaatccaacagtaaacccgtttccatttatggatggctcgtatttttcctttatggatgataaagactattattccctatcaggaattttaggaccacctgtgcccggctttgatggtaactgtgaaggcagcggattcccagtgggtattaaacaagaaccagatgatgggagctattacccagaggccagcatcccttcctctgctattgttggggtgaattcaggtggacagtccttccactacaggattggtgctcaaggtacaatatctttatcacgatcggctagagaccaatctttccaacacctgagttcctttcctcctgtcaatactttagtggagtcatggaaatcacacggcgacctgtcgtctagaagaagtgatgggtatccggtcttagaatacattccagaaaatgtatcaagctctactttacgaagtgtttctactggatcttcaagaccttcaaaaatatgtttggtgtgtggggatgaggcttcaggatgccattatggggtagtcacctgtggcagctgcaaagttttcttcaaaagagcagtggaagggcaacacaactatttatgtgctggaagaaatgattgcatcattgataagattcgacgaaagaattgtcctgcttgcagacttcagaaatgtcttcaagctggaatgaatttaggagcacgaaagtcaaagaagttgggaaagttaaaagggattcacgaggagcagccacagcagcagcagcccccacccccacccccacccccgcaaagcccagaggaagggacaacgtacatcgctcctgcaaaagaaccctcggtcaacacagcactggttcctcagctctccacaatctcacgagcgctcacaccttcccccgttatggtccttgaaaacattgaacctgaaattgtatatgcaggctatgacagctcaaaaccagatacagccgaaaatctgctctccacgctcaaccgcttagcaggcaaacagatgatccaagtcgtgaagtgggcaaaggtacttccaggatttaaaaacttgcctcttgaggaccaaattaccctaatccagtattcttggatgtgtctatcatcatttgccttgagctggagatcgtacaaacatacgaacagccaatttctctattttgcaccagacctagtctttaatgaagagaagatgcatcagtctgccatgtatgaactatgccaggggatgcaccaaatcagccttcagttcgttcgactgcagctcacctttgaagaatacaccatcatgaaagttttgctgctactaagcacaattccaaaggatggcctcaaaagccaggctgcatttgaagaaatgaggacaaattacatcaaagaactgaggaagatggtaactaagtgtcccaacaattctgggcagagctggcagaggttctaccaactgaccaagctgctggactccatgcatgacctggtgagcgacctgctggaattctgcttctacaccttccgagagtcccatgcgctgaaggtagagttccccgcaatgctggtggagatcatcagcgaccagctgcccaaggtggagtcggggaacgccaagccgctctacttccaccggaagtgactgcccgctgcccagaagaactttgccttaagtttccctgtgttgttccacacccagaaggacccaagaaaacctgtttttaacatgtgatggttgattcacacttgttcaacagtttctcaagtttaaagtcatgtcagaggtttggagccgggaaagctgtttttccgtggatttggcgagaccagagcagtctgaaggattccccacctccaatcccccagcgcttagaaacatgttcctgttcctcgggatgaaaagccatatctagtcaataactctgattttgatattttcacagatggaagaagttttaactatgccgtgtagtttctggtatcgttcgcttgttttaaaagggttcaaggactaacgaacgttttaaagcttacccttggtttgcacataaaacgtatagtcaatatggggcattaatattcttttgttattaaaaaaacacaaaaaaataataaaaaaatatatacagattcctgttgtgtaataacagaactcgtggcgtggggcagcagctgcctctgagccctcgctcgtccacggtcttctgcatcactggtatacacactcgttagcgtccatttcttatttaattagaatggataagatgatgttaaatgccttggtttgatttctagtatctattgtgttggctttacaaataattttttgcagtcttttgctgtgctgtacattactgtatgtataaattatgaaggacctgaaataaggtataaggatcttttgtaaatgagacacatacaaaaaaaatctttaatggttaataggatgaatgggaaagtatttttgaaagaattctattttgctggagactatttaagtactatctttgtctaaacaaggtaatttttttttgtaaagtgcaatgtcctgcatgcataatgaaccgtttacagtgtatttaagaaagggaaagctgtgccttttttagcttcatatctaatttaccattattttacagtctctgttgtaaataaccacactgaaacctcttcggttgtcttgaaacctttctactttttctgtactttttgttttgttcttggtctcccgcttggggcatttgtgggactccagcacgttttctggcttctgcttcatcctgctccatcggggaatgacacactgcggtgtctgcagctcctggaaggtgtcatttgacaacacatgtgggagaggaggtccttggagtgctgcagctttgggaaagctgcctcgtttcccttttcctctagaagcagaaccagctctacgagagtgagactgggaacttgatggctcagagagcatcttttcctcccattttagaaaatcagattttctcctgtgggaaaaaaaaattccatgcactctctctctgttaaagatcagctattcccttctgatcttggaaagaggttctgcactcctggaaccggtcacaggaacgcacagatcatggcaggatgcgctgggacggcccatcttggcaaggttcagtctgaatggcatggagaccgggagatagaggggttttagatttttaaaaggtaggttttaaaaataagttttatacataaacagttttggagaaaaattacagatcatataagcaagacagtggcactaaaatgtttaattcattaatctgtttgtttggcactgatgcaatgtatggcttttctcttgccccaaatcacaaacatatgtatctttggggaaactaacaatatgattgcactaaataaactactttgaatagaggccaaattaatcttttaaaaatgatgataatcatcaggtttactcagtgaaatcatattaattattttccaaaatctaaaagctgtagctggagaagcccatggccacgaggaagcagcaattaattagatcaacacttttctccagggttcaccatgcaggcaacattaccttgtctttcaaaagacacctgccttatgcaaggggaaacctgtgaaagctgcactcagagggaggagtttttcttacataatttgcaatttcaggaatttaatttataggcagatctttaaatacagtcaacttacggtgcacagtaatatgaaagccacactttgaaggtaataaatacacagcatgcagactgggagttgctagcaaacaaatggcttacttacaaaagcagcttttagttcagacttagtttttataaaatgggaattctgacttacttaaccaggtttgggatggagatggtctgcatcagctttttgtattaacaaagttactggctctttgtgtgtctccaggtaactttgcttgattaaacagcaaagccatattctaaattcactgttgaatgcctgtcccagtccaaattgtctgtctgctcttatttttgtaccatattgctcttaaaaatcttggtttggtacagttcataattcaccaaaagttcatataatttaaagaaacactaaattagtttaaaatgaagcaatttatatctttatgcaaaaacatatgtctgtctttgcaaaggactgtaagcagattacaataaatcctttactttaatcaaaaaaaaaaaaaaaaaa

SEQ ID NO: 16967 - DNA, 2121 bp, Artificial Sequence
  derived and/or modified sequence
atggagactaagggctatcactcccttccggaaggtctagatatggaaagaagatggggacaggtgagccaagccgtggagagaagctcactcggtccaactgagaggaccgacgaaaacaactacatggagatagtaaacgtaagttgcgtgtctggcgcgatccccaataacagcacccagggctcaagcaaggagaagcaggagcttctgccctgcctgcagcaggacaacaataggcccggcattttgacatctgacatcaaaacagaattggagtctaaggagctgtccgccaccgtcgcagagtccatgggactgtatatggatagtgtgagggacgccgactacagctacgaacaacagaaccagcaggggagtatgtcacccgctaagatctatcagaacgttgaacagcttgtcaagttttacaaaggaaatggccaccgaccttctaccttatcctgtgtgaacacaccgctgaggtcgttcatgtccgactctggatccagtgtcaacggcggcgtgatgcgcgccgtggtgaaatcgccaattatgtgtcacgagaagtcccctagcgtttgctcacccttgaacatgacgtcttccgtatgctcgccagcaggcatcaacagtgtttcctctactaccgcaagctttggaagcttccctgtccattctccaatcacacagggtacgcctctgacctgcagccccaacgtggaaaatagggggtctagatctcattccccagcacatgccagcaatgtgggaagccccttatcatctcctctgtcctccatgaagtcgtccatttccagccctccttctcactgctctgtgaagtccccggtgtcaagccccaacaatgtaacactccgaagtagcgtgtcttcccccgcaaatatcaataattcacgctgcagtgtgtccagcccaagtaataccaacaaccgaagcaccctcagctccccggcagcatcgaccgtcgggagcatatgctccccagttaataatgctttctcttacaccgctagcgggactagtgcaggttccagtaccttgagggacgtggtcccttcaccagatacacaggaaaagggagctcaggaggtgccttttcccaaaaccgaagaagtggagagcgccataagtaacggcgtgaccgggcagcttaacatcgttcaatacattaaaccggagcccgatggcgccttttcatccagttgcttgggcggcaatagtaagatcaatagcgattcatccttttctgtccccatcaaacaggaatccactaaacactcatgctccgggacgtccttcaaaggtaacccaactgtgaacccgttcccgtttatggacggatcttatttctcgttcatggacgacaaggactactattctcttagcggtatcctgggacctcctgtcccaggcttcgacggcaattgcgaggggtccggtttcccagtcggtatcaaacaggagcctgatgacggttcatattacccagaggcttcgattccatcttctgctattgtgggggtgaattccgggggccagtcgttccactacaggatcggcgctcagggcaccatctccctctctcggtcagctagggatcagtcgttccagcacctttcatccttcccacccgtcaacacgttagtggagtcatggaaatcccacggtgacttgtcttccagaagaagtgacggttatccggtgctagaatacatcccagaaaatgtgtcatcatcaacattaagatcagtgtctacaggctcttcacgaccttcaaaaatttgcctcgtctgcggcgatgaagcttccggatgccactacggcgtggtgacctgcggatcctgcaaagtgtttttcaaacgggccgtggagggacaacataactatctctgtgcgggaagaaacgactgcatcattgataagatccgtcggaagaactgccccgcatgcaggctgcaaaagtgcctgcaggccggcatgaatctcggggaaaggcggtgtatcagcctcccctgtatgaattacgctcgggggtgtactaagtctgctttttcgtcatttgactgttcctctcccctgaagaacactccatcgtag

SEQ ID NO: 16968 - DNA, 2955 bp, Artificial Sequence
  derived and/or modified sequence
atggagacaaagggctaccactcgctgcccgaaggcttggacatggagagaaggtggggccaggtgtcacaagccgtcgaaagaagtagcttaggtcctaccgaacggaccgacgaaaacaattatatggagatcgttaacgtgtcctgtgtctctggcgcaatccccaataactccactcagggaagttcaaaggaaaagcaggagctgctcccttgtctgcagcaggataataataggccaggcattctcacttcggatatcaagactgaactggagtcaaaggaactgtcggcgacagtggctgaaagcatggggctttacatggactccgtcagggacgcggattattcttatgagcaacagaaccagcaaggaagcatgagccccgcaaagatatatcagaatgtggaacagctggtgaagttttacaaggggaacgggcatcggccctctacattgtcttgtgtaaacaccccactcagaagctttatgtccgactctgggtccagcgttaatggcggagtcatgcgggcagtagtcaagagtcctattatgtgccatgaaaaaagtccctcagtatgttcccctctaaatatgactagctccgtttgttccccggccggcatcaacagcgtgagttcaacaacggcttcatttggttcgtttccagtgcattctccaatcacccaaggcactccactgacatgcagcccgaatgtggaaaatagggggtctaggtcacattccccggctcacgcctcgaatgtgggatccccgctgtcaagtccactgtcctcgatgaagtccagtatcagctcgcctcccagccattgcagcgtgaaaagtcctgtgtcttccccaaataacgtaaccctcaggtcctctgtctcgagccctgctaatatcaacaatagcagatgcagcgtgagcagtccttcaaatacaaataatcgcagcaccctgtccagccccgctgcttccacggttgggtccatctgttctccagtgaataacgcttttagttatacagcttcaggcacatctgccggcagctccaccctgcgagacgtcgttccatctccagatacccaagagaagggggcacaggaggtaccgttccctaaaactgaagaagtagagtcggccatttctaacggcgtgacgggacagctgaacatcgtgcagtacatcaagcctgagcctgacggtgcattcagctccagctgcttggggggcaatagcaagattaacagcgattcttctttttccgtccccattaagcaggagtctaccaagcacagctgttcaggaacttcattcaaaggaaaccccactgtaaacccattccccttcatggacggttcttactttagtttcatggacgacaaagactactactcattgtctgggatcttgggaccacccgttccagggtttgacggcaattgtgagggctctggattcccagtgggaattaaacaggaaccagatgatggaagttactatcctgaagcctctattccgagtagcgcgattgtgggcgtgaactctggcggccagagcttccattaccgaataggtgctcagggaaccatctccttgtcccgttctgctagagaccaatcatttcagcacctgagctcctttccccccgtcaatacattagtggagagttggaagagccacggggacctcagctctcgacggtccgatggttacccagtgctggaatacatccccgagaacgtgagctcctcaacactcagatccgtgtccaccgggtcctcccgaccaagtaagatttgcctggtttgtggggacgaagcgtcagggtgtcactacggcgtggtaacctgcggcagctgcaaggttttcttcaagcgcgccgtcgagggccagcacaactatctgtgcgcagggcggaatgactgtataattgataaaataaggaggaaaaactgtcctgcatgcaggctacaaaagtgcctgcaagccggtatgaatctgggtgctaggaagtctaaaaagcttggaaaactgaaaggcattcatgaggagcagcctcagcaacagcagccaccaccaccccccccacctcctcagtccccagaggaggggaccacgtacattgctccagccaaagagccatcagtcaacaccgcgctagtgccccagttgtccaccatcagcagagccttaaccccaagccccgtgatggtactggaaaatatcgaacccgagattgtttacgctggatacgactcatccaaacccgatacggcggaaaatttattgagcaccctgaacaggctcgcagggaaacagatgatacaagtggtcaagtgggccaaagtgctgccagggttcaagaacctgcctctggaggatcaaataaccttgattcagtacagctggatgtgtttgagcagcttcgcactttcatggaggtcttataagcacactaatagtcagttcctttattttgccccggatctcgttttcaatgaggagaaaatgcatcagtcggctatgtatgaactctgtcagggtatgcaccagattagcttacagtttgtgagactgcagctaacattcgaagaatacaccatcatgaaggtgctgcttcttctttccaccattccaaaagacggactgaaatcccaggcagcatttgaggaaatgaggaccaactacataaaagaacttcggaagatggtgacaaaatgtccaaataactccggacaatcttggcagcggttctaccagcttactaagcttctagacagcatgcatgacctggtgtccgacctccttgagttctgtttttatacatttcgcgagtcgcacgccttgaaggtggagttccccgccatgcttgtggagattatttcagatcagctgcccaaagtggaatcaggcaacgccaaaccattgtatttccaccgaaagtag

SEQ ID NO: 16969 - DNA, 2955 bp, Artificial Sequence
  derived and/or modified sequence
atggagaccaagggataccacagtttaccagaaggtttggacatggaacgccgatgggggcaagtctcacaggcggtggaaaggagctcattggggcccaccgagcgcaccgacgagaataactatatggaaattgtcaatgtaagctgtgtgagtggagcaatcccgaacaacagcacacaagggtcttccaaggaaaaacaggaattgctgccttgtctccagcaggacaacaatcggccaggcatcctgacatccgatataaagacagaactggagtctaaggagctctctgcgactgtggctgaatcgatgggactatacatggattctgtcagggacgcagactactcctatgagcagcagaaccagcagggatccatgtcccctgcgaaaatctatcaaaacgtggaacagctcgttaagttttacaaaggaaacggacaccggccatccacattgtcctgcgtgaacacaccacttagatcatttatgtcagactctggttcctccgtaaacggcggagttatgcgggcagtagtgaagagccccatcatgtgccacgagaagtccccatcagtgtgcagcccacttaacatgacctcctccgtttgcagtcctgccggaattaattctgtgtctagcaccaccgcctccttcggctctttcccggtccactccccaattacccaggggacaccgctgacgtgctcacctaatgtggaaaacagaggaagccgctcacactcaccagcgcatgcttcaaatgtgggctcgccgctgtcctccccactgtcttcaatgaagtcttccattagtagtcccccctcccactgtagcgtgaaatcccctgtgagtagtccaaacaacgtcactctgaggtcctccgtgagcagccctgccaatatcaataattctcggtgttcagttagctctccatcaaatacaaataatcgctccacactgtcatcaccagccgccagcaccgttggttccatttgttccccggtaaacaacgcctttagctacactgccagcgggacctccgctggttcgagtacgctgagagatgttgtcccatcccctgacacccaggaaaagggggcccaggaggtgcccttcccaaagacagaggaggtggagagcgcaatctctaatggcgtcaccggccagctcaacatcgtccagtatataaagccggaaccagatggcgcattctcttcttcttgcctggggggaaattccaagatcaattcggactccagtttttctgtgccaatcaaacaagaatccacgaaacactcctgttctgggacatcattcaaagggaacccaaccgttaaccctttccccttcatggatggctcctatttttcctttatggatgacaaggactattacagcttgtcggggatccttggccctcctgtgccaggatttgatggaaactgcgaggggtccgggttccctgtgggcattaaacaggagcccgacgatggtagctactatcctgaagcttcaatcccatcttctgcaattgtcggagtcaatagcggggggcagagtttccactatcggatcggcgcacagggtacaataagcctctcaagaagcgctagggatcagtcgtttcagcatctgagctccttccctcctgtgaataccctagttgagagctggaagtcgcacggggatctaagcagccgcaggagcgatggttaccccgttctggagtatattcctgaaaacgtgagcagttccaccctgcgatctgtttccacaggttcatcccgtccctctaagatctgtttagtatgcggggacgaggcctcaggctgccattatggggtggttacttgcggtagctgcaaagttttttttaagcgtgctgtggaaggccagcataactatctgtgtgccggcaggaacgactgtataattgataaaattaggaggaagaattgtcctgcatgccgattacagaagtgtctgcaagcggggatgaatctcggggcaaggaaatctaaaaagctcggaaaattgaagggcattcacgaggaacagccgcagcagcaacagcctcctccaccacctccgccaccacagtcccccgaggagggcacaacttatattgccccggctaaggagccatcagtcaacacagcgctggtcccacagctgtccacaattagcagagccctgactccatcacccgtaatggtactggaaaatatagagccggaaatcgtgtatgctggctatgacagcagcaagcccgacacagctgagaatctgctgtctacattaaaccgtcttgcaggtaaacagatgatccaggtagtgaaatgggctaaagtgctgccaggcttcaagaatctccctctggaagaccagatcaccctgattcagtacagttggatgtgtctgtctagctttgctctcagctggcgctcttacaagcacacaaactctcagtttctttattttgcccctgacctggtctttaacgaagagaagatgcaccagtcggccatgtatgaattatgtcagggcatgcatcagatttccctgcagttcgtgaggctgcagttgacatttgaagaatacaccatcatgaaagttctgctcttgctgagcaccatccccaaagacggacttaaaagccaagccgcattcgaggaaatgaggaccaattatataaaggagttgcgaaagatggtgacaaaatgcccaaacaattccgggcagagctggcagcgattctatcagctgaccaagttgctcgactcaatgcatgatctcgtttctgatctcctggaattttgtttctataccttcagggaaagccatgctctcaaagtagagttccctgctatgctggtggagattatctccgatcaattgcccaaggtggagtctggtaacgcaaaacctttgtatttccatcgcaaatag

SEQ ID NO: 16970 - DNA, 2121 bp, Artificial Sequence
  derived and/or modified sequence
atggagaccaagggctaccacagcctgcctgagggcctggacatggagcggcgctggggccaggtgtcccaggccgtggagaggagcagcctgggccccacagagaggacagatgagaacaactacatggagatcgtgaatgtgtcctgtgtgtctggggccatccccaacaacagcacccagggcagcagcaaggagaagcaggagctgctgccctgcctgcagcaggacaacaacagacctggcatcctgaccagtgacatcaagacagagctggagagcaaggagctgagcgccaccgtggccgagagcatgggcctgtacatggattctgtgagagatgctgactacagctatgagcagcagaaccagcagggctccatgagccctgccaagatctaccagaatgtggagcagctggtgaagttctacaagggaaatggccaccggcccagcaccctgagctgtgtgaacacccccctgcgctccttcatgtctgacagcggcagctctgtgaatggaggagtgatgagagctgtggtgaagagccccatcatgtgccacgagaagagccccagcgtgtgcagccccctgaacatgaccagctctgtgtgcagccctgctggcatcaacagcgtgagcagcaccacagccagctttggcagcttccctgtgcacagccccatcacccagggcacccccctgacctgcagccccaacgtggagaacagaggcagccgcagccacagccctgcccacgccagcaatgtgggcagccccctgagcagccccctgagctccatgaagagcagcatcagcagcccccccagccactgcagcgtgaagagccctgtgagcagccccaacaacgtgaccctgcggagctctgtgagcagccctgccaacatcaacaacagccgctgcagcgtgagcagccccagcaacaccaacaacagaagcaccctgagcagccctgctgccagcacagtgggcagcatctgcagccctgtgaacaatgccttctcctacacagccagcggcaccagcgctggcagcagcaccctgagagatgtggtgcccagcccagacacccaggagaagggggcccaggaggtgcccttccccaagacagaggaggtggagagcgccatcagcaatggagtgacaggccagctgaacatcgtgcagtacatcaagccagagccagatggagccttcagcagcagctgcctgggcggcaacagcaagatcaacagcgacagcagcttctctgtgcccatcaagcaggagagcaccaagcacagctgcagcggcaccagcttcaagggcaaccccaccgtgaaccccttccccttcatggatggcagctacttctccttcatggatgacaaggactactacagcctgagcggcatcctgggcccccctgtgcccggctttgatggcaactgtgagggcagcggcttccctgtgggcatcaagcaggagccagatgatggcagctactacccagaggccagcatccccagcagcgccatcgtgggcgtgaacagcggcggccagagcttccactacagaattggagcccagggcaccatcagcctgagccgcagcgcccgggaccagagcttccagcacctgagcagcttcccccctgtgaacaccctggtggagagctggaagagccatggagacctgagcagcagaagaagtgatggctaccctgtgctggagtacatcccagaaaatgtgagcagcagcaccctgcggtctgtgtccacaggcagcagccggcccagcaagatctgcctggtgtgtggagatgaggccagcggctgccactatggagtggtgacctgtggcagctgcaaggtgttcttcaagagagctgtggagggccagcacaactacctgtgtgccggcagaaatgactgcatcatcgacaagatccggaggaagaactgcccagcctgccgcctgcagaagtgcctgcaggccggcatgaacctgggggagcggcgctgcatcagcctgccctgcatgaactatgcccggggctgcaccaagagcgccttcagcagctttgactgcagcagccccctgaagaacacccccagctag

SEQ ID NO: 16971 - DNA, 2955 bp, Artificial Sequence
  derived and/or modified sequence
atggagaccaagggctaccacagcctgcctgagggcctggacatggagcggcgctggggccaggtgtcccaggccgtggagaggagcagcctgggccccacagagaggacagatgagaacaactacatggagatcgtgaatgtgtcctgtgtgtctggggccatccccaacaacagcacccagggcagcagcaaggagaagcaggagctgctgccctgcctgcagcaggacaacaacagacctggcatcctgaccagtgacatcaagacagagctggagagcaaggagctgagcgccaccgtggccgagagcatgggcctgtacatggattctgtgagagatgctgactacagctatgagcagcagaaccagcagggctccatgagccctgccaagatctaccagaatgtggagcagctggtgaagttctacaagggaaatggccaccggcccagcaccctgagctgtgtgaacacccccctgcgctccttcatgtctgacagcggcagctctgtgaatggaggagtgatgagagctgtggtgaagagccccatcatgtgccacgagaagagccccagcgtgtgcagccccctgaacatgaccagctctgtgtgcagccctgctggcatcaacagcgtgagcagcaccacagccagctttggcagcttccctgtgcacagccccatcacccagggcacccccctgacctgcagccccaacgtggagaacagaggcagccgcagccacagccctgcccacgccagcaatgtgggcagccccctgagcagccccctgagctccatgaagagcagcatcagcagcccccccagccactgcagcgtgaagagccctgtgagcagccccaacaacgtgaccctgcggagctctgtgagcagccctgccaacatcaacaacagccgctgcagcgtgagcagccccagcaacaccaacaacagaagcaccctgagcagccctgctgccagcacagtgggcagcatctgcagccctgtgaacaatgccttctcctacacagccagcggcaccagcgctggcagcagcaccctgagagatgtggtgcccagcccagacacccaggagaagggggcccaggaggtgcccttccccaagacagaggaggtggagagcgccatcagcaatggagtgacaggccagctgaacatcgtgcagtacatcaagccagagccagatggagccttcagcagcagctgcctgggcggcaacagcaagatcaacagcgacagcagcttctctgtgcccatcaagcaggagagcaccaagcacagctgcagcggcaccagcttcaagggcaaccccaccgtgaaccccttccccttcatggatggcagctacttctccttcatggatgacaaggactactacagcctgagcggcatcctgggcccccctgtgcccggctttgatggcaactgtgagggcagcggcttccctgtgggcatcaagcaggagccagatgatggcagctactacccagaggccagcatccccagcagcgccatcgtgggcgtgaacagcggcggccagagcttccactacagaattggagcccagggcaccatcagcctgagccgcagcgcccgggaccagagcttccagcacctgagcagcttcccccctgtgaacaccctggtggagagctggaagagccatggagacctgagcagcagaagaagtgatggctaccctgtgctggagtacatcccagaaaatgtgagcagcagcaccctgcggtctgtgtccacaggcagcagccggcccagcaagatctgcctggtgtgtggagatgaggccagcggctgccactatggagtggtgacctgtggcagctgcaaggtgttcttcaagagagctgtggagggccagcacaactacctgtgtgccggcagaaatgactgcatcatcgacaagatccggaggaagaactgcccagcctgccgcctgcagaagtgcctgcaggccggcatgaacctgggcgccaggaagagcaagaagctgggcaagctgaagggcatccacgaggagcagccccagcagcagcagcccccacctcctcctcctccaccccagagccctgaggagggcaccacctacatcgccccagccaaggagcccagcgtgaacacagccctggtgccccagctgagcaccatcagccgggccctgacccccagccctgtgatggtgctggagaacatcgagcctgagatcgtgtatgccggctatgacagcagcaagccagacacagctgagaacctgctgagcaccctgaaccggctggccggcaagcagatgatccaggtggtgaagtgggccaaggtgctgcccggcttcaagaacctgcccctggaggaccagatcaccctcatccagtacagctggatgtgcctgagcagctttgccctgtcctggaggagctacaagcacaccaacagccagttcctgtactttgccccagacctggtgttcaatgaggagaagatgcaccagagcgccatgtatgagctgtgccagggcatgcaccagatcagcctgcagtttgtgcggctgcagctgacctttgaggagtacaccatcatgaaggtgctgctgctgctgagcaccatccccaaggatggcctgaagagccaggccgcctttgaggagatgaggaccaactacatcaaggagctgaggaagatggtgaccaagtgccccaacaacagcggccagagctggcagcgcttctaccagctgaccaagctgctggacagcatgcatgacctggtgtctgacctgctggagttctgcttctacaccttccgggagagccacgccctgaaggtggagttccctgccatgctggtggagatcatcagtgaccagctgcccaaggtggagagcggaaatgccaagcccctgtacttccacaggaagtag

SEQ ID NO: 16972 - DNA, 2121 bp, Artificial Sequence
  derived and/or modified sequence
atggagaccaagggctaccacagcctgcccgagggcctggacatggaacgcaggtggggtcaggtgagccaggccgttgagagaagtagtcttggaccaacagagcgaaccgacgagaataattatatggaaattgtgaacgtttcttgtgtgtcaggggccatacccaataactcaactcagggctccagtaaagaaaagcaggagctcttgccatgcctgcagcaggataataatcggccagggatactaacctcagatatcaagacagagctggagagcaaggagctctcagccaccgtggctgaatctatggggttatacatggattctgttcgtgatgctgactacagctacgagcagcagaatcagcagggcagtatgagtcctgcaaaaatataccagaatgttgaacagctggtgaagttctacaaagggaatgggcaccggccttcaaccctgtcctgcgtgaatacgccgctccgaagcttcatgagcgacagtggcagtagcgtgaatggcggggtgatgagggctgtcgttaagtctccaattatgtgtcacgagaagtctcctagcgtctgcagccctctgaacatgacttcctccgtctgtagccctgctggcatcaattccgtgtccagcacaactgccagctttggctccttccccgtacacagtccgatcacccaaggcaccccgctgacctgttcgccaaatgtagagaaccgcggctcccgtagccactctccggcccacgccagtaatgtggggtcccccttgtcctcacccttgtcatcaatgaaatcatccatctcttcccccccatcccattgcagcgtgaagtctcctgtaagcagtcccaacaacgtcacgctccggagctcagtgagcagccccgcaaacatcaataattccaggtgcagcgtgtcctctcccagtaacacaaacaatcgaagtacactcagctctccggccgccagcacagtcggcagcatttgttctcctgtcaacaatgcattcagctacacggcaagtggaacgagcgccgggtcctcaaccctgcgggacgtggtccctagccctgatacacaggaaaaaggcgcgcaggaggtgccattcccaaagactgaagaggtggaaagtgcaatttctaatggtgtcactggtcagctgaatatcgtccagtacattaaaccggaaccagatggggccttctcatctagctgcctgggcggtaacagcaaaattaattctgatagctccttctccgtccccataaaacaggaatcaacaaagcactcgtgcagcggaaccagcttcaaagggaatcctaccgtgaatccattccccttcatggacggttcttatttcagttttatggatgacaaggactactattctctcagtgggattctcggtccccccgtgcctggattcgacgggaactgtgagggctccgggttccccgtaggtattaagcaggagccagacgacgggtcctattaccccgaagccagcatcccaagctctgctatcgtcggagtaaacagcgggggccagtccttccattataggattggggcccaggggacaatttcattgagcagaagcgccagagatcagtcctttcagcatctgtcgagctttcccccggtaaacacgctggtggagagctggaagtctcatggcgacctgtcctcccgcagatctgatggttatcccgtgctggagtacataccagagaatgtctcatcttccaccttgaggtcggtctcaaccgggtcaagccgaccgtccaagatttgtttggtgtgcggcgacgaagcaagcggctgtcactacggggtcgtaacctgcggatcctgcaaggtcttcttcaagcgggcggtggagggtcagcataattatctctgcgctgggaggaatgattgtatcattgataagatcagaagaaagaactgccctgcttgtcggctacagaagtgtctgcaggctgggatgaatctcggggagcgacgatgcatatccctaccttgtatgaactatgcacgcggctgtactaaaagtgccttcagctcattcgactgctcctcacctctgaaaaacacaccgtcttag

SEQ ID NO: 16973 - DNA, 2955 bp, Artificial Sequence
  derived and/or modified sequence
atggagaccaagggctaccacagcctgcccgagggcctggacatggagcgcaggtggggacaggtttcgcaggccgtcgaaagatccagtttagggcccaccgaacggactgatgagaacaattatatggaaatagtaaatgtgagttgcgtgtcaggggctatcccaaacaacagcacacagggcagctctaaggaaaagcaggagctcctgccctgcttgcagcaagataacaaccggccgggaattcttacctcagacatcaagaccgaactggaatctaaggagctgtcagcaaccgtggccgagagcatggggttatacatggatagtgtgcgcgacgctgattattcatacgagcaacagaaccagcagggtagcatgagtcccgccaaaatttatcaaaacgtcgagcagctggtcaaattttataaaggcaacggccaccgcccatcaacgctaagctgcgtaaacacaccccttagaagcttcatgtccgactccgggtcaagtgtaaacggaggcgttatgagagcggtagttaagagtcctattatgtgtcatgagaagtccccttccgtttgctctcccctcaatatgacctctagtgtgtgttcacccgccggcatcaattctgtgagctcaacaacggcatcttttggctctttccctgtccactcaccaatcacacagggaacccccctaacgtgctctcccaacgtagagaacagggggtcccgcagccactcccctgcgcacgcttccaatgtcgggtcccctctgagctctcctctgtctagcatgaagtctagcatctctagcccaccctcgcactgctctgtcaagtcaccagtgagctcccctaacaacgttacgttgcgatcatccgtgtcatcacctgccaatatcaacaactctcggtgctctgtaagcagccctagcaacactaacaaccggagtactctctcgtcgccggctgcatccacagtgggatctatctgttctccagttaacaacgcgttctcatacactgcaagcggcacatcagcagggagtagcacactgagagacgttgttccttctccggatacacaggaaaaaggagcccaggaagtcccattccctaaaaccgaagaagtggaaagcgccatctctaacggggtgaccggacagctgaatattgtccaatacataaagccagaaccagatggagccttctcaagctcctgtctcggcggcaacagtaagatcaactctgattcaagcttcagtgtgcccataaagcaggaaagcactaagcattcctgcagcggtacttccttcaaggggaacccgacggtgaaccccttccccttcatggatggctcttatttctcatttatggacgataaggattattacagcttgagtggcatcctgggcccacccgtccctggattcgatgggaactgcgaaggatctggttttccggttggaataaagcaggaaccagacgacggatcttattatcctgaggcttccattcccagctctgctatagtgggggtgaacagtggaggccagagctttcattacaggataggggcccaaggaactatctctctctccaggagtgcgagggatcagtccttccagcatctgtctagcttcccaccagttaatactctggtggaaagctggaaatcacatggcgatctgtctagtaggcgctccgatggttaccccgtgttggagtacattcctgagaatgtgagctcctcgaccctgcggagtgttagcactggatcatctcgccctagtaagatttgtcttgtttgtggggacgaggcttctgggtgccattacggggtggtaacgtgcggaagttgcaaggtgttttttaaacgcgcagtcgaaggccaacataattacctctgtgcaggcaggaacgactgtatcattgacaagatcaggcgtaagaattgccctgcttgtcgattgcaaaagtgccttcaagccggaatgaacctaggtgcccgcaaatccaaaaagctgggaaagctcaagggtattcacgaggagcagcctcaacagcagcaaccaccaccacctccccccccgccgcagtctcctgaggagggcactacttatatcgcgcccgctaaggagcccagcgtcaatactgcattagtgcctcaactcagcacaatctccagggccctaactccttccccagtgatggtgttagagaatatcgaacctgaaattgtttacgccggatatgatagcagcaagcccgacacagcagaaaacctgctgtccactctgaatcggttagctggcaagcagatgattcaggtggtaaagtgggccaaggtgcttccaggctttaagaacttgcccctcgaggaccagatcacacttatacagtacagctggatgtgcctgtcatccttcgcattaagctggcgctcctacaagcacacaaattcccagttcctgtactttgcccctgacctcgtttttaatgaagagaaaatgcaccagagtgccatgtacgaactgtgccagggcatgcaccagataagcctccagtttgtgaggctgcaactgacattcgaagaatacacgataatgaaggtgcttctgctcctcagtaccatccctaaagacgggttgaagtcccaggcagcatttgaggagatgcggaccaactacatcaaagagctccggaagatggtgacaaaatgtcctaataactctgggcagtcctggcagaggttctaccagcttactaagcttctggactctatgcacgacttggtgtcagatctgcttgagttctgcttttatacttttcgagagtctcacgctctcaaggtcgaatttcccgccatgctggtggagatcatctcggaccagctccccaaggtcgagtctgggaatgctaagccactctactttcatagaaagtag

SEQ ID NO: 16974 - DNA, 2955 bp, Artificial Sequence
  derived and/or modified sequence
atggagaccaagggctaccacagcctgcccgagggcctggacatggaacggaggtgggggcaagtgtcgcaggccgtggaacgtagctcccttggcccaacagagcgcacagacgagaacaactatatggaaatcgtaaatgtttcttgtgtgagcggggcgatccctaacaacagtacccaaggctctagtaaagaaaagcaggaattgttgccctgcttacagcaggataataaccgcccaggaattctgacatccgatatcaagactgaactggagtccaaggagcttagtgctacagttgcagagtctatgggcctctatatggacagcgtgagagatgctgactactcatatgaacagcaaaaccagcagggtagcatgtcccccgctaagatctatcagaatgtggagcagctcgtgaaattctacaagggtaatggacaccgccccagcacgttgtcctgtgtgaacacaccgctgcgcagttttatgtcggactcaggctcctcagtcaatgggggagttatgcgcgccgtggtgaaatcccctattatgtgccacgagaaatctccttctgtgtgttcacctctcaatatgacaagctctgtttgtagtcctgctgggatcaacagtgtgtccagcaccaccgcatcattcgggtccttccccgtgcacagccctattacccagggcacaccgctgacttgctctcccaatgtcgaaaatcgcggtagtagatctcactcacccgcacacgcatcgaatgtcggatctccactctctagtcccctgagctctatgaagtccagcatttcaagccccccaagccattgttccgttaagtcacccgtaagctccccaaataatgtaacacttaggagtagcgtctcctctccagccaacatcaacaattcgcgctgttcggtaagctcacccagcaataccaataaccgtagcactctgtcaagtcccgccgcttctacggtggggtccatttgctctcctgtgaacaatgctttttcttacacggcatctggcacctccgcgggaagtagcaccctgcgagatgttgtgccgtcaccggacactcaggagaaaggggcccaggaagtcccatttcctaaaacagaggaagttgaatccgctatctcaaatggagtgacagggcagctcaatatagtccagtacataaaacctgaacctgatggcgctttctcttcttcctgtctaggcggcaatagcaaaatcaactcagactctagcttttccgtaccaataaagcaggagtccactaagcattcttgtagcgggacctccttcaaaggtaacccaacagtcaacccattcccattcatggacggtagctacttttccttcatggacgataaggattattattccctctctggaattttaggtcccccagtccctggttttgacgggaattgtgaaggctctggatttccggtgggaattaaacaagaaccagatgacggttcttactatcccgaggctagcataccaagcagcgcaattgtaggtgtcaacagtggcgggcaaagcttccattaccggatcggcgcccagggcaccatctcactgtccagaagtgcacgggaccagtcctttcaacacctgtcatctttccctcccgtgaacacattggtggagtcatggaaatcacacggggacctgagcagccgcagatctgacggttatcccgtgttagagtatattcccgaaaatgtgagctcctcaaccctgcgcagtgtcagtaccggctcatcaagaccgagtaagatctgcctggtgtgcggcgacgaggcctctggatgccactatggcgtggtcacatgtggctcctgtaaggttttcttcaagcgagcagttgagggtcagcacaattacttatgtgctggccggaacgactgtatcattgataagattcggcggaaaaactgtcctgcatgccgcctgcagaagtgccttcaggcaggaatgaatcttggggcccgaaagagcaaaaagctcggcaaactaaaaggtatacatgaagaacagcctcagcagcagcagccccctcccccacctccaccgcctcagtcccccgaagaaggcaccacatacatcgctcccgccaaggaaccttctgtgaatacagctctggtgccgcagctgtcgactatcagcagggcattgactccaagccctgtgatggtattagagaatatagaacctgaaatcgtctacgcaggttatgactcctctaaaccagataccgccgagaacttattgtcaactctgaatcggctggcaggtaaacagatgatccaagtcgtgaagtgggccaaggtacttcccggattcaagaacctgcctctagaagaccaaatcacgcttatacagtacagttggatgtgtctgagtagcttcgctttatcgtggcggagctacaaacacaccaatagtcaattcctgtactttgctcccgacctggtgttcaatgaggaaaagatgcaccagtccgcaatgtatgagttgtgtcaggggatgcatcagatctccctccagttcgtgcgcctccagttaacttttgaggagtacacaatcatgaaggtgctcctcctgctaagcacaattcctaaggacggactcaagtcacaggctgcttttgaggaaatgagaacgaactatattaaggagctgcggaaaatggtcaccaaatgccctaacaattctggacaatcttggcaaagattctaccagctcactaagttactcgattctatgcacgaccttgtctcagatctactggaattttgcttctacacattccgggagtcacacgccctcaaggtggagtttcctgcaatgctggtggaaataatcagtgatcagctgcctaaagtcgaatctggtaacgcaaaacccctgtattttcatcgtaagtag

SEQ ID NO: 16975 - DNA, 3150 bp, Artificial Sequence
  derived and/or modified sequence
cgggagccaacttcaggctgctcagaggaagcccgtgcagtcagtcacctgggtgcaagagcgttgctgcctcgggctctcccgctgcagggagagcggcactcgctggcctggatgtggttggatttaggggggctccgcagcaggggtttcgtggcggtggcaagcgctgcaacaggtagacggcgagagacggaccccggccgaggcagcgatggagaccaaaggctaccacagtctccctgaaggtctagatatggaaagacggtggggtcaagtttctcaggctgtggagcgttcttccctgggacctacagagaggaccgatgagaataactacatggagattgtcaacgtaagctgtgtttccggtgctattccaaacaacagtactcaaggaagcagcaaagaaaaacaagaactactcccttgccttcagcaagacaataatcggcctgggattttaacatctgatattaaaactgagctggaatctaaggaactttcagcaactgtagctgagtccatgggtttatatatggattctgtaagagatgctgactattcctatgagcagcagaaccaacaaggaagcatgagtccagctaagatttatcagaatgttgaacagctggtgaaattttacaaaggaaatggccatcgtccttccactctaagttgtgtgaacacgcccttgagatcatttatgtctgactctgggagctccgtgaatggtggcgtcatgcgcgccgttgttaaaagccctatcatgtgtcatgagaaaagcccgtctgtttgcagccctctgaacatgacatcttcggtttgcagccctgctggaatcaactctgtgtcctccaccacagccagctttggcagttttccagtgcacagcccaatcacccagggaactcctctgacatgctcccctaatgttgaaaatcgaggctccaggtcgcacagccctgcacatgctagcaatgtgggctctcctctctcaagtccgttaagtagcatgaaatcctcaatttccagccctccaagtcactgcagtgtaaaatctccagtctccagtcccaataatgtcactctgagatcctctgtgtctagccctgcaaatattaacaactcaaggtgctctgtttccagcccttcgaacactaataacagatccacgctttccagtccggcagccagtactgtgggatctatctgtagccctgtaaacaatgccttcagctacactgcttctggcacctctgctggatccagtacattgcgggatgtggttcccagtccagacacgcaggagaaaggtgctcaagaggtcccttttcctaagactgaggaagtagagagtgccatctcaaatggtgtgactggccagcttaatattgtccagtacataaaaccagaaccagatggagcttttagcagctcatgtctaggaggaaatagcaaaataaattcggattcttcattctcagtaccaataaagcaagaatcaaccaagcattcatgttcaggcacctcttttaaagggaatccaacagtaaacccgtttccatttatggatggctcgtatttttcctttatggatgataaagactattattccctatcaggaattttaggaccacctgtgcccggctttgatggtaactgtgaaggcagcggattcccagtgggtattaaacaagaaccagatgatgggagctattacccagaggccagcatcccttcctctgctattgttggggtgaattcaggtggacagtccttccactacaggattggtgctcaaggtacaatatctttatcacgatcggctagagaccaatctttccaacacctgagttcctttcctcctgtcaatactttagtggagtcatggaaatcacacggcgacctgtcgtctagaagaagtgatgggtatccggtcttagaatacattccagaaaatgtatcaagctctactttacgaagtgtttctactggatcttcaagaccttcaaaaatatgtttggtgtgtggggatgaggcttcaggatgccattatggggtagtcacctgtggcagctgcaaagttttcttcaaaagagcagtggaagggcaacacaactatttatgtgctggaagaaatgattgcatcattgataagattcgacgaaagaattgtcctgcttgcagacttcagaaatgtcttcaagctggaatgaatttaggagagagaagatgcatcagtctgccatgtatgaactatgccaggggatgcaccaaatcagccttcagttcgttcgactgcagctcacctttgaagaatacaccatcatgaaagttttgctgctactaagcacaattccaaaggatggcctcaaaagccaggctgcatttgaagaaatgaggacaaattacatcaaagaactgaggaagatggtaactaagtgtcccaacaattctgggcagagctggcagaggttctaccaactgaccaagctgctggactccatgcatgacctggtgagcgacctgctggaattctgcttctacaccttccgagagtcccatgcgctgaaggtagagttccccgcaatgctggtggagatcatcagcgaccagctgcccaaggtggagtcggggaacgccaagccgctctacttccaccggaagtgactgcccgctgcccagaagaactttgccttaagtttccctgtgttgttccacacccagaaggacccaagaaaacctgtttttaacatgtgatggttgattcacacttgttcaacagtttctcaagtttaaagtcatgtcagaggtttggagccgggaaagctgtttttccgtggatttggcgagaccagagcagtctgaaggattccccacctccaatcccccagcgcttagaaacatgttcctgttcctcgggatgaaaagccatatctagtcaataactctgattttgatattttcacagatggaagaagttttaactatgccgtgtagtttctggtatcgttcgcttgttttaaaagggttcaaggactaacgaacgttttaaagcttacccttggtttgcacataaaacgtatagtcaatatggggcattaatattcttttgttattaaaaaaacacaaaaaaataataaaaaa

SEQ ID NO: 16976 - DNA, 5712 bp, Artificial Sequence
  derived and/or modified sequence
attgctctacccaccgtcagcagggcgactgccactgccgggattatcatcctctccatcctcaccgccgatcagccaatattggacttgctggtggcggcggcagcagcggcggcgggagtctagccgttccccttcccccgccccagcctccccaccatgtcctagaaaagcgatggagaccaaaggctaccacagtctccctgaaggtctagatatggaaagacggtggggtcaagtttctcaggctgtggagcgttcttccctgggacctacagagaggaccgatgagaataactacatggagattgtcaacgtaagctgtgtttccggtgctattccaaacaacagtactcaaggaagcagcaaagaaaaacaagaactactcccttgccttcagcaagacaataatcggcctgggattttaacatctgatattaaaactgagctggaatctaaggaactttcagcaactgtagctgagtccatgggtttatatatggattctgtaagagatgctgactattcctatgagcagcagaaccaacaaggaagcatgagtccagctaagatttatcagaatgttgaacagctggtgaaattttacaaaggaaatggccatcgtccttccactctaagttgtgtgaacacgcccttgagatcatttatgtctgactctgggagctccgtgaatggtggcgtcatgcgcgccgttgttaaaagccctatcatgtgtcatgagaaaagcccgtctgtttgcagccctctgaacatgacatcttcggtttgcagccctgctggaatcaactctgtgtcctccaccacagccagctttggcagttttccagtgcacagcccaatcacccagggaactcctctgacatgctcccctaatgttgaaaatcgaggctccaggtcgcacagccctgcacatgctagcaatgtgggctctcctctctcaagtccgttaagtagcatgaaatcctcaatttccagccctccaagtcactgcagtgtaaaatctccagtctccagtcccaataatgtcactctgagatcctctgtgtctagccctgcaaatattaacaactcaaggtgctctgtttccagcccttcgaacactaataacagatccacgctttccagtccggcagccagtactgtgggatctatctgtagccctgtaaacaatgccttcagctacactgcttctggcacctctgctggatccagtacattgcgggatgtggttcccagtccagacacgcaggagaaaggtgctcaagaggtcccttttcctaagactgaggaagtagagagtgccatctcaaatggtgtgactggccagcttaatattgtccagtacataaaaccagaaccagatggagcttttagcagctcatgtctaggaggaaatagcaaaataaattcggattcttcattctcagtaccaataaagcaagaatcaaccaagcattcatgttcaggcacctcttttaaagggaatccaacagtaaacccgtttccatttatggatggctcgtatttttcctttatggatgataaagactattattccctatcaggaattttaggaccacctgtgcccggctttgatggtaactgtgaaggcagcggattcccagtgggtattaaacaagaaccagatgatgggagctattacccagaggccagcatcccttcctctgctattgttggggtgaattcaggtggacagtccttccactacaggattggtgctcaaggtacaatatctttatcacgatcggctagagaccaatctttccaacacctgagttcctttcctcctgtcaatactttagtggagtcatggaaatcacacggcgacctgtcgtctagaagaagtgatgggtatccggtcttagaatacattccagaaaatgtatcaagctctactttacgaagtgtttctactggatcttcaagaccttcaaaaatatgtttggtgtgtggggatgaggcttcaggatgccattatggggtagtcacctgtggcagctgcaaagttttcttcaaaagagcagtggaagggcaacacaactatttatgtgctggaagaaatgattgcatcattgataagattcgacgaaagaattgtcctgcttgcagacttcagaaatgtcttcaagctggaatgaatttaggagcacgaaagtcaaagaagttgggaaagttaaaagggattcacgaggagcagccacagcagcagcagcccccacccccacccccacccccgcaaagcccagaggaagggacaacgtacatcgctcctgcaaaagaaccctcggtcaacacagcactggttcctcagctctccacaatctcacgagcgctcacaccttcccccgttatggtccttgaaaacattgaacctgaaattgtatatgcaggctatgacagctcaaaaccagatacagccgaaaatctgctctccacgctcaaccgcttagcaggcaaacagatgatccaagtcgtgaagtgggcaaaggtacttccaggatttaaaaacttgcctcttgaggaccaaattaccctaatccagtattcttggatgtgtctatcatcatttgccttgagctggagatcgtacaaacatacgaacagccaatttctctattttgcaccagacctagtctttaatgaagagaagatgcatcagtctgccatgtatgaactatgccaggggatgcaccaaatcagccttcagttcgttcgactgcagctcacctttgaagaatacaccatcatgaaagttttgctgctactaagcacaattccaaaggatggcctcaaaagccaggctgcatttgaagaaatgaggacaaattacatcaaagaactgaggaagatggtaactaagtgtcccaacaattctgggcagagctggcagaggttctaccaactgaccaagctgctggactccatgcatgacctggtgagcgacctgctggaattctgcttctacaccttccgagagtcccatgcgctgaaggtagagttccccgcaatgctggtggagatcatcagcgaccagctgcccaaggtggagtcggggaacgccaagccgctctacttccaccggaagtgactgcccgctgcccagaagaactttgccttaagtttccctgtgttgttccacacccagaaggacccaagaaaacctgtttttaacatgtgatggttgattcacacttgttcaacagtttctcaagtttaaagtcatgtcagaggtttggagccgggaaagctgtttttccgtggatttggcgagaccagagcagtctgaaggattccccacctccaatcccccagcgcttagaaacatgttcctgttcctcgggatgaaaagccatatctagtcaataactctgattttgatattttcacagatggaagaagttttaactatgccgtgtagtttctggtatcgttcgcttgttttaaaagggttcaaggactaacgaacgttttaaagcttacccttggtttgcacataaaacgtatagtcaatatggggcattaatattcttttgttattaaaaaaacacaaaaaaataataaaaaaatatatacagattcctgttgtgtaataacagaactcgtggcgtggggcagcagctgcctctgagccctcgctcgtccacggtcttctgcatcactggtatacacactcgttagcgtccatttcttatttaattagaatggataagatgatgttaaatgccttggtttgatttctagtatctattgtgttggctttacaaataattttttgcagtcttttgctgtgctgtacattactgtatgtataaattatgaaggacctgaaataaggtataaggatcttttgtaaatgagacacatacaaaaaaaatctttaatggttaataggatgaatgggaaagtatttttgaaagaattctattttgctggagactatttaagtactatctttgtctaaacaaggtaatttttttttgtaaagtgcaatgtcctgcatgcataatgaaccgtttacagtgtatttaagaaagggaaagctgtgccttttttagcttcatatctaatttaccattattttacagtctctgttgtaaataaccacactgaaacctcttcggttgtcttgaaacctttctactttttctgtactttttgttttgttcttggtctcccgcttggggcatttgtgggactccagcacgttttctggcttctgcttcatcctgctccatcggggaatgacacactgcggtgtctgcagctcctggaaggtgtcatttgacaacacatgtgggagaggaggtccttggagtgctgcagctttgggaaagctgcctcgtttcccttttcctctagaagcagaaccagctctacgagagtgagactgggaacttgatggctcagagagcatcttttcctcccattttagaaaatcagattttctcctgtgggaaaaaaaaattccatgcactctctctctgttaaagatcagctattcccttctgatcttggaaagaggttctgcactcctggaaccggtcacaggaacgcacagatcatggcaggatgcgctgggacggcccatcttggcaaggttcagtctgaatggcatggagaccgggagatagaggggttttagatttttaaaaggtaggttttaaaaataagttttatacataaacagttttggagaaaaattacagatcatataagcaagacagtggcactaaaatgtttaattcattaatctgtttgtttggcactgatgcaatgtatggcttttctcttgccccaaatcacaaacatatgtatctttggggaaactaacaatatgattgcactaaataaactactttgaatagaggccaaattaatcttttaaaaatgatgataatcatcaggtttactcagtgaaatcatattaattattttccaaaatctaaaagctgtagctggagaagcccatggccacgaggaagcagcaattaattagatcaacacttttctccagggttcaccatgcaggcaacattaccttgtctttcaaaagacacctgccttatgcaaggggaaacctgtgaaagctgcactcagagggaggagtttttcttacataatttgcaatttcaggaatttaatttataggcagatctttaaatacagtcaacttacggtgcacagtaatatgaaagccacactttgaaggtaataaatacacagcatgcagactgggagttgctagcaaacaaatggcttacttacaaaagcagcttttagttcagacttagtttttataaaatgggaattctgacttacttaaccaggtttgggatggagatggtctgcatcagctttttgtattaacaaagttactggctctttgtgtgtctccaggtaactttgcttgattaaacagcaaagccatattctaaattcactgttgaatgcctgtcccagtccaaattgtctgtctgctcttatttttgtaccatattgctcttaaaaatcttggtttggtacagttcataattcaccaaaagttcatataatttaaagaaacactaaattagtttaaaatgaagcaatttatatctttatgcaaaaacatatgtctgtctttgcaaaggactgtaagcagattacaataaatcctttactttaatcacc

SEQ ID NO: 16977 - DNA, 5893 bp, Artificial Sequence
  derived and/or modified sequence
aaaagggccagccctccagctggcccactccccctccgggctttcgcccgccctctctccctcccttttttgcccgccctggccctgcccctgcccctgccccctcctctcagcccctccgcgcccggggtgtcattgggcccgggagacgggagccaacttcaggctgctcagaggaagcccgtgcagtcagtcacctgggtgcaagagcgttgctgcctcgggctctcccgctgcagggagagcggcactcgctggcctggatgtggttggatttaggggggctccgcagcaggggtttcgtggcggtggcaagcgctgcaacaggtagacggcgagagacggaccccggccgaggcagcgatggagaccaaaggctaccacagtctccctgaaggtctagatatggaaagacggtggggtcaagtttctcaggctgtggagcgttcttccctgggacctacagagaggaccgatgagaataactacatggagattgtcaacgtaagctgtgtttccggtgctattccaaacaacagtactcaaggaagcagcaaagaaaaacaagaactactcccttgccttcagcaagacaataatcggcctgggattttaacatctgatattaaaactgagctggaatctaaggaactttcagcaactgtagctgagtccatgggtttatatatggattctgtaagagatgctgactattcctatgagcagcagaaccaacaaggaagcatgagtccagctaagatttatcagaatgttgaacagctggtgaaattttacaaaggaaatggccatcgtccttccactctaagttgtgtgaacacgcccttgagatcatttatgtctgactctgggagctccgtgaatggtggcgtcatgcgcgccgttgttaaaagccctatcatgtgtcatgagaaaagcccgtctgtttgcagccctctgaacatgacatcttcggtttgcagccctgctggaatcaactctgtgtcctccaccacagccagctttggcagttttccagtgcacagcccaatcacccagggaactcctctgacatgctcccctaatgttgaaaatcgaggctccaggtcgcacagccctgcacatgctagcaatgtgggctctcctctctcaagtccgttaagtagcatgaaatcctcaatttccagccctccaagtcactgcagtgtaaaatctccagtctccagtcccaataatgtcactctgagatcctctgtgtctagccctgcaaatattaacaactcaaggtgctctgtttccagcccttcgaacactaataacagatccacgctttccagtccggcagccagtactgtgggatctatctgtagccctgtaaacaatgccttcagctacactgcttctggcacctctgctggatccagtacattgcgggatgtggttcccagtccagacacgcaggagaaaggtgctcaagaggtcccttttcctaagactgaggaagtagagagtgccatctcaaatggtgtgactggccagcttaatattgtccagtacataaaaccagaaccagatggagcttttagcagctcatgtctaggaggaaatagcaaaataaattcggattcttcattctcagtaccaataaagcaagaatcaaccaagcattcatgttcaggcacctcttttaaagggaatccaacagtaaacccgtttccatttatggatggctcgtatttttcctttatggatgataaagactattattccctatcaggaattttaggaccacctgtgcccggctttgatggtaactgtgaaggcagcggattcccagtgggtattaaacaagaaccagatgatgggagctattacccagaggccagcatcccttcctctgctattgttggggtgaattcaggtggacagtccttccactacaggattggtgctcaaggtacaatatctttatcacgatcggctagagaccaatctttccaacacctgagttcctttcctcctgtcaatactttagtggagtcatggaaatcacacggcgacctgtcgtctagaagaagtgatgggtatccggtcttagaatacattccagaaaatgtatcaagctctactttacgaagtgtttctactggatcttcaagaccttcaaaaatatgtttggtgtgtggggatgaggcttcaggatgccattatggggtagtcacctgtggcagctgcaaagttttcttcaaaagagcagtggaagggcaacacaactatttatgtgctggaagaaatgattgcatcattgataagattcgacgaaagaattgtcctgcttgcagacttcagaaatgtcttcaagctggaatgaatttaggagcacgaaagtcaaagaagttgggaaagttaaaagggattcacgaggagcagccacagcagcagcagcccccacccccacccccacccccgcaaagcccagaggaagggacaacgtacatcgctcctgcaaaagaaccctcggtcaacacagcactggttcctcagctctccacaatctcacgagcgctcacaccttcccccgttatggtccttgaaaacattgaacctgaaattgtatatgcaggctatgacagctcaaaaccagatacagccgaaaatctgctctccacgctcaaccgcttagcaggcaaacagatgatccaagtcgtgaagtgggcaaaggtacttccaggatttaaaaacttgcctcttgaggaccaaattaccctaatccagtattcttggatgtgtctatcatcatttgccttgagctggagatcgtacaaacatacgaacagccaatttctctattttgcaccagacctagtctttaatgaagagaagatgcatcagtctgccatgtatgaactatgccaggggatgcaccaaatcagccttcagttcgttcgactgcagctcacctttgaagaatacaccatcatgaaagttttgctgctactaagcacaattccaaaggatggcctcaaaagccaggctgcatttgaagaaatgaggacaaattacatcaaagaactgaggaagatggtaactaagtgtcccaacaattctgggcagagctggcagaggttctaccaactgaccaagctgctggactccatgcatgacctggtgagcgacctgctggaattctgcttctacaccttccgagagtcccatgcgctgaaggtagagttccccgcaatgctggtggagatcatcagcgaccagctgcccaaggtggagtcggggaacgccaagccgctctacttccaccggaagtgactgcccgctgcccagaagaactttgccttaagtttccctgtgttgttccacacccagaaggacccaagaaaacctgtttttaacatgtgatggttgattcacacttgttcaacagtttctcaagtttaaagtcatgtcagaggtttggagccgggaaagctgtttttccgtggatttggcgagaccagagcagtctgaaggattccccacctccaatcccccagcgcttagaaacatgttcctgttcctcgggatgaaaagccatatctagtcaataactctgattttgatattttcacagatggaagaagttttaactatgccgtgtagtttctggtatcgttcgcttgttttaaaagggttcaaggactaacgaacgttttaaagcttacccttggtttgcacataaaacgtatagtcaatatggggcattaatattcttttgttattaaaaaaacacaaaaaaataataaaaaaatatatacagattcctgttgtgtaataacagaactcgtggcgtggggcagcagctgcctctgagccctcgctcgtccacggtcttctgcatcactggtatacacactcgttagcgtccatttcttatttaattagaatggataagatgatgttaaatgccttggtttgatttctagtatctattgtgttggctttacaaataattttttgcagtcttttgctgtgctgtacattactgtatgtataaattatgaaggacctgaaataaggtataaggatcttttgtaaatgagacacatacaaaaaaaatctttaatggttaataggatgaatgggaaagtatttttgaaagaattctattttgctggagactatttaagtactatctttgtctaaacaaggtaatttttttttgtaaagtgcaatgtcctgcatgcataatgaaccgtttacagtgtatttaagaaagggaaagctgtgccttttttagcttcatatctaatttaccattattttacagtctctgttgtaaataaccacactgaaacctcttcggttgtcttgaaacctttctactttttctgtactttttgttttgttcttggtctcccgcttggggcatttgtgggactccagcacgttttctggcttctgcttcatcctgctccatcggggaatgacacactgcggtgtctgcagctcctggaaggtgtcatttgacaacacatgtgggagaggaggtccttggagtgctgcagctttgggaaagctgcctcgtttcccttttcctctagaagcagaaccagctctacgagagtgagactgggaacttgatggctcagagagcatcttttcctcccattttagaaaatcagattttctcctgtgggaaaaaaaaattccatgcactctctctctgttaaagatcagctattcccttctgatcttggaaagaggttctgcactcctggaaccggtcacaggaacgcacagatcatggcaggatgcgctgggacggcccatcttggcaaggttcagtctgaatggcatggagaccgggagatagaggggttttagatttttaaaaggtaggttttaaaaataagttttatacataaacagttttggagaaaaattacagatcatataagcaagacagtggcactaaaatgtttaattcattaatctgtttgtttggcactgatgcaatgtatggcttttctcttgccccaaatcacaaacatatgtatctttggggaaactaacaatatgattgcactaaataaactactttgaatagaggccaaattaatcttttaaaaatgatgataatcatcaggtttactcagtgaaatcatattaattattttccaaaatctaaaagctgtagctggagaagcccatggccacgaggaagcagcaattaattagatcaacacttttctccagggttcaccatgcaggcaacattaccttgtctttcaaaagacacctgccttatgcaaggggaaacctgtgaaagctgcactcagagggaggagtttttcttacataatttgcaatttcaggaatttaatttataggcagatctttaaatacagtcaacttacggtgcacagtaatatgaaagccacactttgaaggtaataaatacacagcatgcagactgggagttgctagcaaacaaatggcttacttacaaaagcagcttttagttcagacttagtttttataaaatgggaattctgacttacttaaccaggtttgggatggagatggtctgcatcagctttttgtattaacaaagttactggctctttgtgtgtctccaggtaactttgcttgattaaacagcaaagccatattctaaattcactgttgaatgcctgtcccagtccaaattgtctgtctgctcttatttttgtaccatattgctcttaaaaatcttggtttggtacagttcataattcaccaaaagttcatataatttaaagaaacactaaattagtttaaaatgaagcaatttatatctttatgcaaaaacatatgtctgtctttgcaaaggactgtaagcagattacaataaatcctttacttt

SEQ ID NO: 16978 - DNA, 2121 bp, Artificial Sequence
  derived and/or modified sequence
atggagacaaagggttaccactcactgccggagggcttagacatggagcgcaggtggggacaggtatcacaagccgtggaacggtccagcctggggccaaccgaacgcactgatgaaaacaattacatggagatagttaacgtgtcctgcgtcagcggagctattccgaataattcaacccagggctccagcaaggagaagcaagaactccttccctgccttcaacaggataataacaggccgggtattttaacatcagacattaagacagaactggaatcaaaggaactgtcggccactgttgctgaaagcatgggcctgtatatggacagcgtgcgggatgccgattactcctacgagcagcagaatcagcagggcagcatgtccccggctaagatctatcagaacgtcgaacagttagtgaagttctacaaagggaatgggcatcgcccttccacacttagctgtgttaatacgcctcttaggtccttcatgtctgattccggctccagcgtgaatgggggagtcatgcgcgcagtggtaaaaagtccgatcatgtgtcacgagaaatctccatctgtgtgcagcccgctgaatatgactagtagcgtgtgcagccccgctggcatcaattcggtcagctcgaccacagctagcttcggcagttttcccgttcacagtcccattacccagggcaccccacttacatgtagccctaatgtggagaaccggggatcaaggtcacacagcccggctcacgcttcaaacgtcggaagtcctctctcctcccccctctcctctatgaaaagctctataagttcgccgccatcccactgctctgtcaagtcccccgtgtcctcgccaaacaatgtcaccctgaggtcctctgtgagtagccccgcaaatatcaacaatagcagatgcagcgtgtcttccccatcaaacaccaacaacaggagcaccctgtcttcgcctgcagctagtaccgtggggagtatatgttccccagtgaacaatgccttttcttataccgcctctggaacctccgccggtagctctactctgcgcgacgtagtgccaagcccagacacacaagagaaaggagcccaggaagtgccctttcctaagaccgaggaggtggagtcagccatttcgaacggggtaaccggacagttgaatattgtgcagtacattaagccagaaccagatggagcattttcttcctcttgcttgggcggaaattccaagatcaattccgatagcagcttcagcgtgccgattaaacaggagtcgaccaaacatagctgttcgggcactagtttcaaaggaaatcccacagttaatccttttccattcatggacgggtcttatttttcatttatggatgacaaggactattactctctctccggcatcctgggcccaccggtcccgggattcgacggaaattgcgagggttccggttttcccgtgggcattaagcaggaacctgatgacggatcttactatcctgaagcgtccatcccatccagcgctatagtaggggtaaactccggaggccaaagctttcactataggatcggggcacagggcacgatttcactgtcacggtctgcacgggaccagtcctttcagcaccttagcagcttcccccctgtgaatactcttgtagagtcctggaaatctcacggcgacctctcatctcgcagaagcgatggctaccccgtgcttgaatacattcctgagaatgtctcctcatcaaccctacgatctgtaagcaccggctcctctagacctagcaaaatttgccttgtctgtggcgatgaagcctccggatgtcattatggtgtggtgacctgtggatcatgtaaggtgtttttcaagcgtgccgtggaggggcaacataactacttgtgtgccggtcgaaatgactgcattatcgataaaattcgacggaaaaactgcccagcttgtagactccaaaagtgcctgcaggcaggcatgaatttgggggaacgcagatgtatttccctgccctgtatgaactatgctagaggctgcacaaaatcagcatttagctcattcgactgctcttccccgctcaagaataccccatcgtag

SEQ ID NO: 16979 - DNA, 2955 bp, Artificial Sequence
  derived and/or modified sequence
atggagacaaagggttaccattctttgcccgaaggtctggatatggagcggcgatggggtcaggtttctcaggcagtggaaaggtcttctctggggccaacagaaagaacagacgaaaacaattacatggaaattgttaacgtgtcctgtgtctccggcgctattccgaacaactcgacccaaggaagctcaaaagagaaacaggagctgctgccctgtctgcagcaagataacaatcgtcccggaatcttgacaagcgacatcaaaaccgagcttgaaagcaaagaactgtctgctaccgtggctgagtctatggggctgtatatggatagcgtgagggatgcggattactcctacgagcagcagaaccagcagggaagcatgagccccgcaaagatataccaaaatgttgagcaactggttaagttctataagggcaacggacaccgccctagtaccttgagctgcgtcaatacccctcttcgctcattcatgtccgacagcggcagttcagttaacgggggagttatgcgcgctgttgttaaatctccaattatgtgtcacgagaaatctccatctgtctgcagtcctttgaatatgacgagctctgtgtgcagccccgctggcataaattcggtgtccagtaccactgcgagtttcggttcttttccggttcattctcccatcacacaaggcacccccctgacatgtagccctaacgtcgagaaccggggatcacgttcgcatagccccgctcacgccagtaatgtaggaagccccctcagttccccactgtcatccatgaagtctagcattagcagtccgcctagtcactgttctgtcaagagtcctgtctcatcacctaataacgtgacactgcgctcctcagtttcctccccagctaacattaacaatagcagatgcagcgtttcctctccctccaataccaacaaccgaagtacactttcttcaccggcagcttctacggtcggaagcatttgtagtccggtgaacaatgctttttcttatactgcctccggcacttccgcgggttcgtctactcttcgcgacgtagtgcctagtcccgatacccaagaaaaaggcgctcaggaagtgccttttcctaaaactgaggaagtggaatcagctatctccaacggcgtgacaggccagctaaacatcgtacaatacatcaagcctgagccggacggcgctttttccagctcctgtctggggggaaactccaaaattaatagcgactctagtttcagcgtgccaatcaaacaggagagtaccaagcacagctgtagcggaacctcctttaagggcaatcctacagtgaacccatttccattcatggatggctcttatttctcctttatggacgacaaggattactacagccttagcggaatactcggccctcccgtccccggtttcgacggcaactgtgagggctcaggtttcccagtaggaatcaaacaggagcccgatgatggaagctactaccctgaggcaagtattccatcatccgccattgtcggagttaactcgggaggacagtcttttcattaccggataggagctcagggaacaatttctctgagtcgaagtgcgagagaccagagcttccagcacctgtccagttttcccccagtgaacactctggtggaatcatggaagtctcatggggaccttagttcaagacgctccgacgggtaccctgtgctcgagtacattcccgagaacgtttcctctagtaccctcagatctgtgtctacggggtcctcccggccatccaagatctgtttggtgtgtggtgacgaggcaagcggctgccactatggcgtcgtcacatgcggcagttgcaaggtgtttttcaaacgtgccgttgagggtcagcataattacctgtgcgccggacgcaacgattgtattattgataagatccgacgtaaaaattgtcctgcttgtagactccagaaatgcttgcaggccggtatgaacctgggtgcacggaagtcaaaaaaactggggaagctaaaagggattcatgaagagcagcctcagcagcaacagccccctccaccaccaccccctccccaatcccccgaggaaggaactacttatatagccccagccaaggaacccagcgtgaataccgcactggttccccaacttagtacaatttcacgagcgctcaccccctcacctgtgatggtccttgagaacattgagccggagatcgtgtacgccggttacgactcaagcaagcccgacacagcggagaatttactctctactcttaatcggcttgccggaaaacagatgatccaggtcgttaaatgggctaaagtgttgccaggattcaagaatttgccacttgaggatcagattactttaattcagtattcctggatgtgtcttagcagcttcgccctgagctggcgcagctataagcacacaaattcacagtttctgtatttcgccccagatttagtattcaatgaagaaaaaatgcaccagagcgccatgtacgagctgtgccagggaatgcaccagattagcctgcaattcgtgaggttacagctcactttcgaagaatatactatcatgaaggtgctgctgctcctaagcaccatccccaaggatggtctcaaatcgcaagctgctttcgaggaaatgcgcacaaactatatcaaggagcttaggaagatggtgacaaagtgccctaataattcgggccagagttggcagcggttctatcagctgaccaagctgctagactccatgcatgacctcgtcagcgatcttctagaattctgtttctacacttttagagagagccacgctcttaaggttgagtttcccgcaatgctcgttgagatcatctcagatcagctacctaaagtggaatcagggaatgccaagcccctgtacttccaccgcaagtag

SEQ ID NO: 16980 - DNA, 2955 bp, Artificial Sequence
  derived and/or modified sequence
atggagaccaaagggtaccacagcttgcctgaaggactcgacatggagcggagatggggccaggtatctcaagcggtggaacggtcttctctaggtcctactgaacgcaccgatgaaaataactatatggaaatcgttaatgtttcatgtgtgagcggggcaatcccgaataactctacgcagggttctagcaaggaaaagcaggaactgctcccatgtctgcaacaggataacaatagacctgggatcctcacatctgacattaagactgagctcgagtccaaggaactcagtgctacggtggccgagagtatgggtctttacatggacagcgtgagggacgccgattacagctacgagcagcagaatcagcagggctctatgtctcccgcaaaaatctaccagaatgtcgagcagttagtgaaattctacaaaggaaatggccaccgacccagcaccctgagctgcgtcaacacccctctccgttcattcatgtccgatagtggatcctcggtcaacggaggcgtcatgagagccgttgtgaagtcccctatcatgtgccacgaaaagtctccatctgtgtgctcacctctgaacatgaccagtagcgtgtgctctccggcaggaatcaattctgtaagctcaaccacggcttcctttgggtcttttcctgtacactccccaataacacaggggacacctctcacgtgctccccgaacgtggagaatagaggttctcggtctcactccccggcacacgcttccaatgtgggtagcccactgagttcaccattgtcatctatgaagtcctcaatttcttctcccccttcgcactgttccgtgaaatcgcctgtgtcctcaccgaataatgtcactctgaggtccagtgtctcttcacccgctaacatcaacaattcccggtgctctgtgagttccccttccaacactaacaatcgatcaactctctcctcgccagccgcttcaaccgtgggatcaatctgttcccccgttaataacgctttctcctacactgcctctggcaccagcgccggatcttccactctgagggacgtagtcccatccccagatacccaggagaagggcgctcaagaggtgccattccccaaaacagaggaagtggaatcagcaatctcaaacggagtaaccggacagttgaacatcgtgcagtatatcaagcctgagccagacggagccttttctagctcttgtctgggaggtaattccaaaatcaattcagattccagcttcagtgttccgataaagcaggaaagtacaaaacactcctgtagcgggacctccttcaagggcaaccccaccgtaaacccattcccattcatggatgggtcttatttttcttttatggacgacaaggactattattcactgtccgggattttgggcccaccagtacccggatttgatggcaactgcgagggttcaggcttccctgtcgggataaagcaggagcccgacgatgggtcctattatcctgaagcctctatcccttcttctgctattgttggcgtcaactcagggggacaatcgtttcactaccggataggggcacagggtactatctctctgtcccggtccgctcgtgaccagtcctttcagcatctgagctctttccccccagtgaacaccttggtggaatcttggaaaagtcacggcgacctgagctccaggcgaagcgatggttatcccgtgcttgaatacattcctgaaaacgtgagctccagcaccctacgttcagttagtacggggtcctccaggccatccaagatttgtctggtgtgtggcgatgaggcatccggctgccactatggggtcgtcacctgtggatcatgtaaagtattcttcaagcgagccgttgagggtcagcacaattacctgtgcgctggacgcaacgattgtatcattgacaagatcaggagaaaaaactgccccgcatgcaggctgcaaaagtgtttgcaggctggcatgaacttgggggcaaggaagtcgaagaagttgggaaagctcaaaggcatccacgaggaacagccgcagcagcagcagcccccaccccctccccctccgcctcagtcccctgaggagggcaccacgtacatcgccccagccaaggagccttcagttaataccgccctggtgcctcagctcagtactatcagcagagccttgaccccaagtccggtcatggtgctggagaatatcgagccagaaatcgtgtacgcgggttacgactcctctaagcctgacaccgccgaaaatcttctgagcaccttgaacaggttggccggaaaacagatgatccaggtagtcaagtgggccaaggttttgccaggtttcaaaaacttgccattggaagatcaaatcactctaattcaatattcctggatgtgcctttcttctttcgctctgtcatggcggtcctacaaacataccaatagtcaatttctctactttgcaccggacctcgtttttaacgaggaaaagatgcatcagagtgcaatgtatgagttatgccagggaatgcaccagattagtttacagtttgttaggctgcagctcacctttgaagaatacaccatcatgaaagtgctcctgttactctccaccatcccaaaggatggtctgaagtctcaggcagcgttcgaggaaatgaggacaaattacataaaagaactcagaaaaatggtgaccaagtgccctaataactccggccaaagctggcagcgtttctatcagctcacaaagctgttggattccatgcatgacttggtgtccgatctgttagaattttgcttctataccttccgagagagccatgcccttaaagtcgagttccccgctatgctggttgaaatcatatcagatcagttgcctaaagtggaatctggaaatgcaaagcccctgtatttccatcgaaagtag

SEQ ID NO: 16981 - DNA, 2121 bp, Artificial Sequence
  derived and/or modified sequence
atggagaccaagggctaccacagcctgcccgagggcctggacatggagagaagatggggccaggtgagccaggccgtggagagaagcagcctgggccccaccgagagaaccgacgagaacaactacatggagatcgtgaacgtgagctgcgtgagcggcgccatccccaacaacagcacccagggcagcagcaaggagaagcaggagctgctgccctgcctgcagcaggacaacaacagacccggcatcctgaccagcgacatcaagaccgagctggagagcaaggagctgagcgccaccgtggccgagagcatgggcctgtacatggacagcgtgagagacgccgactacagctacgagcagcagaaccagcagggcagcatgagccccgccaagatctaccagaacgtggagcagctggtgaagttctacaagggcaacggccacagacccagcaccctgagctgcgtgaacacccccctgagaagcttcatgagcgacagcggcagcagcgtgaacggcggcgtgatgagagccgtggtgaagagccccatcatgtgccacgagaagagccccagcgtgtgcagccccctgaacatgaccagcagcgtgtgcagccccgccggcatcaacagcgtgagcagcaccaccgccagcttcggcagcttccccgtgcacagccccatcacccagggcacccccctgacctgcagccccaacgtggagaacagaggcagcagaagccacagccccgcccacgccagcaacgtgggcagccccctgagcagccccctgagcagcatgaagagcagcatcagcagcccccccagccactgcagcgtgaagagccccgtgagcagccccaacaacgtgaccctgagaagcagcgtgagcagccccgccaacatcaacaacagcagatgcagcgtgagcagccccagcaacaccaacaacagaagcaccctgagcagccccgccgccagcaccgtgggcagcatctgcagccccgtgaacaacgccttcagctacaccgccagcggcaccagcgccggcagcagcaccctgagagacgtggtgcccagccccgacacccaggagaagggcgcccaggaggtgcccttccccaagaccgaggaggtggagagcgccatcagcaacggcgtgaccggccagctgaacatcgtgcagtacatcaagcccgagcccgacggcgccttcagcagcagctgcctgggcggcaacagcaagatcaacagcgacagcagcttcagcgtgcccatcaagcaggagagcaccaagcacagctgcagcggcaccagcttcaagggcaaccccaccgtgaaccccttccccttcatggacggcagctacttcagcttcatggacgacaaggactactacagcctgagcggcatcctgggcccccccgtgcccggcttcgacggcaactgcgagggcagcggcttccccgtgggcatcaagcaggagcccgacgacggcagctactaccccgaggccagcatccccagcagcgccatcgtgggcgtgaacagcggcggccagagcttccactacagaatcggcgcccagggcaccatcagcctgagcagaagcgccagagaccagagcttccagcacctgagcagcttcccccccgtgaacaccctggtggagagctggaagagccacggcgacctgagcagcagaagaagcgacggctaccccgtgctggagtacatccccgagaacgtgagcagcagcaccctgagaagcgtgagcaccggcagcagcagacccagcaagatctgcctggtgtgcggcgacgaggccagcggctgccactacggcgtggtgacctgcggcagctgcaaggtgttcttcaagagagccgtggagggccagcacaactacctgtgcgccggcagaaacgactgcatcatcgacaagatcagaagaaagaactgccccgcctgcagactgcagaagtgcctgcaggccggcatgaacctgggcgagagaagatgcatcagcctgccctgcatgaactacgccagaggctgcaccaagagcgccttcagcagcttcgactgcagcagccccctgaagaacacccccagctag

SEQ ID NO: 16982 - DNA, 2955 bp, Artificial Sequence
  derived and/or modified sequence
atggagaccaagggctaccacagcctgcccgagggcctggacatggagagaagatggggccaggtgagccaggccgtggagagaagcagcctgggccccaccgagagaaccgacgagaacaactacatggagatcgtgaacgtgagctgcgtgagcggcgccatccccaacaacagcacccagggcagcagcaaggagaagcaggagctgctgccctgcctgcagcaggacaacaacagacccggcatcctgaccagcgacatcaagaccgagctggagagcaaggagctgagcgccaccgtggccgagagcatgggcctgtacatggacagcgtgagagacgccgactacagctacgagcagcagaaccagcagggcagcatgagccccgccaagatctaccagaacgtggagcagctggtgaagttctacaagggcaacggccacagacccagcaccctgagctgcgtgaacacccccctgagaagcttcatgagcgacagcggcagcagcgtgaacggcggcgtgatgagagccgtggtgaagagccccatcatgtgccacgagaagagccccagcgtgtgcagccccctgaacatgaccagcagcgtgtgcagccccgccggcatcaacagcgtgagcagcaccaccgccagcttcggcagcttccccgtgcacagccccatcacccagggcacccccctgacctgcagccccaacgtggagaacagaggcagcagaagccacagccccgcccacgccagcaacgtgggcagccccctgagcagccccctgagcagcatgaagagcagcatcagcagcccccccagccactgcagcgtgaagagccccgtgagcagccccaacaacgtgaccctgagaagcagcgtgagcagccccgccaacatcaacaacagcagatgcagcgtgagcagccccagcaacaccaacaacagaagcaccctgagcagccccgccgccagcaccgtgggcagcatctgcagccccgtgaacaacgccttcagctacaccgccagcggcaccagcgccggcagcagcaccctgagagacgtggtgcccagccccgacacccaggagaagggcgcccaggaggtgcccttccccaagaccgaggaggtggagagcgccatcagcaacggcgtgaccggccagctgaacatcgtgcagtacatcaagcccgagcccgacggcgccttcagcagcagctgcctgggcggcaacagcaagatcaacagcgacagcagcttcagcgtgcccatcaagcaggagagcaccaagcacagctgcagcggcaccagcttcaagggcaaccccaccgtgaaccccttccccttcatggacggcagctacttcagcttcatggacgacaaggactactacagcctgagcggcatcctgggcccccccgtgcccggcttcgacggcaactgcgagggcagcggcttccccgtgggcatcaagcaggagcccgacgacggcagctactaccccgaggccagcatccccagcagcgccatcgtgggcgtgaacagcggcggccagagcttccactacagaatcggcgcccagggcaccatcagcctgagcagaagcgccagagaccagagcttccagcacctgagcagcttcccccccgtgaacaccctggtggagagctggaagagccacggcgacctgagcagcagaagaagcgacggctaccccgtgctggagtacatccccgagaacgtgagcagcagcaccctgagaagcgtgagcaccggcagcagcagacccagcaagatctgcctggtgtgcggcgacgaggccagcggctgccactacggcgtggtgacctgcggcagctgcaaggtgttcttcaagagagccgtggagggccagcacaactacctgtgcgccggcagaaacgactgcatcatcgacaagatcagaagaaagaactgccccgcctgcagactgcagaagtgcctgcaggccggcatgaacctgggcgccagaaagagcaagaagctgggcaagctgaagggcatccacgaggagcagccccagcagcagcagcccccccccccccccccccccccccagagccccgaggagggcaccacctacatcgcccccgccaaggagcccagcgtgaacaccgccctggtgccccagctgagcaccatcagcagagccctgacccccagccccgtgatggtgctggagaacatcgagcccgagatcgtgtacgccggctacgacagcagcaagcccgacaccgccgagaacctgctgagcaccctgaacagactggccggcaagcagatgatccaggtggtgaagtgggccaaggtgctgcccggcttcaagaacctgcccctggaggaccagatcaccctgatccagtacagctggatgtgcctgagcagcttcgccctgagctggagaagctacaagcacaccaacagccagttcctgtacttcgcccccgacctggtgttcaacgaggagaagatgcaccagagcgccatgtacgagctgtgccagggcatgcaccagatcagcctgcagttcgtgagactgcagctgaccttcgaggagtacaccatcatgaaggtgctgctgctgctgagcaccatccccaaggacggcctgaagagccaggccgccttcgaggagatgagaaccaactacatcaaggagctgagaaagatggtgaccaagtgccccaacaacagcggccagagctggcagagattctaccagctgaccaagctgctggacagcatgcacgacctggtgagcgacctgctggagttctgcttctacaccttcagagagagccacgccctgaaggtggagttccccgccatgctggtggagatcatcagcgaccagctgcccaaggtggagagcggcaacgccaagcccctgtacttccacagaaagtag

SEQ ID NO: 16983 - protein, 274 aa, Artificial Sequence
  derived and/or modified sequence
MVGRRALIVLAHSERTSFNYAMKEAAAAALKKKGWEVVESDLYAMNFNPIISRKDITGKLKDPANFQYPAESVLAYKEGHLSPDIVAEQKKLEAADLVIFQFPLQWFGVPAILKGWFERVFIGEFAYTYAAMYDKGPFRSKKAVLSITTGGSGSMYSLQGIHGDMNVILWPIQSGILHFCGFQVLEPQLTYSIGHTPADARIQILEGWKKRLENIWDETPLYFAPSSLFDLNFQAGFLMKKEVQDEEKNKKFGLSVGHHLGKSIPTDNQIKARK

SEQ ID NO: 16984 - DNA, 825 bp, Artificial Sequence
  derived and/or modified sequence
atggtcggcagaagagccttgatcgtgctcgcccacagcgagagaacgagttttaactacgcaatgaaggaagctgcggctgctgctctgaaaaagaagggctgggaggtcgtagaatcagatctctatgccatgaatttcaaccccattatatccagaaaagacatcaccggaaagctgaaggatcccgccaacttccaatatccagctgaaagcgtgctagcttataaggagggccacctctcacctgatatagtggctgagcagaaaaagctggaggccgctgacctggtgattttccagttcccccttcagtggttcggcgtccctgctatcctgaagggctggtttgaaagggtgttcatcggagagtttgcttatacctatgcggcaatgtacgataagggccccttcagaagtaagaaagccgttctgtctatcaccactggcggaagcggctctatgtacagcctacaggggatccatggcgacatgaacgtcattctttggcccatccagagtggtatcctgcacttctgtggatttcaggtgttggagccacagttgacctatagtattggccacacccccgctgacgcacggattcagattttagaggggtggaaaaaaaggctcgaaaatatctgggatgagacccctctttattttgcacccagcagcctgttcgatctgaatttccaggccggcttcttaatgaaaaaagaagtccaggacgaagagaagaataagaaattcggtctgagtgtcggtcaccacctgggaaagagcattcccacagacaaccaaatcaaggctcggaaatag

SEQ ID NO: 16985 - DNA, 825 bp, Artificial Sequence
  derived and/or modified sequence
atggtgggccggcgggccctgattgtgctggcccacagcgagaggaccagcttcaactatgccatgaaggaggccgctgctgctgccctgaagaagaagggctgggaggtggtggagagtgacctgtatgccatgaacttcaaccccatcatcagcaggaaggacatcaccgggaagctgaaggaccctgccaacttccagtacccagctgagagcgtgctggcctacaaggagggccacctgagcccagacatcgtggccgagcagaagaagctggaggccgctgacctggtgatcttccagttccccctgcagtggtttggagtgcctgccatcctgaagggctggtttgagagggtcttcatcggggagtttgcctacacctacgccgccatgtatgacaagggccccttccgcagcaagaaggctgtgctgagcatcaccactggaggcagcggctccatgtacagcctgcagggcatccacggggacatgaatgtcatcctgtggcccatccagagcggcatcctgcacttctgtggcttccaggtgctggagccccagctgacctacagcatcggccacaccccagcagatgcccgcatccagatcctggagggctggaagaagaggctggagaacatctgggatgagacccccctgtactttgcccccagcagcctgtttgacctgaacttccaggccggcttcctgatgaagaaggaggtgcaggatgaggagaagaacaagaagtttggcctgtctgtgggccaccacctgggcaagagcatccccacagacaaccagatcaaggccaggaagtag

SEQ ID NO: 16986 - DNA, 2765 bp, Artificial Sequence
  derived and/or modified sequence
cacacacccctacaatcccctcccccagccccgagagacttttcttgacttccaccagttgctccggcgggtgagagtggagaggcccctccttcatcccccaggctccctcccttcctggagctgcagcctcagcatcctccgcccagcaccccaggattcaggcgttgggtcccgcccttgtaggctgtccacctcaaacgggccggacaggatatataagagagaatgcaccgtgcactacacacgcgactcccacaaggttgcagccggagccgcccagctcaccgagagcctagttccggccagggtcgccccggcaaccacgagcccagccaatcagcgccccggactgcaccagagccatggtcggcagaagagcactgatcgtactggctcactcagagaggacgtccttcaactatgccatgaaggaggctgctgcagcggctttgaagaagaaaggatgggaggtggtggagtcggacctctatgccatgaacttcaatcccatcatttccagaaaggacatcacaggtaaactgaaggaccctgcgaactttcagtatcctgccgagtctgttctggcttataaagaaggccatctgagcccagatattgtggctgaacaaaagaagctggaagccgcagaccttgtgatattccagttccccctgcagtggtttggagtccctgccattctgaaaggctggtttgagcgagtgttcataggagagtttgcttacacttacgctgccatgtatgacaaaggacccttccggagtaagaaggcagtgctttccatcaccactggtggcagtggctccatgtactctctgcaagggatccacggggacatgaatgtcattctctggccaattcagagtggcattctgcatttctgtggcttccaagtcttagaacctcaactgacatatagcattgggcacactccagcagacgcccgaattcaaatcctggaaggatggaagaaacgcctggagaatatttgggatgagacaccactgtattttgctccaagcagcctctttgacctaaacttccaggcaggattcttaatgaaaaaagaggtacaggatgaggagaaaaacaagaaatttggcctttctgtgggccatcacttgggcaagtccatcccaactgacaaccagatcaaagctagaaaatgagattccttagcctggatttccttctaacatgttatcaaatctgggtatctttccaggcttccctgacttgctttagtttttaagatttgtgtttttctttttccacaaggaataaatgagagggaatcgactgtattcgtgcatttttggatcatttttaactgattcttatgattactatcatggcatataaccaaaatccgactgggctcaagaggccacttagggaaagatgtagaaagatgctagaaaaatgttctttaaaggcatctacacaatttaattcctctttttagggctaaagttttagggtacagtttggctaggtatcattcaactctccaatgttctattaatcacctctctgtagtttatggcagaagggaattgctcagagaaggaaaagactgaatctacctgccctaagggacttaacttgtttggtagttagccatctaatgcttgtttatgatatttcttgctttcaattacaaagcagttactaatatgcctagcacaagtaccactcttggtcagcttttgttgtttatatacagtacacagataccttgaaaggaagagctaataaatctcttctttgctgcagtcatctactttttttttaattaaaaaaaatttttttttgaagcagtcttgctctgttacccaggctggagtgcagtggtgtgatctcggctcactgcaacctctgcctcccaggttccagcaattctcctgcctcagcctccctagtagctgggatgacaggcgcctgccatcatgcctgactaatttttgtatttttagtagagacggcgtttcaccatgttggccaggctggtctcaaactcctgacctcaggtgatccgcctacctcagcctcccaaagtgctgggattacaggcgtgatccaccacacctggcccttgcaatcttctactttaaggtttgcagagataaaccaataaatccacaccgtacatctgcaatatgaattcaagaaaggaaatagtaccttcaatacttaaaaatagtcttccacaaaaaatactttatttctgatctatacaaattttcagaaggttattttctttatcattgctaaactgatgacttactatgggatggggtccagtcccatgaccttggggtacaattgtaaacctagagttttatcaactttggtgaacagttttggcataatagtcaatttctacttctggaagtcatctcattccactgttggtattatataattcaaggagaatatgataaaacactgccctcttgtggtgcattgaaagaagagatgagaaatgatgaaaaggttgcctgaaaaatgggagacagcctcttacttgccaagaaaatgaagggattggaccgagctggaaaacctcctttaccagatgctgactggcactggtggtttttgctctcgacagtatccacaatagctgacggctgggtgtttcagtttgaaaatattttgttgccttcatcttcactgcaattttgtgtaaatttctcaaagatctgaattaaataaataaaattcatttctacagacccaca

SEQ ID NO: 16987 - DNA, 825 bp, Artificial Sequence
  derived and/or modified sequence
atggtgggccggcgggccctgatcgtgctggcccacagcgagcggactagtttcaactatgctatgaaagaagctgccgcagccgccttgaagaagaaagggtgggaagtggtcgaatcagatttgtacgcaatgaacttcaatcctatcatttcaagaaaagacattacgggaaaactcaaagatcccgccaatttccagtacccagccgagtccgtccttgcctacaaagagggacatctgtctcccgatattgtggcggaacagaaaaaacttgaggcggcagatctggtcatcttccagttccctctgcagtggttcggtgtacctgctattcttaaaggctggttcgagagggtttttattggagagttcgcctacacttacgctgctatgtacgataaaggaccattcagatcgaaaaaggccgtcctctcgatcacaacgggagggagcggctccatgtatagtctgcagggcattcatggcgatatgaacgtcatactttggcccatacagtccggcatcttacacttttgtgggttccaggtgctggagccccaactcacctattccatcggacacaccccagcagacgccagaatacagattctcgagggatggaaaaagcgtcttgagaatatctgggacgaaactccattgtatttcgccccaagttccctcttcgacctaaactttcaagcaggcttcctgatgaaaaaagaagtgcaggacgaggagaagaataaaaagtttggcctgtccgtgggacatcacctgggcaagtcaatccccacggataaccaaatcaaagccagaaagtag

SEQ ID NO: 16988 - DNA, 825 bp, Artificial Sequence
  derived and/or modified sequence
atggtgggtcggagggccctcatcgtgctggcccacagcgaacggacaagtttcaattatgctatgaaggaggctgcagcggcagccctgaagaagaaaggctgggaagttgtagagagtgatctgtacgccatgaattttaatcctatcattagcaggaaagatataacaggcaaactaaaagatcccgctaactttcaatatccagccgaatcagtgcttgcctacaaagagggccatctaagccccgacattgtcgctgagcaaaaaaagcttgaagccgcagacctggtgatcttccagtttcctctgcaatggttcggcgtgccagccattttgaaaggatggttcgagagggtgttcattggcgagttcgcttacacttacgctgcgatgtatgacaagggcccatttagatcaaaaaaagccgtgctgtcaataacgaccgggggaagcgggtctatgtactctctccaaggcatacacggagacatgaacgtcatcctctggcccattcaaagcgggattctgcatttctgtggcttccaggtcctggagcctcagctgacctattcaattggccacacgcccgctgacgccaggatccagatcttggaaggttggaaaaaacggctggaaaacatttgggacgagactccactctattttgctccttcatccctttttgacctcaattttcaggccggatttcttatgaagaaggaagttcaggatgaggagaagaacaagaagttcgggttgagtgtcggccaccacctgggcaaaagtatccctacagataaccaaattaaagcaaggaaatag

SEQ ID NO: 16989 - DNA, 825 bp, Artificial Sequence
  derived and/or modified sequence
atggtgggcagaagagccctgatcgtgctggcccacagcgagagaaccagcttcaactacgccatgaaggaggccgccgccgccgccctgaagaagaagggctgggaggtggtggagagcgacctgtacgccatgaacttcaaccccatcatcagcagaaaggacatcaccggcaagctgaaggaccccgccaacttccagtaccccgccgagagcgtgctggcctacaaggagggccacctgagccccgacatcgtggccgagcagaagaagctggaggccgccgacctggtgatcttccagttccccctgcagtggttcggcgtgcccgccatcctgaagggctggttcgagagagtgttcatcggcgagttcgcctacacctacgccgccatgtacgacaagggccccttcagaagcaagaaggccgtgctgagcatcaccaccggcggcagcggcagcatgtacagcctgcagggcatccacggcgacatgaacgtgatcctgtggcccatccagagcggcatcctgcacttctgcggcttccaggtgctggagccccagctgacctacagcatcggccacacccccgccgacgccagaatccagatcctggagggctggaagaagagactggagaacatctgggacgagacccccctgtacttcgcccccagcagcctgttcgacctgaacttccaggccggcttcctgatgaagaaggaggtgcaggacgaggagaagaacaagaagttcggcctgagcgtgggccaccacctgggcaagagcatccccaccgacaaccagatcaaggccagaaagtag

SEQ ID NO: 16990 - protein, 97 aa, Artificial Sequence
  derived and/or modified sequence
MLGNKRLGLSGLTLALSLLVCLGALAEAYPSKPDNPGEDAPAEDMARYYSALRHYINLITRQRYGKRSSPETLISDLLMRESTENVPRTRLEDPAMW

SEQ ID NO: 16991 - DNA, 294 bp, Artificial Sequence
  derived and/or modified sequence
atgctgggtaacaaaaggcttgggctgtccggattaacactggccctttctctgctggtgtgtcttggggctctcgcagaagcctatccatccaagccagacaatcccggcgaggacgctccagcagaagacatggcccgctattattctgcgcttcgtcattacattaacctgatcacacgacagcggtacggcaaaaggtccagtcccgagactctcatctccgatctgttaatgcgggagagtactgaaaatgtacctcgaacacgccttgaggatccggccatgtggtag

SEQ ID NO: 16992 - DNA, 294 bp, Artificial Sequence
  derived and/or modified sequence
atgctgggaaacaagaggctggggctctcaggactcacgctagccctgagtctgctcgtgtgtctgggcgctttggccgaggcctatccctctaagcccgacaacccaggtgaggacgcccccgccgaagacatggcacggtactatagtgcgttgaggcactatatcaacctgatcacccgccaaaggtatgggaaacgctcctccccagaaaccctcatctccgatctgctgatgagagagagcacagaaaacgtgcctcgcactagattagaagaccccgccatgtggtag

SEQ ID NO: 16993 - DNA, 294 bp, Artificial Sequence
  derived and/or modified sequence
atgctgggcaataaacgcctgggactgtccggattgaccctcgccctctctttattggtctgtctgggggccttggctgaggcgtaccccagtaagccagataatcccggggaggatgcccctgccgaagacatggccagatactactccgccttgaggcactatattaacctaattacgaggcagaggtatggaaagcgttcatcccccgaaacactgatttcagacctgctgatgagggaatccaccgagaatgttcccagaaccagacttgaggacccagcaatgtggtag

SEQ ID NO: 16994 - DNA, 294 bp, Artificial Sequence
  derived and/or modified sequence
atgctgggcaacaagaggctgggcctgagcggcctgaccctggccctgagcctgctggtgtgcctgggcgccctggccgaggcctaccccagcaagccagacaaccctggagaagatgccccagctgaggacatggcccgctactacagcgccctgcggcactacatcaacctgatcacccggcagagatatggcaagaggagcagccctgagaccctcatcagtgacctgctgatgagggagagcacagaaaatgtgcccaggacccggctggaggaccctgccatgtggtag

SEQ ID NO: 16995 - DNA, 294 bp, Artificial Sequence
  derived and/or modified sequence
atgctgggcaacaagcggctgggcctgagcggcctgaccctggcccttagtttactggtgtgcttaggagcactggctgaagcctacccgtccaagccagataatcctggcgaggacgctccagcagaggacatggcccgctactatagtgccctgcgccactatatcaacctgatcacgcggcagcgatacggtaaacggtcatcgccagagactctcatctcagacctcctgatgagagagtccacggaaaatgtccccagaacccggctggaagaccccgccatgtggtag

SEQ ID NO: 16996 - DNA, 294 bp, Artificial Sequence
  derived and/or modified sequence
atgctgggcaacaagcggctgggcctgagcggcctgaccctggccctcagcctgctcgtctgtctgggtgctctggccgaagcctacccaagcaaacctgacaaccctggggaagatgccccggctgaagatatggccaggtattactcagccctccggcattacatcaacctgataaccaggcaaagatatgggaaacgctcctctccagagaccttaatatcagacctcctgatgagggagtcaaccgagaatgtaccaaggaccagactggaggaccccgctatgtggtag

SEQ ID NO: 16997 - DNA, 294 bp, Artificial Sequence
  derived and/or modified sequence
atgctgggcaacaagcggctgggcctgagcggcctgaccctggccttatcactactggtgtgcctcggggctctagccgaggcttatccttcaaagcctgacaaccccggggaggatgctccagccgaggatatggctcggtactattctgcactgaggcactatatcaatctgatcacccggcagcgctatggaaaaagaagtagtccggaaactctgattagtgatctactgatgagggagagcactgaaaatgttccccgaacgagactcgaagacccagctatgtggtag

SEQ ID NO: 16998 - DNA, 585 bp, Artificial Sequence
  derived and/or modified sequence
aaagccctgtcgcgacccgctctctgcaccccatccgctggctctcacccctcggagacgctcgcccgacagcatagtacttgccgcccagccacgcccgcgcgccagccaccatgctaggtaacaagcgactggggctgtccggactgaccctcgccctgtccctgctcgtgtgcctgggtgcgctggccgaggcgtacccctccaagccggacaacccgggcgaggacgcaccagcggaggacatggccagatactactcggcgctgcgacactacatcaacctcatcaccaggcagagatatggaaaacgatccagcccagagacactgatttcagacctcttgatgagagaaagcacagaaaatgttcccagaactcggcttgaagaccctgcaatgtggtgatgggaaatgagacttgctctctggccttttcctattttcagcccatatttcatcgtgtaaaacgagaatccacccatcctaccaatgcatgcagccactgtgctgaattctgcaatgttttcctttgtcatcattgtatatatgtgtgtttaaataaagtatcatgcattcaaaagtg

SEQ ID NO: 16999 - DNA, 565 bp, Artificial Sequence
  derived and/or modified sequence
cgggactgggacgagagcggattgggggtcgcgtgtggtagcaggaggaggagcgcggggggcagaggagggaggtgctgcgcgtgggtgctctgaatccccaagcccgtccgttgagccttctgtgcctgcagatgctaggtaacaagcgactggggctgtccggactgaccctcgccctgtccctgctcgtgtgcctgggtgcgctggccgaggcgtacccctccaagccggacaacccgggcgaggacgcaccagcggaggacatggccagatactactcggcgctgcgacactacatcaacctcatcaccaggcagagatatggaaaacgatccagcccagagacactgatttcagacctcttgatgagagaaagcacagaaaatgttcccagaactcggcttgaagaccctgcaatgtggtgatgggaaatgagacttgctctctggccttttcctattttcagcccatatttcatcgtgtaaaacgagaatccacccatcctaccaatgcatgcagccactgtgctgaattctgcaatgttttcctttgtcatcattgt

SEQ ID NO: 17000 - DNA, 705 bp, Artificial Sequence
  derived and/or modified sequence
gcaccccatccgctggctctcacccctcggagacgctcgcccgacagcatagtacttgccgcccagccacgcccgcgcgccagccaccacaagagtttgggcaagaagggagaaaagtgacccagcaggaagaacttccaattcggttttgaatgctaaactggcggggcccccaccttgcactctcgccgcgcgcttcttggtccctgagacttcgaacgaagttgcgcgaagttttcaggtggagcagaggggcaggtcccgaccggacggcgcccggagcccgcaagatgctaggtaacaagcgactggggctgtccggactgaccctcgccctgtccctgctcgtgtgcctgggtgcgctggccgaggcgtacccctccaagccggacaacccgggcgaggacgcaccagcggaggacatggccagatactactcggcgctgcgacactacatcaacctcatcaccaggcagagatatggaaaacgatccagcccagagacactgatttcagacctcttgatgagagaaagcacagaaaatgttcccagaactcggcttgaagaccctgcaatgtggtgatgggaaatgagacttgctctctggccttttcctattttcagcccatatttcatcgtgtaaaacgagaatccacccatcctaccaatgcatgcagccactgtgctgaattctgcaatgtttt

SEQ ID NO: 17001 - DNA, 294 bp, Artificial Sequence
  derived and/or modified sequence
atgttggggaacaagcggttgggactgagtggacttactctggccttaagccttttagtgtgccttggcgctttggctgaggcatacccgtcaaagcccgataacccgggagaagatgccccagcagaggacatggccaggtattacagcgcacttcgacactacatcaatctgatcaccagacagcggtacggcaagcgatccagtccagagaccctgatctcagaccttttgatgagagaaagcaccgaaaacgttccccgtactcggctggaggaccccgcaatgtggtag

SEQ ID NO: 17002 - DNA, 294 bp, Artificial Sequence
  derived and/or modified sequence
atgctcgggaataagcgcctagggctgagcggcctgactttggcccttagtctcctggtgtgcctgggcgcactcgcggaagcttacccctcaaaacctgataatcccggtgaggacgctcccgctgaagacatggcacggtactatagcgcactccgccactacatcaatctgattactaggcagagatatggaaagaggagcagcccagaaacgttgattagtgacctgctgatgagggagtcaacagagaatgtgcctaggacaagactagaggatcctgcaatgtggtag

SEQ ID NO: 17003 - DNA, 294 bp, Artificial Sequence
  derived and/or modified sequence
atgctaggtaataagcgtctgggcctctcaggcctcactctcgccctgtctctgctcgtctgtctgggcgcactggccgaagcctaccccagtaagcccgataatccaggagaggacgccccagcggaggacatggctaggtattatagcgcgctgaggcattacatcaacctgataaccaggcagagatatggtaaacgaagctcccctgagacgcttattagcgaccttctcatgcgggagtccaccgaaaacgtcccgaggacacggctggaggatccagctatgtggtag

SEQ ID NO: 17004 - DNA, 294 bp, Artificial Sequence
  derived and/or modified sequence
atgctgggcaacaagagactgggcctgagcggcctgaccctggccctgagcctgctggtgtgcctgggcgccctggccgaggcctaccccagcaagcccgacaaccccggcgaggacgcccccgccgaggacatggccagatactacagcgccctgagacactacatcaacctgatcaccagacagagatacggcaagagaagcagccccgagaccctgatcagcgacctgctgatgagagagagcaccgagaacgtgcccagaaccagactggaggaccccgccatgtggtag

SEQ ID NO: 17005 - protein, 1061 aa, Artificial Sequence
  derived and/or modified sequence
MPGPRRPAGSRLRLLLLLLLPPLLLLLRGSHAGNLTVAVVLPLANTSYPWSWARVGPAVELALAQVKARPDLLPGWTVRTVLGSSENALGVCSDTAAPLAAVDLKWEHNPAVFLGPGCVYAAAPVGRFTAHWRVPLLTAGAPALGFGVKDEYALTTRAGPSYAKLGDFVAALHRRLGWERQALMLYAYRPGDEEHCFFLVEGLFMRVRDRLNITVDHLEFAEDDLSHYTRLLRTMPRKGRVIYICSSPDAFRTLMLLALEAGLCGEDYVFFHLDIFGQSLQGGQGPAPRRPWERGDGQDVSARQAFQAAKIITYKDPDNPEYLEFLKQLKHLAYEQFNFTMEDGLVNTIPASFHDGLLLYIQAVTETLAHGGTVTDGENITQRMWNRSFQGVTGYLKIDSSGDRETDFSLWDMDPENGAFRVVLNYNGTSQELVAVSGRKLNWPLGYPPPDIPKCGFDNEDPACNQDHLSTLEVLALVGSLSLLGILIVSFFIYRKMQLEKELASELWRVRWEDVEPSSLERHLRSAGSRLTLSGRGSNYGSLLTTEGQFQVFAKTAYYKGNLVAVKRVNRKRIELTRKVLFELKHMRDVQNEHLTRFVGACTDPPNICILTEYCPRGSLQDILENESITLDWMFRYSLTNDIVKGMLFLHNGAICSHGNLKSSNCVVDGRFVLKITDYGLESFRDLDPEQGHTVYAKKLWTAPELLRMASPPVRGSQAGDVYSFGIILQEIALRSGVFHVEGLDLSPKEIIERVTRGEQPPFRPSLALQSHLEELGLLMQRCWAEDPQERPPFQQIRLTLRKFNRENSSNILDNLLSRMEQYANNLEELVEERTQAYLEEKRKAEALLYQILPHSVAEQLKRGETVQAEAFDSVTIYFSDIVGFTALSAESTPMQVVTLLNDLYTCFDAVIDNFDVYKVETIGDAYMVVSGLPVRNGRLHACEVARMALALLDAVRSFRIRHRPQEQLRLRIGIHTGPVCAGVVGLKMPRYCLFGDTVNTASRMESNGEALKIHLSSETKAVLEEFGGFELELRGDVEMKGKGKVRTYWLLGERGSSTRG

SEQ ID NO: 17006 - DNA, 3186 bp, Artificial Sequence
  derived and/or modified sequence
atgcccggcccacggcgacccgccggttcccgattgcgcctacttctcctgctgctcctaccccctttgttgttgttgctgaggggatcccatgccggaaatttgactgtcgcagtggtgcttccactggcgaataccagttacccctggagctgggcacgcgtgggacccgctgtggagcttgccctggcccaggtgaaagctcgcccggacctcctgcccggctggacggtacgcaccgtgctgggaagtagcgagaacgcgctgggagtctgttccgatactgcagcgcctcttgctgccgtggatcttaagtgggaacataatccagccgtctttctaggccctggctgcgtgtatgccgccgcacccgtgggacggtttaccgcccactggagagtgccactactcactgcaggggccccagcactagggttcggagtcaaggacgaatatgctctgacaacaagggcgggaccaagctatgccaaattaggcgactttgttgcggcactccaccggcggctgggatgggagaggcaggctctgatgctctatgcatatagaccaggtgatgaggagcattgcttctttcttgtggagggcttgttcatgcgtgtgcgggaccggctgaacattacagtggatcacttagagttcgctgaggatgatctgtcacattacactaggcttctgagaaccatgccaagaaaagggcgggtgatctacatctgtagttcaccagacgctttcagaacgctcatgcttttagccctggaggccggtctctgcggggaggactacgtatttttccacctggacatatttggccagtcactccagggcgggcagggtcctgcccctaggagaccgtgggagcggggcgatggacaggatgtgtcggcacgccaagctttccaagccgctaaaataatcacctacaaagaccctgataatcccgaatatttggagtttctgaaacagctcaagcatctcgcctacgaacagtttaatttcacaatggaagacgggcttgtgaacaccataccagcgtcttttcacgatggccttctcctttatatccaggccgtcacagagaccttagctcatgggggcaccgtcacggacggtgagaatatcacgcaaaggatgtggaatcggtccttccagggagtgacgggttacctgaagattgactcttcaggagacagggagacagatttctctttgtgggacatggacccagaaaatggcgcattcagggtggtactcaattacaacgggaccagccaggaactagtggccgtttctggccgaaagctcaattggcctctggggtacccgcctccagacataccaaagtgcgggtttgataatgaagatccagcttgtaaccaggaccatctgagcactctggaagtgctggcattggtaggatcactcagcctgctgggtattctcatcgtgtctttcttcatttaccgcaaaatgcagctggagaaagagctcgccagcgaactgtggcgagtgcgctgggaagacgttgagcctagttctttggagaggcatttgcgatcagctggaagccgcctgacattgtctggcaggggatctaactatggttctctcttgaccaccgagggccagttccaagtcttcgctaagacggcctactataaggggaacctggtcgcggtcaaacgtgtaaatcggaaaagaattgaactgactcgaaaagtgctatttgagctcaaacatatgagagatgtgcagaatgaacatttgacaagatttgtgggtgcatgcacagaccctcctaacatctgcatcctgacagagtactgcccccgaggttcccttcaagatattctggagaacgaaagtatcacgttggactggatgtttcggtacagcctgactaacgacatcgtgaagggtatgttatttctccacaacggcgccatctgtagccacggaaacttaaagtcctctaactgtgtcgtggatggtagatttgtgctgaagatcaccgactacggactcgagagttttagagatctcgatcctgagcaggggcataccgtttacgccaagaaactgtggaccgccccggagctactgcgaatggcctccccccctgtccgcggtagccaggcaggagatgtttactcgttcggcataatccttcaagagattgccctacggagtggagtgttccatgtggaaggactggacttgtcgcccaaggagattatcgagcgtgtgacaagaggcgagcagccaccatttcgcccctctcttgccctccagagccacttagaagagctgggcttgctcatgcaacgctgttgggcagaggatcctcaggagagaccccctttccagcagatccgactcactctaaggaagtttaacagggagaattctagtaacatcctggacaatctgctgagcaggatggagcagtacgctaataacctggaagagctcgtcgaggagcgcactcaagcctacctagaggaaaaacgcaaagccgaagccctgctttaccagatcctgcctcacagtgtcgctgagcagctgaagcggggtgagacggttcaggcagaagccttcgactcagtgaccatctacttcagtgatatcgtgggatttacggccctgagtgcagagtccacgcctatgcaagttgtcacgctattgaacgacctgtacacatgctttgacgcagtgatcgacaacttcgatgtgtataaggtagaaaccattggggacgcgtatatggttgtgagtgggctccccgtcaggaacgggcggctgcacgcttgcgaggtggctcggatggcactggcgctgctcgatgccgtgcgctcattccggatcaggcaccgcccccaagagcagctgaggctaagaatcggcattcacactggtcccgtgtgcgccggagttgtgggattgaagatgcctcgctactgtttatttggcgacacagtcaacactgcctctagaatggaatccaacggcgaggctttgaagattcatctgtctagcgagacaaaggcagtgctggaggaatttggcggctttgaactcgaacttagaggcgacgtggagatgaaaggtaagggtaaagtgcgcacctactggctcttaggcgaacgcggctcaagcactcgggggtag

SEQ ID NO: 17007 - DNA, 3186 bp, Artificial Sequence
  derived and/or modified sequence
atgcctggccccaggaggcctgctggcagccggctgcggctgctgctgctgctgctgctgccccccctgctgctgctgctgcggggcagccacgccggcaacctgactgtggccgtggtgctgcccctggccaacaccagctacccctggagctgggcccgggtgggccctgctgtggagctggccctggcccaggtgaaggcccggccagacctgctgcccggctggacagtgaggacagtgctgggcagcagtgaaaatgccctgggcgtgtgcagcgacacagctgcccccctggccgctgtggacctgaagtgggagcacaacccagctgtgttcctgggccctggctgtgtgtatgctgctgcccctgtgggccgcttcaccgcccactggagggtgcccctgctgacagctggggccccagccctgggcttcggcgtgaaggatgaatatgccctgaccacccgggccggccccagctatgccaagctgggggactttgtggccgccctgcaccggcggctgggctgggagcggcaggccctgatgctgtatgcctacagacctggagatgaggagcactgcttcttcctggtggagggcctcttcatgagggtgcgggaccggctgaacatcaccgtggaccacctggagtttgctgaagatgacctgagccactacacccggctgctgcggaccatgcccaggaagggccgggtcatctacatctgcagcagcccagatgccttccgcaccctgatgctgctggccctggaggccggcctgtgtggggaggactatgtgttcttccacctggacatcttcggccagagcctgcagggcggccagggccctgccccccggcggccctgggagagaggagatggccaggatgtgtctgcccggcaggccttccaggccgccaagatcatcacctacaaggaccctgacaaccctgagtacctggagttcctgaagcagctgaagcacctggcctatgagcagttcaacttcaccatggaggatggcctggtgaacaccatcccagccagcttccatgatggcctgctgctgtacatccaggccgtgacagagaccctggcccacggcggcaccgtgacagatggagagaacatcacccagaggatgtggaacagaagcttccagggcgtgacaggctacctgaagattgacagcagcggggaccgggagacagacttcagcctgtgggacatggaccctgaaaatggagccttccgggtggtgctgaactacaacggcaccagccaggagctggtggccgtgtctggcaggaagctgaactggcccctgggctacccacctccagacatccccaagtgtggctttgacaatgaagatcctgcctgcaaccaggaccacctgagcaccctggaggtgctggccctggtgggcagcctgagcctgctgggcatcctgattgtgtccttcttcatctacaggaagatgcagctggagaaggagctggccagcgagctgtggagggtgcgctgggaggatgtggagcccagcagcctggagcggcacctgcggtctgctggcagccggctgaccctgagcggccggggcagcaactacggcagcctgctgaccacagagggccagttccaggtgtttgccaagacagcctactacaagggcaacctggtggccgtgaagagggtgaacaggaagagaattgagctgaccaggaaggtgctgtttgagctgaagcacatgagagatgtgcagaatgagcacctgaccaggtttgtgggcgcctgcacagatcctcccaacatctgcatcctgacagagtactgcccccggggcagcctgcaggacatcctggagaatgaaagcatcaccctggactggatgttccgctacagcctgaccaatgacatcgtgaagggcatgctgttcctgcacaacggggccatctgcagccacggcaacctgaagagcagcaactgtgtggtggatggccgctttgtgctgaagatcacagattatggcctggagagcttccgggacctggaccctgagcagggccacacagtgtatgccaagaagctgtggacagcccctgagctgctgaggatggccagcccccctgtgcggggcagccaggccggagatgtgtacagctttggcatcatcctgcaggagatcgccctgcggtctggagtcttccacgtggagggcctggacctgagccccaaggagatcatcgagcgggtgaccagaggagagcagccccccttccggcccagcctggccctgcagagccacctggaggagctgggcctgctgatgcagcgctgctgggccgaggacccccaggagcggccccccttccagcagatccggctgaccctgaggaagttcaaccgggagaacagcagcaacatcctggacaacctgctgagcaggatggagcagtatgccaacaacctggaggagctggtggaggagaggacccaggcctacctggaggagaagaggaaggccgaggccctgctgtaccagatcctgccccacagcgtggccgagcagctgaagagaggagagaccgtgcaggccgaggcctttgacagcgtgaccatctacttcagtgacatcgtgggcttcaccgccctgtctgctgagagcacccccatgcaggtggtgaccctgctgaatgacctgtacacctgctttgatgctgtgattgacaactttgatgtgtacaaggtggagaccatcggagatgcctacatggtggtgtctggcctgcctgtgagaaatggccgcctgcacgcctgtgaggtggccaggatggccctggccctgctggatgctgtgcgctccttccgcatccgccaccggccccaggagcagctgcggctgagaattggcatccacactggacctgtgtgtgccggcgtggtgggcctgaagatgccccgctactgcctgtttggagacacagtgaacacagccagcaggatggagagcaatggagaggccctgaagatccacctgagcagcgagaccaaggctgtgctggaggagtttggaggctttgagctggagctgcggggagatgtggagatgaagggcaagggcaaggtgaggacctactggctgctgggggagcggggcagcagcacccggggctag

SEQ ID NO: 17008 - DNA, 4236 bp, Artificial Sequence
  derived and/or modified sequence
ggttccctccggatagccggagacttgggccggccggacgccccttctggcacactccctggggcaggcgctcacgcacgctacaaacacacactcctctttcctccctcgcgcgccctctctcatccttcttcacgaagcgctcactcgcaccctttctctctctctctctctctctctaacacgcacgcacactcccagttgttcacactcgggtcctctccagcccgacgttctcctggcacccacctgctccgcggcgccctgcgcgcccccctcggtcgcgccccttgcgctctcggcccagaccgtcgcagctacagggggcctcgagccccggggtgagcgtccccgtcccgctcctgctccttcccatagggacgcgcctgatgcctgggaccggccgctgagcccaaggggaccgaggaggccatggtaggagcgctcgcctgctgcggtgcccgctgaggccatgccggggccccggcgccccgctggctcccgcctgcgcctgctcctgctcctgctgctgccgccgctgctgctgctgctccggggcagccacgcgggcaacctgacggtagccgtggtactgccgctggccaatacctcgtacccctggtcgtgggcgcgcgtgggacccgccgtggagctggccctggcccaggtgaaggcgcgccccgacttgctgccgggctggacggtccgcacggtgctgggcagcagcgaaaacgcgctgggcgtctgctccgacaccgcagcgcccctggccgcggtggacctcaagtgggagcacaaccccgctgtgttcctgggccccggctgcgtgtacgccgccgccccagtggggcgcttcaccgcgcactggcgggtcccgctgctgaccgccggcgccccggcgctgggcttcggtgtcaaggacgagtatgcgctgaccacccgcgcggggcccagctacgccaagctgggggacttcgtggcggcgctgcaccgacggctgggctgggagcgccaagcgctcatgctctacgcctaccggccgggtgacgaagagcactgcttcttcctcgtggaggggctgttcatgcgggtccgcgaccgcctcaatattacggtggaccacctggagttcgccgaggacgacctcagccactacaccaggctgctgcggaccatgccgcgcaaaggccgagttatctacatctgcagctcccctgatgccttcagaaccctcatgctcctggccctggaagctggcttgtgtggggaggactacgttttcttccacctggatatctttgggcaaagcctgcaaggtggacagggccctgctccccgcaggccctgggagagaggggatgggcaggatgtcagtgcccgccaggcctttcaggctgccaaaatcattacatataaagacccagataatcccgagtacttggaattcctgaagcagttaaaacacctggcctatgagcagttcaacttcaccatggaggatggcctggtgaacaccatcccagcatccttccacgacgggctcctgctctatatccaggcagtgacggagactctggcacatgggggaactgttactgatggggagaacatcactcagcggatgtggaaccgaagctttcaaggtgtgacaggatacctgaaaattgatagcagtggcgatcgggaaacagacttctccctctgggatatggatcccgagaatggtgccttcagggttgtactgaactacaatgggacttcccaagagctggtggctgtgtcggggcgcaaactgaactggcccctggggtaccctcctcctgacatccccaaatgtggctttgacaacgaagacccagcatgcaaccaagatcacctttccaccctggaggtgctggctttggtgggcagcctctccttgctcggcattctgattgtctccttcttcatatacaggaagatgcagctggagaaggaactggcctcggagctgtggcgggtgcgctgggaggacgttgagcccagtagccttgagaggcacctgcggagtgcaggcagccggctgaccctgagcgggagaggctccaattacggctccctgctaaccacagagggccagttccaagtctttgccaagacagcatattataagggcaacctcgtggctgtgaaacgtgtgaaccgtaaacgcattgagctgacacgaaaagtcctgtttgaactgaagcatatgcgggatgtgcagaatgaacacctgaccaggtttgtgggagcctgcaccgacccccccaatatctgcatcctcacagagtactgtccccgtgggagcctgcaggacattctggagaatgagagcatcaccctggactggatgttccggtactcactcaccaatgacatcgtcaagggcatgctgtttctacacaatggggctatctgttcccatgggaacctcaagtcatccaactgcgtggtagatgggcgctttgtgctcaagatcaccgactatgggctggagagcttcagggacctggacccagagcaaggacacaccgtttatgccaaaaagctgtggacggcccctgagctcctgcgaatggcttcaccccctgtgcggggctcccaggctggtgacgtatacagctttgggatcatccttcaggagattgccctgaggagtggggtcttccacgtggaaggtttggacctgagccccaaagagatcatcgagcgggtgactcggggtgagcagccccccttccggccctccctggccctgcagagtcacctggaggagttggggctgctcatgcagcggtgctgggctgaggacccacaggagaggccaccattccagcagatccgcctgacgttgcgcaaatttaacagggagaacagcagcaacatcctggacaacctgctgtcccgcatggagcagtacgcgaacaatctggaggaactggtggaggagcggacccaggcatacctggaggagaagcgcaaggctgaggccctgctctaccagatcctgcctcactcagtggctgagcagctgaagcgtggggagacggtgcaggccgaagcctttgacagtgttaccatctacttcagtgacattgtgggtttcacagcgctgtcggcggagagcacacccatgcaggtggtgaccctgctcaatgacctgtacacttgctttgatgctgtcatagacaactttgatgtgtacaaggtggagacaattggcgatgcctacatggtggtgtcagggctccctgtgcggaacgggcggctacacgcctgcgaggtagcccgcatggccctggcactgctggatgctgtgcgctccttccgaatccgccaccggccccaggagcagctgcgcttgcgcattggcatccacacaggacctgtgtgtgctggagtggtgggactgaagatgccccgttactgtctctttggggatacagtcaacacagcctcaagaatggagtctaatggggaagccctgaagatccacttgtcttctgagaccaaggctgtcctggaggagtttggtggtttcgagctggagcttcgaggggatgtagaaatgaagggcaaaggcaaggttcggacctactggctccttggggagagggggagtagcacccgaggctgacctgcctcctctcctatccctccacacctccctaccctgtgccagaagcaacagaggtgccaggcctcagcctcacccacagcagccccatcgccaaaggatggaagtaatttgaatagctcaggtgtgctgaccccagtgaagacaccagataggacctctgagaggggactggcatggggggatctcagagcttacaggctgagccaagcccacggccatgcacagggacactcacacaggcacacgcacctgctctccacctggactcaggccgggctgggctgtggattcctgatcccctcccctccccatgctctcctccctcagccttgctaccctgtgacttactgggaggagaaagagtcacctgaaggggaacatgaaaagagactaggtgaagagagggcaggggagcccacatctggggctggcccacaatacctgctcccccgaccccctccacccagcagtagacacagtgcacaggggagaagaggggtggcgcagaagggttgggggcctgtatgccttgcttctaccatgagcagagacaattaaaatctttattccagtga

SEQ ID NO: 17009 - DNA, 3186 bp, Artificial Sequence
  derived and/or modified sequence
atgcccggcccccggcggcccgccggcagccggctgcggctgctgctgttactgctacttccccctctattgctccttctgaggggaagtcacgccggtaacctaaccgtggcagtcgtgctgcctttggcaaacacatcatacccatggtcatgggcccgcgtgggacctgccgttgaactggcactcgcgcaagtaaaggcccggccggacctgttaccgggctggacagttagaaccgtactaggctctagcgagaacgccctgggtgtatgttccgacaccgcagcgcccctcgcagctgtcgatttgaaatgggagcataatccggccgtttttctgggacctgggtgcgtgtatgcggctgctccagtcggccggttcactgcacattggcgggtgcctctgctgacggctggagccccagcccttgggtttggtgttaaagatgagtatgctctaacgaccagggccggccctagttacgcaaagttaggtgattttgtggccgcacttcaccggcggttaggttgggagcggcaggcgttgatgctctacgcctatcgccccggtgacgaggaacactgttttttccttgtagaggggctgttcatgagggtccgagatcgactgaatattaccgttgaccatttggagtttgccgaggacgatctcagtcattatacacgcctcctgagaacaatgccgcgcaaaggccgcgtcatctatatttgcagttcgcctgacgccttcagaactcttatgttgctggcactagaggcaggactgtgcggcgaagactacgtcttcttccacctggatatatttggccaatctctccagggaggccagggccccgctccacgacgaccgtgggaacggggcgacggccaggatgtatctgccagacaggcgttccaagctgcaaagattattacgtataaagacccagataaccctgaatatctcgagtttttgaaacagttgaagcatctggcttacgagcagtttaattttaccatggaagacggactggtgaacactattccggcatcttttcatgacgggttactgctttacattcaagccgtgaccgagacactcgcccacgggggtacggtcacagatggagagaatattacccagagaatgtggaataggtcttttcaaggagttacagggtacctgaaaatcgatagctctggtgacagggagaccgacttcagcctgtgggacatggaccccgagaacggtgcttttagagtggtgctgaattacaatgggacgtctcaggagctggtggcagtgtctggacgaaaacttaactggcctttggggtatcccccaccagatatacctaagtgtgggtttgacaacgaagatcccgcttgtaatcaagatcacttatctacactcgaagtactggccttggtcggttctctgagtttattggggatcctgatcgtttcattcttcatttataggaagatgcagttagagaaggaacttgcctctgaattgtggcgcgtaaggtgggaggacgtggagccttcatccctcgaaagacatctgagaagcgcaggtagtcgactgacattaagcggacgtggttcaaattacggatctttgctaactacagaagggcagttccaagtgttcgccaaaactgcttattataagggcaatctggtcgctgtaaagagagtgaatcgaaagagaatcgaactcacccgaaaggtgctgttcgaacttaagcacatgcgggatgtgcaaaatgaacacctcacccgttttgtcggcgcatgcacggatccccccaatatttgtattctcacagaatattgtcccagaggcagtctgcaggatatccttgaaaacgagtcaatcacattggactggatgttcagatattccctcaccaatgacatcgtcaaagggatgctcttcctgcacaacggggctatctgctcccatgggaaccttaaaagctctaactgtgtggttgacggtcgatttgttctgaaaataaccgactatgggttagaatcttttcgggatctcgatcccgagcagggccacactgtgtacgcgaaaaagttatggacagcccctgaattactgcgaatggcatctccgccagtgcggggatcgcaagccggtgacgtgtactcattcggcattattttacaagaaattgctctgcggtctggggtttttcacgttgaaggattggatctgtctcccaaagagatcatcgaaagggtgacacgcggggagcagcctcctttccgacctagtcttgcacttcagagccatttggaagaattaggcttgctgatgcaacgctgctgggccgaggacccccaggaaaggcccccattccagcagatccgtttgacattgcgcaagttcaatagagagaacagctccaatattctcgacaatctgctgagccgaatggagcagtatgccaataatctcgaggagttggtggaagaacggacacaggcgtacttggaagaaaaacgcaaagcagaggcgttgctgtaccagatactgccccacagcgttgctgagcagctgaaacgcggtgagaccgtccaggccgaggcgtttgacagtgttactatatacttctccgacattgtggggtttaccgcactgtcagccgaaagcacacctatgcaggtggtgactctgctgaatgacctttacacctgctttgacgctgtcattgacaattttgacgtctacaaagtggagaccatcggagatgcttacatggttgtgtccgggctccccgttaggaatggccggctacacgcatgcgaggtggcgcggatggctctggccttactcgacgccgtgcgttccttcagaatcaggcaccggccgcaagagcagctcaggcttcggatcgggatccatactggtcccgtttgcgcaggggtggtggggctcaagatgcccagatactgtttattcggggacaccgtgaatacagccagcagaatggaatccaacggggaggctctgaagatccacctctctagtgaaacaaaggctgttctggaagaattcgggggattcgagctggagctgaggggggacgtcgaaatgaagggcaagggaaaggtacggacctattggcttctgggagaacgtgggagctccactcgagggtag

SEQ ID NO: 17010 - DNA, 3186 bp, Artificial Sequence
  derived and/or modified sequence
atgccagggcctagaagaccagccggttctcgccttaggctgcttctgctgcttctgctgcctccactcctgttgctgttgagaggctctcacgctggtaatctgactgtggcagtcgtcctcccactcgccaacaccagctatccctggtcttgggcaagagtcggtccagcagtggagctggcgctcgctcaagtcaaagcgaggcctgacctgttgccaggttggaccgttcgaacagtgttaggttcctcagagaacgctctaggcgtgtgttcggacaccgcagctcccctggccgctgtcgatctgaaatgggagcacaatccagctgtgtttcttggccctggttgtgtgtacgccgctgctcccgttggccgattcacagctcattggagagtgcctctgctcacagctggtgccccagcccttggctttggggttaaagacgaatatgcactgacgaccagagccggtccctcgtatgcaaaacttggtgatttcgttgcagcattgcacaggaggttgggatgggaaaggcaggccctgatgctctacgcctaccgcccaggagatgaggagcactgtttcttcctagtggaaggtctgttcatgcgagtaagagaccggctgaatattacggtggaccacctcgagttcgcagaagatgacctgtctcactataccagattactccgcacaatgcctcgtaaaggtcgggtcatttacatttgttcatctcctgatgcatttagaacactaatgctcctggctctggaagcaggcctgtgcggggaggactacgtgttttttcacctggatatttttggacagtctctgcagggcggacaaggaccggctcctcggcgaccttgggagcgcggagacggccaggatgtgtccgcaaggcaagcttttcaagctgcgaagatcatcacatataaggatcctgataacccagagtatttagagtttctgaaacagctgaaacatttggcttacgaacagttcaattttaccatggaagatggcctagtgaatactatccccgcttcgttccatgacggcctgctcttatatatccaggcagtaaccgagactctggcccatggaggcactgttacagatggagaaaacattactcaacgcatgtggaaccgttctttccagggagtcacaggctatctcaagatcgactcaagtggagatcgcgaaacagacttctccctctgggatatggatcccgagaacggcgcatttagagttgtactgaattacaatggcactagtcaggagctcgttgcggtttcaggaagaaagttaaattggcctttgggataccctcctcctgacatcccaaagtgtggctttgacaacgaagaccctgcatgtaatcaggatcacctttccactctggaggtactggctctggtcggcagcctgagtttgttaggcatcctcattgtgtcctttttcatataccgcaagatgcagttagaaaaggagcttgcctcagagttatggcgcgtgagatgggaagatgtggagccctccagtctcgagcggcacctgagaagcgccggaagcaggttgacgctcagcgggaggggctcaaattacggtagtttgctgaccactgagggccaattccaagtctttgcaaaaactgcatactataaaggaaatctcgtggcagtcaagagagtgaaccgaaagcggatcgagctgaccaggaaagtgctgttcgaattaaagcacatgcgggacgttcaaaatgagcatttgactaggttcgtcggcgcatgcactgatcccccaaatatctgtatccttacagagtattgtcccagaggtagcctccaggacatcctggaaaacgagagcatcactttagattggatgtttcggtactctctgaccaacgacatcgtcaagggcatgctctttctgcacaatggagctatttgcagtcacggcaacctgaagagtagtaactgtgtcgtggacggaaggttcgtcctgaagattactgattacgggctcgaaagttttagagacttggaccctgagcaagggcatacagtttacgctaaaaagctgtggaccgccccagagctcctgcggatggcctccccaccggttcggggttcacaggccggagatgtgtacagtttcggcattatccttcaggagattgctctgcggagcggcgtgtttcatgtagaaggattggacctgagcccaaaagagattattgagagggtgacccgcggtgagcagccacctttccgacccagcctggcccttcaatcccatttggaggaattggggctcctcatgcagagatgttgggcagaggacccacaggagcggcctccctttcaacagattcggctcaccctgcgtaagttcaacagggaaaattctagcaacatcctggacaatctcctatcccgcatggaacagtacgccaacaacctagaagagttagtggaagagcggactcaggcctacctcgaagagaaacggaaggccgaggccctgctctaccagatcctgcctcattccgtggcagagcagctcaagcgaggggagacagtccaggccgaggcattcgactctgtgaccatttattttagcgatatcgtgggatttactgcgctctcagccgagtcaactcctatgcaggttgtcacacttcttaatgatctgtacacttgcttcgatgcagttattgataattttgatgtgtataaggttgaaacaattggcgatgcttacatggttgtgtcgggcctgcccgttagaaatggccgtctgcacgcttgcgaagttgctcgcatggcattagccctcctcgacgcagtgagatcttttcgaatcagacatcgtccccaagaacaactgcggctgcgtataggaatacacacaggcccagtgtgcgcaggagtggtaggcctcaaaatgccgcgttattgtctcttcggagatacagtgaataccgcttctaggatggagtccaacggagaagcgcttaagatacatttgagttcagagacaaaagcggtgctggaggagtttggcggattcgagcttgaactgcggggagacgtggaaatgaaagggaaagggaaggtcagaacctactggcttctcggcgagagaggttcctccaccaggggatag

SEQ ID NO: 17011 - DNA, 3186 bp, Artificial Sequence
  derived and/or modified sequence
atgcccggccccagaagacccgccggcagcagactgagactgctgctgctgctgctgctgccccccctgctgctgctgctgagaggcagccacgccggcaacctgaccgtggccgtggtgctgcccctggccaacaccagctacccctggagctgggccagagtgggccccgccgtggagctggccctggcccaggtgaaggccagacccgacctgctgcccggctggaccgtgagaaccgtgctgggcagcagcgagaacgccctgggcgtgtgcagcgacaccgccgcccccctggccgccgtggacctgaagtgggagcacaaccccgccgtgttcctgggccccggctgcgtgtacgccgccgcccccgtgggcagattcaccgcccactggagagtgcccctgctgaccgccggcgcccccgccctgggcttcggcgtgaaggacgagtacgccctgaccaccagagccggccccagctacgccaagctgggcgacttcgtggccgccctgcacagaagactgggctgggagagacaggccctgatgctgtacgcctacagacccggcgacgaggagcactgcttcttcctggtggagggcctgttcatgagagtgagagacagactgaacatcaccgtggaccacctggagttcgccgaggacgacctgagccactacaccagactgctgagaaccatgcccagaaagggcagagtgatctacatctgcagcagccccgacgccttcagaaccctgatgctgctggccctggaggccggcctgtgcggcgaggactacgtgttcttccacctggacatcttcggccagagcctgcagggcggccagggccccgcccccagaagaccctgggagagaggcgacggccaggacgtgagcgccagacaggccttccaggccgccaagatcatcacctacaaggaccccgacaaccccgagtacctggagttcctgaagcagctgaagcacctggcctacgagcagttcaacttcaccatggaggacggcctggtgaacaccatccccgccagcttccacgacggcctgctgctgtacatccaggccgtgaccgagaccctggcccacggcggcaccgtgaccgacggcgagaacatcacccagagaatgtggaacagaagcttccagggcgtgaccggctacctgaagatcgacagcagcggcgacagagagaccgacttcagcctgtgggacatggaccccgagaacggcgccttcagagtggtgctgaactacaacggcaccagccaggagctggtggccgtgagcggcagaaagctgaactggcccctgggctaccccccccccgacatccccaagtgcggcttcgacaacgaggaccccgcctgcaaccaggaccacctgagcaccctggaggtgctggccctggtgggcagcctgagcctgctgggcatcctgatcgtgagcttcttcatctacagaaagatgcagctggagaaggagctggccagcgagctgtggagagtgagatgggaggacgtggagcccagcagcctggagagacacctgagaagcgccggcagcagactgaccctgagcggcagaggcagcaactacggcagcctgctgaccaccgagggccagttccaggtgttcgccaagaccgcctactacaagggcaacctggtggccgtgaagagagtgaacagaaagagaatcgagctgaccagaaaggtgctgttcgagctgaagcacatgagagacgtgcagaacgagcacctgaccagattcgtgggcgcctgcaccgacccccccaacatctgcatcctgaccgagtactgccccagaggcagcctgcaggacatcctggagaacgagagcatcaccctggactggatgttcagatacagcctgaccaacgacatcgtgaagggcatgctgttcctgcacaacggcgccatctgcagccacggcaacctgaagagcagcaactgcgtggtggacggcagattcgtgctgaagatcaccgactacggcctggagagcttcagagacctggaccccgagcagggccacaccgtgtacgccaagaagctgtggaccgcccccgagctgctgagaatggccagcccccccgtgagaggcagccaggccggcgacgtgtacagcttcggcatcatcctgcaggagatcgccctgagaagcggcgtgttccacgtggagggcctggacctgagccccaaggagatcatcgagagagtgaccagaggcgagcagccccccttcagacccagcctggccctgcagagccacctggaggagctgggcctgctgatgcagagatgctgggccgaggacccccaggagagaccccccttccagcagatcagactgaccctgagaaagttcaacagagagaacagcagcaacatcctggacaacctgctgagcagaatggagcagtacgccaacaacctggaggagctggtggaggagagaacccaggcctacctggaggagaagagaaaggccgaggccctgctgtaccagatcctgccccacagcgtggccgagcagctgaagagaggcgagaccgtgcaggccgaggccttcgacagcgtgaccatctacttcagcgacatcgtgggcttcaccgccctgagcgccgagagcacccccatgcaggtggtgaccctgctgaacgacctgtacacctgcttcgacgccgtgatcgacaacttcgacgtgtacaaggtggagaccatcggcgacgcctacatggtggtgagcggcctgcccgtgagaaacggcagactgcacgcctgcgaggtggccagaatggccctggccctgctggacgccgtgagaagcttcagaatcagacacagaccccaggagcagctgagactgagaatcggcatccacaccggccccgtgtgcgccggcgtggtgggcctgaagatgcccagatactgcctgttcggcgacaccgtgaacaccgccagcagaatggagagcaacggcgaggccctgaagatccacctgagcagcgagaccaaggccgtgctggaggagttcggcggcttcgagctggagctgagaggcgacgtggagatgaagggcaagggcaaggtgagaacctactggctgctgggcgagagaggcagcagcaccagaggctag

SEQ ID NO: 17012 - protein, 540 aa, Artificial Sequence
  derived and/or modified sequence
MPSLLVLTFSPCVLLGWALLAGGTGGGGVGGGGGGAGIGGGRQEREALPPQKIEVLVLLPQDDSYLFSLTRVRPAIEYALRSVEGNGTGRRLLPPGTRFQVAYEDSDCGNRALFSLVDRVAAARGAKPDLILGPVCEYAAAPVARLASHWDLPMLSAGALAAGFQHKDSEYSHLTRVAPAYAKMGEMMLALFRHHHWSRAALVYSDDKLERNCYFTLEGVHEVFQEEGLHTSIYSFDETKDLDLEDIVRNIQASERVVIMCASSDTIRSIMLVAHRHGMTSGDYAFFNIELFNSSSYGDGSWKRGDKHDFEAKQAYSSLQTVTLLRTVKPEFEKFSMEVKSSVEKQGLNMEDYVNMFVEGFHDAILLYVLALHEVLRAGYSKKDGGKIIQQTWNRTFEGIAGQVSIDANGDRYGDFSVIAMTDVEAGTQEVIGDYFGKEGRFEMRPNVKYPWGPLKLRIDENRIVEHTNSSPCKSCGLEESAVTGIVVGALLGAGLLMAFYFFRKKYRITIERRTQQEESNLGKHRELREDSIRSHFSVA

SEQ ID NO: 17013 - DNA, 1623 bp, Artificial Sequence
  derived and/or modified sequence
atgccctccctgttagtgctgactttttcaccctgtgtcctgctaggttgggcacttctggccgggggaaccggtggaggcggggtgggaggtggcggcggaggtgccggaataggcgggggacggcaagagagggaggctttgccaccacagaagatcgaggtgctagtcctgctgccccaggatgatagctatttgttttcacttacgcgcgttcggccagccatcgaatatgcccttcgtagcgttgaggggaacgggacagggagacgtctcctgccaccgggtacaagatttcaagtggcttatgaagattcggattgcggcaatagagctctgttcagcctagtagaccgcgtggctgccgcacggggcgccaagccagatctcatcttaggacctgtctgtgaatacgccgcagcgcccgtggccagattggcctcgcattgggatctgcccatgctcagcgctggggctttggcagctggatttcagcacaaggactctgagtactctcacctgacacgagtcgcacctgcgtacgcgaagatgggggagatgatgctggcgttatttcggcatcatcattggtcaagagccgccctggtgtacagcgatgataaactggaaagaaattgctacttcacactcgagggggtccacgaagtattccaggaagagggactgcatacatcaatctattcatttgacgagacaaaagacctagacctggaggacattgtcagaaacatccaggcttcagaaagggttgtaatcatgtgtgctagttcagacactattcgctctattatgcttgttgcgcacaggcatggtatgacctctggcgactacgccttctttaatatcgaacttttcaatagctcttcatatggggatgggtcatggaagaggggtgataagcatgatttcgaggccaaacaggcctactcaagcctccagactgtgactctgctgcgcactgtgaagcctgagtttgaaaagttctcgatggaggtgaaaagctcagtggagaagcaggggctgaacatggaagactacgtcaatatgttcgtcgaagggttccacgatgcaattctcctgtatgtgcttgctctccatgaagtgctgcgggcaggatactccaagaaggatggaggaaagatcattcagcagacctggaatcgcacattcgaaggaatcgccggacaagtgtctatcgatgcaaatggagaccgctacggtgacttctcagttattgcaatgactgacgttgaagccgggacccaggaagtgatcggcgattactttggaaaggaagggagatttgagatgcggcctaatgtgaaatacccttgggggcctctaaagctgaggatagacgaaaacagaatcgtcgaacacaccaattcctctccttgtaaaagctgcggcctggaggaatccgccgtaaccggcattgtcgtgggggccctacttggggctggcctgctgatggcattttatttctttaggaaaaagtatcgcattaccattgagcgtaggacacagcaggaagaatccaacctgggtaagcatagagagctacgtgaggatagtatacgaagccacttctccgttgcatag

SEQ ID NO: 17014 - DNA, 1623 bp, Artificial Sequence
  derived and/or modified sequence
atgcccagcctgctggtgctgaccttcagcccctgtgtgctgctgggctgggccctgctggccggcggcaccggcggcggcggcgtgggcggcggcggcggcggggccggcatcggcggcggccggcaggagcgggaggccctgcccccccagaagattgaggtgctggtgctgctgccccaggatgacagctacctgttcagcctgaccagggtgcggcctgccatcgagtatgccctgcggtctgtggagggcaatggcaccggccggcggctgctgcccccaggcacccgcttccaggtggcctatgaggacagcgactgtggcaacagagccctcttcagcctggtggacagagtggccgccgcccggggggccaagccagacctgatcctgggccctgtgtgtgaatatgctgctgcccctgtggcccggctggccagccactgggacctgcccatgctgtctgctggggccctggccgccggcttccagcacaaggacagcgagtacagccacctgaccagggtggccccagcctatgccaagatgggagagatgatgctggccctcttccgccaccaccactggagccgggccgccctggtgtacagtgatgacaagctggagaggaactgctacttcaccctggagggcgtgcatgaggtgttccaggaggagggcctgcacaccagcatctacagctttgatgagaccaaggacctggacctggaggacatcgtgaggaacatccaggccagcgagcgggtggtgatcatgtgtgccagcagtgacaccatccgcagcatcatgctggtggcccacagacatggcatgaccagcggggactatgccttcttcaacatcgagctgttcaacagcagcagctatggagatggctcctggaagagaggagacaagcatgactttgaggccaagcaggcctacagcagcctgcagacagtgaccctgctgaggacagtgaagccagagtttgagaagttctccatggaggtgaagagctctgtggagaagcagggcctgaacatggaggactatgtgaacatgtttgtggagggcttccatgatgccatcctgctgtatgtgctggccctgcacgaggtgctgcgggccggctacagcaagaaggatggcggcaagatcatccagcagacctggaacagaacatttgagggcattgctggccaggtgtccattgatgccaatggagacagatatggagacttctctgtgattgccatgacagatgtggaggccggcacccaggaggtgattggagactactttgggaaggagggccgctttgagatgaggcccaacgtgaagtacccctggggccccctgaagctgagaattgatgaaaatcgcatcgtggagcacaccaacagcagcccctgcaagagctgtggcctggaggagagcgctgtgacaggcatcgtggtgggcgccctgctgggcgccggcctgctgatggccttctacttcttcaggaagaagtaccgcatcaccattgaaagaaggacccagcaggaggagagcaacctgggcaagcaccgggagctgcgggaggacagcatccgcagccacttctctgtggcctag

SEQ ID NO: 17015 - DNA, 1753 bp, Artificial Sequence
  derived and/or modified sequence
ggggggcagagggcgagtcggcggcggcgagggcaagctctttcttgcggcacgatgccgtctctgctggtgctcactttctccccgtgcgtactactcggctgggcgttgctggccggcggcaccggtggcggtggcgttggcggcggcggcggtggcgcgggcataggcggcggacgccaggagagagaggcgctgccgccacagaagatcgaggtgctggtgttactgccccaggatgactcgtacttgttttcactcacccgggtgcggccggccatcgagtatgctctgcgcagcgtggagggcaacgggactgggaggcggcttctgccgccgggcactcgcttccaggtggcttacgaggattcagactgtgggaaccgtgcgctcttcagcttggtggaccgcgtggcggcggcgcggggcgccaagccagaccttatcctggggccagtgtgcgagtatgcagcagcgccagtggcccggcttgcatcgcactgggacctgcccatgctgtcggctggggcgctggccgctggcttccagcacaaggactctgagtactcgcacctcacgcgcgtggcgcccgcctacgccaagatgggcgagatgatgctcgccctgttccgccaccaccactggagccgcgctgcactggtctacagcgacgacaagctggagcggaactgctacttcaccctcgagggggtccacgaggtcttccaggaggagggtttgcacacgtccatctacagtttcgacgagaccaaagacttggatctggaagacatcgtgcgcaatatccaggccagtgagagagtggtgatcatgtgtgcgagcagtgacaccatccggagcatcatgctggtggcgcacaggcatggcatgaccagtggagactacgccttcttcaacattgagctcttcaacagctcttcctatggagatggctcatggaagagaggagacaaacacgactttgaagctaagcaagcatactcgtccctccagacagtcactctactgaggacagtgaaacctgagtttgagaagttttccatggaggtgaaaagttcagttgagaaacaagggctcaatatggaggattacgttaacatgtttgttgaaggattccacgatgccatcctcctctacgtcttggctctacatgaagtactcagagctggttacagcaaaaaggatggagggaaaattatacagcagacttggaacagaacatttgaaggtatcgccgggcaggtgtccatagatgccaacggagaccgatatggggatttctctgtgattgccatgactgatgtggaggcgggcacccaggaggttattggtgattattttggaaaagaaggtcgttttgaaatgcggccgaatgtcaaatatccttggggccctttaaaactgagaatagatgaaaaccgaattgtagagcatacaaacagctctccctgcaaatcatgtggcctagaagaatcggcagtgacaggaattgtcgtgggggctttactaggagctggcttgctaatggccttctactttttcaggaagaaatacagaataaccattgagaggcgaacccagcaagaagaaagtaaccttggaaaacatcgggaattacgggaagattccatcagatcccatttttcagtagcttaaaggaagccccccactttttttttttctgcctgagattctttaaggagatagacgggttgaaagacatcaatgaaac

SEQ ID NO: 17016 - DNA, 1623 bp, Artificial Sequence
  derived and/or modified sequence
atgcccagcctgctggtgctgaccttcagcccctgcgtgctgctgggctgggctttgttggcaggcgggacagggggaggtggggtgggcggtgggggcggcggagcaggaatcgggggtggccggcaggaaagagaagctctgccccctcagaagatcgaagttctcgtgctgttacctcaagatgactcttatctttttagcctcacacgggttcggccagccatagaatacgcccttaggtccgtggagggtaacggcacaggccggcggttactcccaccgggaaccagattccaggtagcttatgaggacagcgattgcggcaaccgggctctgttttctctggtcgacagggtggcggcagcccgaggggccaagcctgacctcattctgggcccagtgtgcgaatatgcagctgctccggtggccagactcgcctcccattgggacctcccaatgctcagcgctggcgcgttggcagccggttttcagcacaaagacagcgagtattctcacctcacgagggtcgcacctgcttacgctaagatgggagagatgatgctggcactgttcagacaccaccactggtcgcgagcagcactggtgtacagcgacgacaaattggaaaggaactgttacttcactctcgaaggggtgcatgaggtgttccaggaagaaggcttacatacttccatctacagttttgatgagaccaaagacctggacttggaagatattgtgaggaatatccaggcatcagaacgagtcgttataatgtgtgctagcagcgacaccattaggagcattatgctggttgcccaccgacatgggatgacctctggcgactacgcattcttcaacatcgaacttttcaacagcagttcttatggggacggatcttggaagcgcggggataaacacgattttgaagccaagcaggcatattcgagtctgcagactgttacgctgctccggacagtgaaacctgagtttgaaaaattcagcatggaggttaagagcagtgtcgaaaaacagggtctcaacatggaggactacgtcaatatgttcgtggaaggattccatgatgccatcttgctgtatgtgttggccttacatgaagtcctacgggccggctattctaagaaagatggcggaaagatcatacagcagacttggaaccggacttttgaaggcatcgccggccaagtatccatcgacgccaatggcgatagatacggcgatttttccgtgattgcgatgaccgatgtggaagccgggacccaggaggtaatcggggactacttcgggaaagagggacggttcgaaatgagaccaaatgtgaaatacccctggggcccacttaagctgcggattgatgaaaatcgcattgtggagcacaccaacagctcaccttgtaagtcctgcggtctagaagaatccgccgttaccggaattgtggtaggcgcacttctgggtgccgggttactgatggcattttatttctttcgaaagaaataccgtattaccatcgagcgccgaacccaacaagaggaatcaaacctgggaaagcatagggagttgcgcgaggattctattaggagccatttctccgtggcctag

SEQ ID NO: 17017 - DNA, 1623 bp, Artificial Sequence
  derived and/or modified sequence
atgccaagtctgctggtcctgacattttccccgtgcgtgttattgggctgggcactcctggctggagggacaggaggtggcggagtggggggaggaggcggaggcgctggaatcgggggtggtcgccaggaacgagaggccctgcctccccaaaaaatcgaggtgttggttttactgccacaggatgatagttacctcttctctctcactagggtgcgtccagccattgagtatgctttaagaagtgttgagggcaatgggactggcaggagactactgcctcctggtacaagattccaggtagcatacgaggactctgactgtggcaatcgggctcttttctccctggtggacagagttgctgcagcacggggagccaagccagacctcatcctgggtcccgtgtgcgagtatgctgctgcacccgtcgcccgattagcctcgcattgggatctgcctatgctgagcgccggagccctcgccgctgggttccagcacaaggattctgagtactcccatctaacgcgcgtggcaccagcgtacgctaaaatgggagagatgatgctcgctctgttccggcaccatcactggtcaagggcagcactggtctactccgacgacaagcttgaacgaaattgttattttaccttggaaggagtgcatgaggtctttcaagaggagggccttcatacctccatctacagctttgacgagactaaggatcttgatctggaagacatcgtccgcaacatccaagcctccgagagagtggtgatcatgtgtgcctccagcgacacaattcgtagcattatgttggtcgcccatcgtcatggtatgacatctggagattatgcatttttcaacatcgaactgtttaactccagttcgtatggcgatgggagctggaagcggggtgacaaacacgacttcgaggcaaagcaggcctactcaagcctgcaaacggtgacccttctgaggaccgtcaaaccagagtttgaaaaatttagcatggaagtcaagtcttcagtggagaagcagggcctaaacatggaggactacgtgaacatgttcgtcgagggcttccatgacgctatccttctgtatgtactggcactccatgaagtgctccgtgctggatatagtaaaaaggacgggggaaaaatcatacaacaaacatggaaccgcacgtttgagggtattgccggacaggtgagtatcgatgctaacggagaccgttacggcgatttttcagtgatagcaatgaccgatgttgaagccggaactcaagaggtcatcggagactacttcggtaaggaggggcgattcgagatgcgcccaaacgtcaaatacccctggggacccctgaaactgcgtatagatgagaacaggattgtggagcacacaaactctagcccctgcaaaagttgtggcttagaggaaagcgcagtcacgggtattgtggtgggggctctgctaggagccggtcttctcatggctttttactttttccgcaaaaagtataggataaccatcgaacgcaggacacaacaggaggaaagcaacctgggcaagcatcgcgaattgagagaagacagtattaggtctcatttttcagtcgcctag

SEQ ID NO: 17018 - DNA, 1623 bp, Artificial Sequence
  derived and/or modified sequence
atgcccagcctgctggtgctgaccttcagcccctgcgtgctgctgggctgggccctgctggccggcggcaccggcggcggcggcgtgggcggcggcggcggcggcgccggcatcggcggcggcagacaggagagagaggccctgcccccccagaagatcgaggtgctggtgctgctgccccaggacgacagctacctgttcagcctgaccagagtgagacccgccatcgagtacgccctgagaagcgtggagggcaacggcaccggcagaagactgctgccccccggcaccagattccaggtggcctacgaggacagcgactgcggcaacagagccctgttcagcctggtggacagagtggccgccgccagaggcgccaagcccgacctgatcctgggccccgtgtgcgagtacgccgccgcccccgtggccagactggccagccactgggacctgcccatgctgagcgccggcgccctggccgccggcttccagcacaaggacagcgagtacagccacctgaccagagtggcccccgcctacgccaagatgggcgagatgatgctggccctgttcagacaccaccactggagcagagccgccctggtgtacagcgacgacaagctggagagaaactgctacttcaccctggagggcgtgcacgaggtgttccaggaggagggcctgcacaccagcatctacagcttcgacgagaccaaggacctggacctggaggacatcgtgagaaacatccaggccagcgagagagtggtgatcatgtgcgccagcagcgacaccatcagaagcatcatgctggtggcccacagacacggcatgaccagcggcgactacgccttcttcaacatcgagctgttcaacagcagcagctacggcgacggcagctggaagagaggcgacaagcacgacttcgaggccaagcaggcctacagcagcctgcagaccgtgaccctgctgagaaccgtgaagcccgagttcgagaagttcagcatggaggtgaagagcagcgtggagaagcagggcctgaacatggaggactacgtgaacatgttcgtggagggcttccacgacgccatcctgctgtacgtgctggccctgcacgaggtgctgagagccggctacagcaagaaggacggcggcaagatcatccagcagacctggaacagaaccttcgagggcatcgccggccaggtgagcatcgacgccaacggcgacagatacggcgacttcagcgtgatcgccatgaccgacgtggaggccggcacccaggaggtgatcggcgactacttcggcaaggagggcagattcgagatgagacccaacgtgaagtacccctggggccccctgaagctgagaatcgacgagaacagaatcgtggagcacaccaacagcagcccctgcaagagctgcggcctggaggagagcgccgtgaccggcatcgtggtgggcgccctgctgggcgccggcctgctgatggccttctacttcttcagaaagaagtacagaatcaccatcgagagaagaacccagcaggaggagagcaacctgggcaagcacagagagctgagagaggacagcatcagaagccacttcagcgtggcctag

SEQ ID NO: 17019 - protein, 384 aa, Artificial Sequence
  derived and/or modified sequence
MNSTLFSQVENHSVHSNFSEKNAQLLAFENDDCHLPLAMIFTLALAYGAVIILGVSGNLALIIIILKQKEMRNVTNILIVNLSFSDLLVAIMCLPFTFVYTLMDHWVFGEAMCKLNPFVQCVSITVSIFSLVLIAVERHQLIINPRGWRPNNRHAYVGIAVIWVLAVASSLPFLIYQVMTDEPFQNVTLDAYKDKYVCFDQFPSDSHRLSYTTLLLVLQYFGPLCFIFICYFKIYIRLKRRNNMMDKMRDNKYRSSETKRINIMLLSIVVAFAVCWLPLTIFNTVFDWNHQIIATCNHNLLFLLCHLTAMISTCVNPIFYGFLNKNFQRDLQFFFNFCDFRSRDDDYETIAMSTMHTDVSKTSLKQASPVAFKKINNNDDNEKI

SEQ ID NO: 17020 - protein, 61 aa, Artificial Sequence
  derived and/or modified sequence
MNSTLFSQVENHSVHSNFSEKNAQLLAFENDDCHLPLAMIFTLALAYGAVIILGVSGNLAL

SEQ ID NO: 17021 - protein, 141 aa, Artificial Sequence
  derived and/or modified sequence
MMDKMRDNKYRSSETKRINIMLLSIVVAFAVCWLPLTIFNTVFDWNHQIIATCNHNLLFLLCHLTAMISTCVNPIFYGFLNKNFQRDLQFFFNFCDFRSRDDDYETIAMSTMHTDVSKTSLKQASPVAFKKINNNDDNEKI

SEQ ID NO: 17022 - protein, 25 aa, Artificial Sequence
  derived and/or modified sequence
MNSTLFSQVENHSVHSNFSEKNAQL

SEQ ID NO: 17023 - protein, 60 aa, Artificial Sequence
  derived and/or modified sequence
MNSTLFSQVENHSVHSNFSEKNAQLLAFENDDCHLPLAMIFTLALAYGAVIILGVSGNLA

SEQ ID NO: 17024 - DNA, 1155 bp, Artificial Sequence
  derived and/or modified sequence
atgaacagtacattattcagtcaggtcgagaatcacagtgtccatagcaacttcagtgagaagaatgcccagttattggccttcgagaatgatgactgccatctcccactggccatgatcttcacgctggcactcgcttacggagctgtcatcatactgggtgtgtctggtaacctggccttgattatcattatcctcaagcagaaggaaatgcgcaatgtaaccaacatccttatagttaacctaagttttagcgatttgctcgtggcaatcatgtgtcttccctttacatttgtttataccctgatggaccattgggtcttcggtgaagccatgtgcaagctcaacccatttgtccagtgcgtctccatcacagtaagtatcttctctcttgtactcattgctgttgagagacaccaactgatcatcaaccctcgtggctggcgtcccaacaaccggcacgcatatgttggcatcgcagtgatttgggttctggctgtcgcatcgagcctcccattcctaatctaccaggtgatgacagatgaacccttccaaaatgttaccctcgacgcctacaaagacaaatatgtttgcttcgaccagtttccctcagactctcatcgattatcctacacaactttactcctggtgctgcaatatttcggacctctgtgtttcattttcatttgctacttcaagatatacatccgcctgaagaggcggaataatatgatggacaagatgcgagataacaagtatagaagtagtgaaacgaagagaatcaatattatgctactgtcaatcgttgtggcatttgccgtttgctggcttcccctaaccatctttaacacagtctttgattggaaccaccagataattgcaacatgtaaccacaacttgctgtttctcctctgccacctcacagcaatgatttctacttgcgtcaacccgatattctacggattccttaacaaaaactttcagcgagaccttcaattcttttttaatttttgcgacttcagatctagggatgatgactacgaaacaattgctatgagcacgatgcatactgacgtttcgaaaacatcactcaaacaagcatcacccgtggcattcaaaaaaatcaacaataatgacgataacgagaagatttag

SEQ ID NO: 17025 - DNA, 186 bp, Artificial Sequence
  derived and/or modified sequence
atgaactccactctgttctcccaagttgagaaccatagtgtgcactctaatttctcagaaaaaaacgcccagttgttggccttcgaaaacgacgactgccatttgcctctagcaatgatctttacgctggccctggcttacggcgccgtcatcatcctgggtgttagcggtaacctggcactctag

SEQ ID NO: 17026 - DNA, 426 bp, Artificial Sequence
  derived and/or modified sequence
atgatggacaagatgcgtgacaacaagtaccgctcaagcgagactaaacggatcaacatcatgctcctgtcgatcgtggttgcatttgctgtgtgctggctgcccctgaccattttcaacacagtctttgactggaatcaccaaatcatcgccacctgcaatcataatcttctcttcctactttgccacttgactgcaatgatttcaacgtgtgttaacccgatattctacggattcctcaacaaaaacttccagcgcgacctgcaattcttcttcaacttctgcgacttcagatcccgcgatgatgactacgagactatcgcaatgtctactatgcatacagacgttagcaaaacatccctgaaacaagctagcccagtcgccttcaagaagatcaataataatgacgataatgagaagatatag

SEQ ID NO: 17027 - DNA, 78 bp, Artificial Sequence
  derived and/or modified sequence
atgaacagcacactgttttcacaagtggaaaaccacagcgtgcacagcaactttagtgaaaagaacgcacagttgtag

SEQ ID NO: 17028 - DNA, 183 bp, Artificial Sequence
  derived and/or modified sequence
atgaacagtacacttttcagtcaggttgagaaccattcagtgcactctaactttagtgaaaaaaacgcacagctgcttgcttttgagaatgacgactgtcatctgcctctggcaatgatcttcaccctcgccctagcgtatggagctgtgattatactcggggtgtcagggaatttggcatag

SEQ ID NO: 17029 - DNA, 1155 bp, Artificial Sequence
  derived and/or modified sequence
atgaacagcaccctcttcagccaggtggagaaccacagcgtgcacagcaacttcagcgagaagaatgcccagctgctggcctttgaaaatgatgactgccacctgcccctggccatgatcttcaccctggccctggcctatggagctgtgatcatcctgggcgtgtctggcaacctggccctgatcatcatcatcctgaagcagaaggagatgagaaatgtgaccaacatcctgattgtgaacctgtccttcagtgacctgctggtggccatcatgtgcctgcccttcacctttgtgtacaccctgatggaccactgggtgtttggagaggccatgtgcaagctgaacccctttgtgcagtgtgtgtccatcaccgtgtccatcttcagcctggtgctgattgctgtggagcggcaccagctgatcatcaacccccggggctggaggcccaacaacagacatgcctacgtgggcattgctgtgatctgggtgctggccgtggccagcagcctgcccttcctgatctaccaggtgatgacagatgagcccttccagaatgtgaccctggatgcctacaaggacaagtatgtgtgctttgaccagttccccagcgacagccaccggctgagctacaccaccctgctgctggtgctgcagtacttcggccccctgtgcttcatcttcatctgctacttcaagatctacatccggctgaagagaagaaacaacatgatggacaagatgagggacaacaagtaccgcagcagcgagaccaagaggatcaacatcatgctgctgagcatcgtggtggcctttgctgtgtgctggctgcccctgaccatcttcaacacagtgtttgactggaaccaccagatcatcgccacctgcaaccacaacctgctcttcctgctgtgccacctgacagccatgatcagcacctgtgtgaaccccatcttctacggcttcctgaacaagaacttccagagggacctgcagttcttcttcaacttctgtgacttccgcagcagagatgatgattatgagaccatcgccatgagcaccatgcacacagatgtgtccaagaccagcctgaagcaggccagccctgtggccttcaagaagatcaacaacaatgatgacaatgagaagatctag

SEQ ID NO: 17030 - DNA, 186 bp, Artificial Sequence
  derived and/or modified sequence
atgaacagcaccctcttcagccaggtggagaaccacagcgtgcacagcaacttcagcgagaagaatgcccagctgctggcctttgaaaatgatgactgccacctgcccctggccatgatcttcaccctggccctggcctatggagctgtgatcatcctgggcgtgtctggcaacctggccctgtag

SEQ ID NO: 17031 - DNA, 426 bp, Artificial Sequence
  derived and/or modified sequence
atgatggacaagatgagggacaacaagtaccgcagcagcgagaccaagaggatcaacatcatgctgctgagcatcgtggtggcctttgctgtgtgctggctgcccctgaccatcttcaacacagtgtttgactggaaccaccagatcatcgccacctgcaaccacaacctgctcttcctgctgtgccacctgacagccatgatcagcacctgtgtgaaccccatcttctacggcttcctgaacaagaacttccagagggacctgcagttcttcttcaacttctgtgacttccgcagcagagatgatgattatgagaccatcgccatgagcaccatgcacacagatgtgtccaagaccagcctgaagcaggccagccctgtggccttcaagaagatcaacaacaatgatgacaatgagaagatctag

SEQ ID NO: 17032 - DNA, 78 bp, Artificial Sequence
  derived and/or modified sequence
atgaacagcaccctcttcagccaggtggagaaccacagcgtgcacagcaacttcagcgagaagaatgcccagctgtag

SEQ ID NO: 17033 - DNA, 183 bp, Artificial Sequence
  derived and/or modified sequence
atgaacagcaccctcttcagccaggtggagaaccacagcgtgcacagcaacttcagcgagaagaatgcccagctgctggcctttgaaaatgatgactgccacctgcccctggccatgatcttcaccctggccctggcctatggagctgtgatcatcctgggcgtgtctggcaacctggcctag

SEQ ID NO: 17034 - DNA, 1155 bp, Artificial Sequence
  derived and/or modified sequence
atgaacagcaccctgttcagccaggtggagaaccacagcgtgcactctaatttcagtgagaagaacgcccagcttctggccttcgagaatgatgactgccacttgcccctggctatgatatttactttggcattggcttatggtgctgtaatcattctgggggtctctggcaacctggcactcataataatcattctgaagcagaaagagatgaggaatgtgaccaacattctgattgtaaacctttcctttagcgaccttctggtagcgatcatgtgtctgccatttacctttgtgtatacactgatggaccattgggtttttggagaagctatgtgcaaactgaatccgttcgtccagtgcgttagcatcacagtgtctatcttcagtctggtgctcatcgcagtagaaagacaccaactgatcatcaatccacggggatggagacccaataatagacacgcctatgtcggtatcgccgttatttgggtgcttgccgtggcctcatctctcccctttcttatttaccaggtgatgaccgatgagccgttccagaatgtgaccttggatgcatataaggataaatacgtgtgctttgatcagtttccctcagacagccacagactctcttatactaccctcctgctcgtcctgcaatactttggacccttatgctttatatttatttgttatttcaagatctacattcggctgaagagacggaataatatgatggacaaaatgcgggacaataagtatcgcagcagcgagactaaacgcatcaatatcatgctcctctcgatagttgtcgcttttgcagtgtgttggctgcccctgacgatcttcaacaccgtcttcgattggaaccatcaaatcatcgcgacttgcaaccacaatctgttgttcctcctgtgtcacctgaccgcaatgattagtacatgcgttaatcccattttttacgggttcttgaataaaaacttccagagagatctacagtttttctttaatttttgtgattttcgcagcagagacgatgactacgagactatagctatgtccaccatgcacacggatgtgagcaaaactagcttaaagcaggcttcgcccgtggcctttaagaaaattaataataacgatgacaacgagaagatttag

SEQ ID NO: 17035 - DNA, 186 bp, Artificial Sequence
  derived and/or modified sequence
atgaacagcaccctgttcagccaggtggagaaccacagcgtgcactccaacttcagcgagaagaacgcacagcttttggctttcgaaaacgacgattgccacctgccactcgccatgatttttacactggctcttgcctacggagccgtgattattctgggtgtgagtggcaatctggccctctag

SEQ ID NO: 17036 - DNA, 426 bp, Artificial Sequence
  derived and/or modified sequence
atgatggacaagatgcgggacaacaagtaccggagcagcgagaccaaaagaattaatatcatgctgctcagtatagtggtcgcttttgccgtctgttggttgcctctcactatatttaataccgtctttgactggaatcaccagattatcgcaacttgtaaccataatttgttatttttgttatgccacttaaccgcaatgatttctacgtgtgtcaatccaattttttacggatttctcaataagaatttccaacgcgatctgcaattcttcttcaatttttgcgattttcggtcaagggacgacgactatgagaccatcgctatgtctactatgcatactgatgtgtccaagacatccttaaaacaagccagtcctgtggctttcaagaagattaacaataacgatgataacgagaaaatctag

SEQ ID NO: 17037 - DNA, 78 bp, Artificial Sequence
  derived and/or modified sequence
atgaacagcaccctgttcagccaggtggagaaccacagcgtgcactcaaatttttctgaaaagaatgctcaactttag

SEQ ID NO: 17038 - DNA, 183 bp, Artificial Sequence
  derived and/or modified sequence
atgaacagcaccctgttcagccaggtggagaaccacagcgtgcactccaatttcagcgagaaaaatgcacagttactggccttcgagaatgacgactgtcatctgcccctggccatgattttcactctggctctcgcatacggggctgtgatcattctcggcgtaagcggcaatctggcctag

SEQ ID NO: 17039 - DNA, 3029 bp, Artificial Sequence
  derived and/or modified sequence
aaactgccctgccttccccggagtcgaggactgtggggattagggcttcctttcccctgcgcgggaggtctgtgtcgaataatgtgtggcttctgttggattgcttttctttccaaaattcctaggcaatgcttccccgaggtgtgcacctttgtgaggtgtttgtggggttgggggagcttcaggcgctactcgcgggacgccgtcacgtgatccgggatgaggtggagttcggctttaaggaggcgtctcttcctagcttcatcaatctttaggatctgagcaggagaaataccagcggatcttccccactctgctcccttccattcccacccttccttctttaataagcaggagcgaaaaagacaaattccaaagaggattgttcagttcaagggaatgaagaattcagaataattttggtaaatggattccaatatggggaataagaataagctgaacagttgacctgctttgaagaaacatactgtccatttgtctaaaataatctataacaaccaaaccaatcaaaatgaattcaacattattttcccaggttgaaaatcattcagtccactctaatttctcagagaagaatgcccagcttctggcttttgaaaatgatgattgtcatctgcccttggccatgatatttaccttagctcttgcttatggagctgtgatcattcttggtgtctctggaaacctggccttgatcataatcatcttgaaacaaaaggagatgagaaatgttaccaacatcctgattgtgaacctttccttctcagacttgcttgttgccatcatgtgtctcccctttacatttgtctacacattaatggaccactgggtctttggtgaggcgatgtgtaagttgaatccttttgtgcaatgtgtttcaatcactgtgtccattttctctctggttctcattgctgtggaacgacatcagctgataatcaaccctcgagggtggagaccaaataatagacatgcttatgtaggtattgctgtgatttgggtccttgctgtggcttcttctttgcctttcctgatctaccaagtaatgactgatgagccgttccaaaatgtaacacttgatgcgtacaaagacaaatacgtgtgctttgatcaatttccatcggactctcataggttgtcttataccactctcctcttggtgctgcagtattttggtccactttgttttatatttatttgctacttcaagatatatatacgcctaaaaaggagaaacaacatgatggacaagatgagagacaataagtacaggtccagtgaaaccaaaagaatcaatatcatgctgctctccattgtggtagcatttgcagtctgctggctccctcttaccatctttaacactgtgtttgattggaatcatcagatcattgctacctgcaaccacaatctgttattcctgctctgccacctcacagcaatgatatccacttgtgtcaaccccatattttatgggttcctgaacaaaaacttccagagagacttgcagttcttcttcaacttttgtgatttccggtctcgggatgatgattatgaaacaatagccatgtccacgatgcacacagatgtttccaaaacttctttgaagcaagcaagcccagtcgcatttaaaaaaatcaacaacaatgatgataatgaaaaaatctgaaactacttatagcctatggtcccggatgacatctgtttaaaaacaagcacaacctgcaacatactttgattacctgttctcccaaggaatggggttgaaatcatttgaaaatgactaagattttcttgtcttgctttttactgcttttgttgtagttgtcataattacatttggaacaaaaggtgtgggctttggggtcttctggaaatagttttgaccagacatctttgaagtgctttttgtgaatttatgcatataatataaagacttttatactgtacttattggaatgaaatttctttaaagtattactattaactgacttcagaagtacctgccatccaatacggtcattagattgggtcatcttgattagattagattagattagattgtcaacagattgggccatccttactttatgataggcatcattttagtgtgttacaatagtaacagtatgcaaaagcagcattcaggagccgaaagatagtctgaagtcattcagaagtggtttgaggtttctgttttttggtggtttttgtttgttttttttttttttcaccttaagggaggatttaatttgctcccaactgattgtcacttaaatgaaaatttaaaaatgaataaaaagacatacttctcagctgcaaatattatggagaattggggcacccacaggaatgaagagagaaagcagctccctaacttcaaaaccattttggtacctgacaacaagagcattttagagtaattaatttaataaagtaaattagtattgctgcaaatagttaaattatatttatttgaattgatggtcaagagattttccattttttttacagactgttcagtgtttgtcaagctttctggcataaatatgtactcaaaaggcatttccgcttacaatttgtagaaacacaaaatgcgttttccatacagcagtgcctatatagtgactgatttttaactttcaatgtccatctttcaaaggaagtaacaccaaggtacaatgttaaaggaatattcactttacctagcagggaaaaatacacaaaaactgcagatacttcatatagcccattttaacttgtataaactgtgtgacttgtggcgtcttataaataatgcactgtaaagattactgaatagttgtgtcatgttaatgtgcctaatttcatgtatcttgtaatcatgattgagcctcagaatcatttggagaaactatattttaaagaacaagacatacttcaatgtattatacagataaagtattacatgtgtttgattttaaaagggcggacattttattaaaatcaatattgtttttgctttttctgag

SEQ ID NO: 17040 - DNA, 559 bp, Artificial Sequence
  derived and/or modified sequence
attattgtggcgaatttcatgtttcccagcgagccctttgattcctggtttgggctggcgctcgagctctccagccgggtatgacttcggccacaagatggcactgacctgcaaacaaagaaaagcacagtggcaccgactttttcaagcctcgggaaactgccctgccttccccggagtcgaggactgtggggattagggcttcctttcccctgcgcgggagattgttcagttcaagggaatgaagaattcagaataattttggtaaatggattccaatatggggaataagaataagctgaacagttgacctgctttgaagaaacatactgtccatttgtctaaaataatctataacaaccaaaccaatcaaaatgaattcaacattattttcccaggttgaaaatcattcagtccactctaatttctcagagaagaatgcccagcttctggcttttgaaaatgatgattgtcatctgcccttggccatgatatttaccttagctcttgcttatggagctgtgatcattcttggtgtctctggaaacctggccttgat

SEQ ID NO: 17041 - DNA, 1017 bp, Artificial Sequence
  derived and/or modified sequence
aatctttaggatctgagcaggagaaataccagcggatcttccccactctgctcccttccattcccacccttccttctttaataagcaggagcgaaaaagacaaattccaaagaggattgttcagttcaagggaatgaagaattcagaataattttggttgtcttataccactctcctcttggtgctgcagtattttggtccactttgttttatatttatttgctacttcaagatatatatacgcctaaaaaggagaaacaacatgatggacaagatgagagacaataagtacaggtccagtgaaaccaaaagaatcaatatcatgctgctctccattgtggtagcatttgcagtctgctggctccctcttaccatctttaacactgtgtttgattggaatcatcagatcattgctacctgcaaccacaatctgttattcctgctctgccacctcacagcaatgatatccacttgtgtcaaccccatattttatgggttcctgaacaaaaacttccagagagacttgcagttcttcttcaacttttgtgatttccggtctcgggatgatgattatgaaacaatagccatgtccacgatgcacacagatgtttccaaaacttctttgaagcaagcaagcccagtcgcatttaaaaaaatcaacaacaatgatgataatgaaaaaatctgaaactacttatagcctatggtcccggatgacatctgtttaaaaacaagcacaacctgcaacatactttgattacctgttctcccaaggaatggggttgaaatcatttgaaaatgactaagattttcttgtcttgctttttactgcttttgttgtagttgtcataattacatttggaacaaaaggtgtgggctttggggtcttctggaaatagttttgaccagacatctttgaagtgctttttgtgaatttatgcatataatataaagacttttatactgtacttattggaatgaaatttctttaaagtattactattaactgacttcaga

SEQ ID NO: 17042 - DNA, 753 bp, Artificial Sequence
  derived and/or modified sequence
ttgcattcggactgcaaaattctgctgaaagagccttaggctattttccatggtctaaggtaaaatcgttttggctttggtccaacacaacgcctcagttcctttaaaagattaactaaaggtctgtgaacttggaaaaaagaattcccgtttctggaattcgagttctatggatgtttgttattgctcgcatttgttatatgaagacacctcgcaaacaggagcgcaaaccttagagcgcagctgcctcccgggctcgggtcagcgctggaccgcgcggcagctggacggcctgagtggcgccccgcgggctgcgcccccggcctcgccagagacccgctagggttgagccctgacccgggcaccccgcgggctgctgttcccagctccggatgccagccgggctgcagccagagcgcgtccagccgggggcagcgctttgtccatcccccgccccatccccaggaggctccttcgcggatccccgacactctcctcccgggttcggcccgcgcctgctccacccggattgttcagttcaagggaatgaagaattcagaataattttggtaaatggattccaatatggggaataagaataagctgaacagttgacctgctttgaagaaacatactgtccatttgtctaaaataatctataacaaccaaaccaatcaaaatgaattcaacattattttcccaggttgaaaatcattcagtccactctaatttctcagagaagaatgcccagct

SEQ ID NO: 17043 - DNA, 799 bp, Artificial Sequence
  derived and/or modified sequence
gaaaagcagtagctgtttgttctcgaccctgggccggctctctggcgaagcaagcgagggagcagaaagctaacccgaccaggttccccacccaggactagaccgagtgctcttccgtgactactactttattagtctttattgtcttaaggcagcagtctgttgaacaagccctccccagcaaggaaggagcagagaattatgtaattcatttagataagctagcagtaactttgggaggctgtatgtaacaaggctgacatttcttttccaacacaagtgaggtgaacagccagccaatcctgagtatttgaaaaaatgtatctgcagcaggttatgatcagggagctgtattttcaagtagtaacagcactgcgaagagcaagcaatgaaaggccagcattctaattggaaagaaagaagaggaaatttccctctgcaagggggctaatttgccaactggtgatattgttcagttcaagggaatgaagaattcagaataattttggtaaatggattccaatatggggaataagaataagctgaacagttgacctgctttgaagaaacatactgtccatttgtctaaaataatctataacaaccaaaccaatcaaaatgaattcaacattattttcccaggttgaaaatcattcagtccactctaatttctcagagaagaatgcccagcttctggcttttgaaaatgatgattgtcatctgcccttggccatgatatttaccttagctcttgcttatggagctgtgatcattcttggtgtctctggaaacctggcct

SEQ ID NO: 17044 - DNA, 1155 bp, Artificial Sequence
  derived and/or modified sequence
atgaactccaccctcttctcacaagtggagaaccatagtgttcattctaattttagtgaaaaaaatgcccaactgcttgcgttcgagaacgacgactgtcatcttcctcttgccatgattttcacgctggctctggcttacggcgctgtgatcatccttggcgtttcaggaaatctggccctcattattattatacttaaacagaaagagatgcgaaatgtcacaaatattctcatagtcaacctgtcattctccgacctcctggtggccatcatgtgtttaccttttacgttcgtttacactctgatggaccattgggtgttcggggaggctatgtgcaagttgaatcctttcgtacagtgtgtgagcatcactgtgtctatctttagcctcgtcctcatagctgttgaacggcatcagctcataattaaccccaggggctggaggcccaacaaccggcacgcttatgtcggaatcgccgtgatatgggttctggcggtggcaagctccctcccttttctcatctaccaagtcatgaccgacgagccttttcagaatgttactctcgatgcttataaagataagtatgtttgtttcgaccaattcccaagtgattcacacagattgagctatactactcttttgttggtcctgcaatattttggccctctttgctttatcttcatctgttattttaagatctatattaggctaaagaggcgcaataacatgatggataaaatgcgagacaataagtaccgaagctcagagactaagaggatcaatataatgctgctgtcaatcgtcgtcgcatttgctgtgtgctggctgcctctgacaatattcaataccgtgtttgattggaatcatcagatcattgctacatgcaaccataacctgctgttcttactctgtcacctaactgcgatgattagtacctgtgtgaaccctatcttctacggatttctgaataagaatttccaacgggatttacagtttttctttaatttttgtgatttcagaagccgcgacgatgactatgagaccatagccatgagtacaatgcatactgacgtatccaaaacaagtctgaaacaagcatcacctgtagcttttaagaaaatcaataataacgacgacaatgaaaaaatctag

SEQ ID NO: 17045 - DNA, 186 bp, Artificial Sequence
  derived and/or modified sequence
atgaactccacacttttctcccaggtggaaaaccatagcgtccacagcaatttctcagagaaaaacgcccagctcctggccttcgagaacgacgattgccatctgcccttggcaatgatctttacattagccctggcctacggggctgttatcatactaggcgttagtggcaacctggctctatag

SEQ ID NO: 17046 - DNA, 426 bp, Artificial Sequence
  derived and/or modified sequence
atgatggacaaaatgcgagacaacaaataccggtccagcgaaaccaagcgcattaatatcatgctgctaagcattgtggtcgcctttgctgtctgctggttacccctgaccatcttcaacactgtgtttgattggaaccaccagattattgctacctgtaaccacaacttgctgttcctcctgtgccacctcaccgccatgatatctacttgtgtcaatcctatcttttatgggttcctaaacaaaaatttccagcgggatttgcaatttttcttcaacttttgcgactttcggtccagagacgatgactacgaaacaatagctatgtccacgatgcacacagacgtgagtaaaacatcattgaagcaggcctcccccgtcgcgttcaagaaaatcaacaacaacgacgataatgagaaaatctag

SEQ ID NO: 17047 - DNA, 78 bp, Artificial Sequence
  derived and/or modified sequence
atgaattcgactctgttctcgcaggtggaaaatcacagcgtgcactccaacttttccgaaaagaacgctcagttgtag

SEQ ID NO: 17048 - DNA, 183 bp, Artificial Sequence
  derived and/or modified sequence
atgaactcaaccttgttctctcaggtcgaaaaccatagtgtgcactcaaatttttccgaaaaaaatgcacagctgctggccttcgaaaacgacgattgccatctgcctttggctatgatctttacactcgctctggcctacggcgcagtgattatcctgggtgtgagcggcaacctggcctag

SEQ ID NO: 17049 - DNA, 1155 bp, Artificial Sequence
  derived and/or modified sequence
atgaacagcaccctgttcagccaggtggagaaccacagcgtgcacagcaacttcagcgagaagaacgcccagctgctggccttcgagaacgacgactgccacctgcccctggccatgatcttcaccctggccctggcctacggcgccgtgatcatcctgggcgtgagcggcaacctggccctgatcatcatcatcctgaagcagaaggagatgagaaacgtgaccaacatcctgatcgtgaacctgagcttcagcgacctgctggtggccatcatgtgcctgcccttcaccttcgtgtacaccctgatggaccactgggtgttcggcgaggccatgtgcaagctgaaccccttcgtgcagtgcgtgagcatcaccgtgagcatcttcagcctggtgctgatcgccgtggagagacaccagctgatcatcaaccccagaggctggagacccaacaacagacacgcctacgtgggcatcgccgtgatctgggtgctggccgtggccagcagcctgcccttcctgatctaccaggtgatgaccgacgagcccttccagaacgtgaccctggacgcctacaaggacaagtacgtgtgcttcgaccagttccccagcgacagccacagactgagctacaccaccctgctgctggtgctgcagtacttcggccccctgtgcttcatcttcatctgctacttcaagatctacatcagactgaagagaagaaacaacatgatggacaagatgagagacaacaagtacagaagcagcgagaccaagagaatcaacatcatgctgctgagcatcgtggtggccttcgccgtgtgctggctgcccctgaccatcttcaacaccgtgttcgactggaaccaccagatcatcgccacctgcaaccacaacctgctgttcctgctgtgccacctgaccgccatgatcagcacctgcgtgaaccccatcttctacggcttcctgaacaagaacttccagagagacctgcagttcttcttcaacttctgcgacttcagaagcagagacgacgactacgagaccatcgccatgagcaccatgcacaccgacgtgagcaagaccagcctgaagcaggccagccccgtggccttcaagaagatcaacaacaacgacgacaacgagaagatctag

SEQ ID NO: 17050 - DNA, 186 bp, Artificial Sequence
  derived and/or modified sequence
atgaacagcaccctgttcagccaggtggagaaccacagcgtgcacagcaacttcagcgagaagaacgcccagctgctggccttcgagaacgacgactgccacctgcccctggccatgatcttcaccctggccctggcctacggcgccgtgatcatcctgggcgtgagcggcaacctggccctgtag

SEQ ID NO: 17051 - DNA, 426 bp, Artificial Sequence
  derived and/or modified sequence
atgatggacaagatgagagacaacaagtacagaagcagcgagaccaagagaatcaacatcatgctgctgagcatcgtggtggccttcgccgtgtgctggctgcccctgaccatcttcaacaccgtgttcgactggaaccaccagatcatcgccacctgcaaccacaacctgctgttcctgctgtgccacctgaccgccatgatcagcacctgcgtgaaccccatcttctacggcttcctgaacaagaacttccagagagacctgcagttcttcttcaacttctgcgacttcagaagcagagacgacgactacgagaccatcgccatgagcaccatgcacaccgacgtgagcaagaccagcctgaagcaggccagccccgtggccttcaagaagatcaacaacaacgacgacaacgagaagatctag

SEQ ID NO: 17052 - DNA, 78 bp, Artificial Sequence
  derived and/or modified sequence
atgaacagcaccctgttcagccaggtggagaaccacagcgtgcacagcaacttcagcgagaagaacgcccagctgtag

SEQ ID NO: 17053 - DNA, 183 bp, Artificial Sequence
  derived and/or modified sequence
atgaacagcaccctgttcagccaggtggagaaccacagcgtgcacagcaacttcagcgagaagaacgcccagctgctggccttcgagaacgacgactgccacctgcccctggccatgatcttcaccctggccctggcctacggcgccgtgatcatcctgggcgtgagcggcaacctggcctag

SEQ ID NO: 17054 - protein, 381 aa, Artificial Sequence
  derived and/or modified sequence
MGPIGAEADENQTVEEMKVEQYGPQTTPRGELVPDPEPELIDSTKLIEVQVVLILAYCSIILLGVIGNSLVIHVVIKFKSMRTVTNFFIANLAVADLLVNTLCLPFTLTYTLMGEWKMGPVLCHLVPYAQGLAVQVSTITLTVIALDRHRCIVYHLESKISKRISFLIIGLAWGISALLASPLAIFREYSLIEIIPDFEIVACTEKWPGEEKSIYGTVYSLSSLLILYVLPLGIISFSYTRIWSKLKNHVSPGAANDHYHQRRQKTTKMLVCVVVVFAVSWLPLHAFQLAVDIDSQVLDLKEYKLIFTVFHIIAMCSTFANPLLYGWMNSNYRKAFLSAFRCEQRLDAIHSEVSVTFKAKKNLEVRKNSGPNDSFTEATNV

SEQ ID NO: 17055 - DNA, 1146 bp, Artificial Sequence
  derived and/or modified sequence
atggggcccatcggagccgaagccgacgaaaaccaaaccgtagaagaaatgaaagttgagcagtacggccctcagacgactccacggggggagctcgtccccgatccagaacctgagctaatcgattctacaaagttaatagaggtacaggtcgtgctgatactcgcctattgcagcatcatcctgttgggtgtaatcgggaattctttggtgatccatgtcgtcattaaatttaaaagtatgagaacagtgactaatttttttatagcaaacctagccgtggcagatctgcttgtaaataccctttgcctaccattcacactcacttataccctgatgggagaatggaagatgggccccgtcctgtgccacttagtgccgtatgcccagggtttggccgtgcaggtgagcaccataaccctaaccgtgattgcccttgacagacacaggtgtatcgtgtaccacctggaatcaaaaatctcaaaaagaatcagcttccttatcattggccttgcctggggcatctccgccttgttagccagccctttagcgatcttccgcgaatactcacttattgagattattcctgactttgagatagttgcctgtacggaaaaatggccaggggaagagaagtccatctatggtacagtatacagtctgagctctttgctgatcttgtacgtgttgccgcttgggattatttccttttcgtacactcgaatctggagcaagctgaaaaatcatgtctccccgggagccgccaatgaccactaccatcagcgccgccagaagaccactaaaatgttggtgtgtgtggtggtcgtttttgccgtatcttggctgcctctgcatgcatttcagctggccgttgacatcgatagccaagttctagatctcaaggagtataagttgatctttaccgtgtttcatatcatcgccatgtgctccacttttgccaacccacttctttatggctggatgaacagcaactatcgcaaagccttcctgagcgcctttcgatgtgaacagcgacttgacgccattcattccgaggtgtccgtgacatttaaggccaagaagaacttggaagtccgcaagaacagcggaccaaatgactccttcactgaggcaacgaacgtgtag

SEQ ID NO: 17056 - DNA, 1146 bp, Artificial Sequence
  derived and/or modified sequence
atgggtccaatcggtgccgaagcagatgaaaaccagactgttgaagaaatgaaggtggagcagtatgggcctcaaactacgccacgtggagaactggttcccgatccggaacctgagctaatcgactctactaaactaatcgaagtacaggttgtcctaatccttgcctactgttccattattctcctgggcgtcattgggaactcattagtgatccatgtggttatcaaatttaaatccatgcgtaccgtgacaaatttctttatagccaatttagccgtggccgaccttctcgtcaacacactttgcctgcctttcactttgacatacacccttatgggagaatggaaaatgggacccgttctgtgccacctcgtaccatacgctcagggtctcgctgtgcaagtaagcacaataacactgacggtgatagctttggatagacaccggtgcatcgtgtatcacctcgaaagcaaaattagcaagcgcatcagctttctgatcatcggcctggcatggggtataagcgccctgttggcatcaccacttgccattttccgggagtacagtctgattgaaattatacccgatttcgaaattgttgcatgcactgagaaatggcccggagaagaaaaatcaatctatggcacagtgtactccctgtcctccctactgatcctgtatgtgctgcccctggggattatctccttttcgtatactcggatatggagcaaactgaagaatcatgtgagcccgggggccgccaacgaccactaccaccaacgccgacagaagacaaccaaaatgctggtatgtgtagtggtagtattcgctgtatcatggttgccattacatgcttttcaactggcggttgatatcgattcccaggtcctggacctgaaagaatataaattgatttttaccgtgttccacataatagccatgtgtagtacatttgctaatccacttctgtatggttggatgaattctaattaccggaaagcattcctgtcggccttcagatgcgagcagcggctggacgccatacacagcgaagtaagcgttaccttcaaggccaagaagaatctggaggttcggaagaattccggtcccaacgattcgtttaccgaagccacaaatgtatag

SEQ ID NO: 17057 - DNA, 1146 bp, Artificial Sequence
  derived and/or modified sequence
atgggccccatcggggctgaggctgatgagaaccagacagtggaggagatgaaggtggagcagtatggcccccagaccaccccaagaggagagctggtgcctgaccctgagcctgagctgattgacagcaccaagctgattgaggtgcaggtggtgctgatcctggcctactgcagcatcatcctgctgggcgtcatcggcaacagcctggtgattcatgtggtgatcaagttcaagtccatgaggacagtgaccaacttcttcatcgccaacctggccgtggccgacctgctggtgaacaccctgtgcctgcccttcaccctgacctacaccctgatgggagagtggaagatgggccctgtgctgtgccacctggtgccctatgcccagggcctggccgtgcaggtgtccaccatcaccctgaccgtcatcgccctggacagacaccgctgcatcgtgtaccacctggagagcaagatcagcaagaggatctccttcctgatcatcggcctggcctggggcatcagcgccctgctggccagccccctggccatcttccgggagtacagcctcatcgagatcatcccagactttgagatcgtggcctgcacagagaagtggccaggagaggagaagagcatctatggaacagtgtacagcctgagcagcctgctgatcctgtatgtgctgcccctgggcatcatctccttctcctacacccgcatctggagcaagctgaagaaccacgtgtcccctggggccgccaatgaccactaccaccagaggcggcagaagaccaccaagatgctggtgtgtgtggtggtggtgtttgctgtgtcctggctgcccctgcacgccttccagctggccgtggacatcgacagccaggtgctggacctgaaggagtacaagctgatcttcaccgtcttccacatcatcgccatgtgcagcacctttgccaaccccctgctgtatggctggatgaacagcaactacaggaaggccttcctgagcgccttccgctgtgagcagaggctggatgccatccacagcgaggtgtctgtgaccttcaaggccaagaagaacctggaggtgaggaagaacagcggccccaatgacagcttcacagaggccaccaacgtgtag

SEQ ID NO: 17058 - DNA, 1146 bp, Artificial Sequence
  derived and/or modified sequence
atgggccccatcggcgccgaggccgacgagaaccagaccgtggaggaaatgaaagtggagcaatacggcccacagacaactcctcggggggaactggttcccgatcctgagccggagttgatcgacagcactaagctgatcgaggtccaggtggtgctcatcctggcctattgtagtattattctgctgggggtaatcgggaactctttggtgatccatgtggtgataaagttcaagtcaatgaggaccgtaaccaattttttcatagctaatctggctgtagcggacctgttggttaataccctttgtctaccttttaccctgacttatacccttatgggggagtggaagatgggccccgtcctctgtcatctggtgccgtacgcccagggactggcagtgcaagtatctaccataaccctgacggtgatagccttggaccgccacagatgtatcgtctatcatttggagtctaaaatatctaaacgaatctctttcctgattatcgggctagcctggggaatttccgctctccttgcatcccccctggctatcttccgcgagtattcactgatcgagatcatcccagactttgaaatcgtggcatgtacagagaagtggccaggcgaggagaagagtatatatggtactgtgtactcactgtcctccctcctcatcctctacgtgctgcctcttggcattatctccttctcatatacacgcatctggagtaaattgaagaatcatgtcagccccggggctgctaacgaccactatcaccagagacgccagaaaaccaccaagatgctggtgtgtgtcgtcgtcgttttcgccgtgagctggctcccactacacgcttttcagctagctgttgacatcgactcccaggtcctcgatctcaaggagtacaaacttattttcactgtctttcacattatcgcaatgtgctcaacctttgccaatcccctgctgtatggctggatgaactccaactatcgaaaggccttcctgtctgcattccgctgtgaacagcgcctggacgcaatccattcggaggtctcagtgacctttaaggcgaaaaaaaatctggaagtgcgaaagaactcgggccccaatgatagcttcactgaagccaccaacgtctag

SEQ ID NO: 17059 - DNA, 1146 bp, Artificial Sequence
  derived and/or modified sequence
atgggccccatcggcgccgaggccgacgagaaccagaccgtggaggaaatgaaggtggagcagtatggaccacagaccacacctcggggagagctagttccagaccccgagcctgaactgattgatagtactaaattaatcgaggtacaagtcgttcttattctggcgtattgcagcatcatcctattgggcgtgattgggaattcccttgttatccatgtcgtcattaagttcaagtccatgcgcacggttaccaatttttttatcgccaacttagcagtggcagatctgttggtgaacacactgtgcttacctttcaccctaacatatacgctcatgggagagtggaaaatggggcccgtactgtgccatctcgtcccctatgcccaaggcctcgccgtgcaggtatctactattaccctgactgtcattgcccttgatcggcaccgctgtatcgtctaccacctggagtctaaaatctctaagagaatctccttccttatcatcgggctggcatgggggatatctgcactgttagcctcacccctcgcaatcttccgcgaatatagcttaatcgagatcatcccagatttcgagatcgtggcctgtacagagaagtggcctggagaagagaaaagtatctacggcacggtttactctctgagctcattgctcatactttatgtgctgccactcggtatcatctccttttcctacacccgtatctggtccaagctgaagaaccatgtttcaccgggggcagccaatgatcattaccatcagagacgtcagaagacgacgaaaatgctggtatgcgtcgttgtggtgttcgccgtctcctggcttccgctgcatgcttttcaattggccgtagatattgatagtcaggtgctcgatctcaaggagtataagcttatctttacagtgtttcatattattgccatgtgctccacgtttgctaatccactgctgtatggctggatgaattctaattaccggaaggcctttctctccgcttttcgttgcgagcagcgtctcgacgctatacattcagaagtctccgtgaccttcaaggctaaaaagaatcttgaggtacggaaaaatagcggaccaaacgactccttcacagaggcgacaaacgtttag

SEQ ID NO: 17060 - DNA, 3626 bp, Artificial Sequence
  derived and/or modified sequence
ggcggctgagagaccctggacactgttcctgctccctcgccaccaaaacttctcctccagtcccctcccctgcaggaccatcgcccgcagcctctgcacctgttttcttgtgtttaagggtggggtttgcccccctccccacgctcccatctctgatcctcccaccttcacccgcccaccccgcgagtgagtgcggtgcccaggcgcgcttggcctgagaggtcggcagcagacccggcagcgccaaccgcccagccgctctgactgctccggctgcccgcccgcgcggcgcgggctgtcctggaccctaggaggggacggaaccggacttgcctttgggcaccttccagggccctctccaggtcggctggctaatcatcggacagacggactgcacacatcttgtttccgcgtctccgcaaaaacgcgaggtccaggtcagttgtagactcttgtgctggttgcaggccaagtggacctgtactgaaaatgggtccaataggtgcagaggctgatgagaaccagacagtggaagaaatgaaggtggaacaatacgggccacaaacaactcctagaggtgaactggtccctgaccctgagccagagcttatagatagtaccaagctgattgaggtacaagttgttctcatattggcctactgctccatcatcttgcttggggtaattggcaactccttggtgatccatgtggtgatcaaattcaagagcatgcgcacagtaaccaactttttcattgccaatctggctgtggcagatcttttggtgaacactctgtgtctaccgttcactcttacctataccttaatgggggagtggaaaatgggtcctgtcctgtgccacctggtgccctatgcccagggcctggcagtacaagtatccacaatcaccttgacagtaattgccctggaccggcacaggtgcatcgtctaccacctagagagcaagatctccaagcgaatcagcttcctgattattggcttggcctggggcatcagtgccctgctggcaagtcccctggccatcttccgggagtattcgctgattgagatcatcccggactttgagattgtggcctgtactgaaaagtggcctggcgaggagaagagcatctatggcactgtctatagtctttcttccttgttgatcttgtatgttttgcctctgggcattatatcattttcctacactcgcatttggagtaaattgaagaaccatgtcagtcctggagctgcaaatgaccactaccatcagcgaaggcaaaaaaccaccaaaatgctggtgtgtgtggtggtggtgtttgcggtcagctggctgcctctccatgccttccagcttgccgttgacattgacagccaggtcctggacctgaaggagtacaaactcatcttcacagtgttccacatcatcgccatgtgctccacttttgccaatccccttctctatggctggatgaacagcaactacagaaaggctttcctctcggccttccgctgtgagcagcggttggatgccattcactctgaggtgtccgtgacattcaaggctaaaaagaacctggaggtcagaaagaacagtggccccaatgactctttcacagaggctaccaatgtctaaggaagctgtggtgtgaaaatgtatggatgaattctgaccagagctatgaatctggttgatggcggctcacaagtgaaaactgatttcccattttaaagaagaagtggatctaaatggaagcatctgctgtttaattcctggaaaactggctgggcagagcctgtgtgaaaatactggaattcaaagataaggcaacaaaatggtttacttaacagttggttgggtagtaggttgcattatgagtaaaagcagagagaagtacttttgattattttcctggagtgaagaaaacttgaacaagaaattggtattatcaaagcattgctgagagacggtgggaaaataagttgactttcaaatcacgttaggacctggattgaggaggtgtgcagttcgctgctccctgcttggcttatgaaaacaccactgaacagaaatttctccagggagccacaggctctccttcatcgcattttgatttttttgttcattctctagacaaaatccatcagggaatgctgcaggaaacgattgccaactatacgaatggcttcgaggagataaactgaaatttgctatataattaatattttggcagatgataggggaactcctcaacactcagtgggccaattgttcttaaaaccaattgcacgtttggtgaaagtttcttcaactctgaatcaaaagctgaaattctcagaattacaggaaatgcaaaccatcatttaatttctaatttcaagttacatccgctttatggagatactatttagataacaagaatacaacttgatacttttattgttatacctttttgaacatgtatgatttctgttgttattcctattggagctaagtttgtctacactaaaatttaaatcagactagagaataatttttgtggcatgttgtaacatttcacagtatttacaagctatttttgcacaggtacatagctctcatgtatttaaagaacactgcagtgttattttctttgaaattcatcctccacggacccattcatactaaataaaacaatgtaattacattaaaatggacctatctgtaagaggtactaaaaacactggattcatttcatcttgcaaatgttgtatttcaaaccagtttcacataagttatttgtcttcttttcaaaataattagctatatttttatataatatgaatatatacataaaaattgtttctataaattgtagaacatagatgctacagtattttttatttaattatattatgaataaaattgttatttcaatagtacccaaccaaagatgcttaaaaaccttctatgttcataaaaaataacaactgagatgttaaaatagtcatacgtctttagatgctattaaagtttcattagtcatatttttgtaaatatgacagaatttgtgaatatatttttaaagcaaaaaacttcaacatgcatatgatatatagttacaacattaattttatgaactggagagctttactttgtggatatatttaaaattcatattatagctcctattaaattccttccatgatagatataaaggactggtttttaagtgcactgcacttctggaatactgaaaaagaatgaaaacaatatgttagattaggtgtaagactttaagaagcgaacaaaaagtaatgtatatctgtaatatataatcaaatgattcatttttctgttagactaggcaaattgttcaaaaataacctttttgtcttttaagtagcagtcactttgcttaagatgctaatagaaaactgtggttaaagatttaccctccctcttggtgaattattacactgtaagaaatgtatatgctactgtgttacatgttgtattagtaaattattagaatccaattaatgattcaattaacatatatcttatccaattcattatgtcaattcattaataaaataccttttatgtagaggctttatgttgcaattaaaaagttgggaaaatga

SEQ ID NO: 17061 - DNA, 3518 bp, Artificial Sequence
  derived and/or modified sequence
cttgtgtttaagggtggggtttgcccccctccccacgctcccatctctgatcctcccaccttcacccgcccaccccgcgagtgagtgcggtgcccaggcgcgcttggcctgagaggtcggcagcagacccggcagcgccaaccgcccagccgctctgactgctccggctgcccgcccgcgcggcgcgggctgtcctggaccctaggaggggacggaaccggacttgcctttgggcaccttccagggccctctccaggtcggctggctaatcatcggacagacggactgcacacatcttgtttccgcgtctccgcaaaaacgcgaggtccaggttgtagactcttgtgctggttgcaggccaagtggacctgtactgaaaatgggtccaataggtgcagaggctgatgagaaccagacagtggaagaaatgaaggtggaacaatacgggccacaaacaactcctagaggtgaactggtccctgaccctgagccagagcttatagatagtaccaagctgattgaggtacaagttgttctcatattggcctactgctccatcatcttgcttggggtaattggcaactccttggtgatccatgtggtgatcaaattcaagagcatgcgcacagtaaccaactttttcattgccaatctggctgtggcagatcttttggtgaacactctgtgtctaccgttcactcttacctataccttaatgggggagtggaaaatgggtcctgtcctgtgccacctggtgccctatgcccagggcctggcagtacaagtatccacaatcaccttgacagtaattgccctggaccggcacaggtgcatcgtctaccacctagagagcaagatctccaagcgaatcagcttcctgattattggcttggcctggggcatcagtgccctgctggcaagtcccctggccatcttccgggagtattcgctgattgagatcatcccggactttgagattgtggcctgtactgaaaagtggcctggcgaggagaagagcatctatggcactgtctatagtctttcttccttgttgatcttgtatgttttgcctctgggcattatatcattttcctacactcgcatttggagtaaattgaagaaccatgtcagtcctggagctgcaaatgaccactaccatcagcgaaggcaaaaaaccaccaaaatgctggtgtgtgtggtggtggtgtttgcggtcagctggctgcctctccatgccttccagcttgccgttgacattgacagccaggtcctggacctgaaggagtacaaactcatcttcacagtgttccacatcatcgccatgtgctccacttttgccaatccccttctctatggctggatgaacagcaactacagaaaggctttcctctcggccttccgctgtgagcagcggttggatgccattcactctgaggtgtccgtgacattcaaggctaaaaagaacctggaggtcagaaagaacagtggccccaatgactctttcacagaggctaccaatgtctaaggaagctgtggtgtgaaaatgtatggatgaattctgaccagagctatgaatctggttgatggcggctcacaagtgaaaactgatttcccattttaaagaagaagtggatctaaatggaagcatctgctgtttaattcctggaaaactggctgggcagagcctgtgtgaaaatactggaattcaaagataaggcaacaaaatggtttacttaacagttggttgggtagtaggttgcattatgagtaaaagcagagagaagtacttttgattattttcctggagtgaagaaaacttgaacaagaaattggtattatcaaagcattgctgagagacggtgggaaaataagttgactttcaaatcacgttaggacctggattgaggaggtgtgcagttcgctgctccctgcttggcttatgaaaacaccactgaacagaaatttctccagggagccacaggctctccttcatcgcattttgatttttttgttcattctctagacaaaatccatcagggaatgctgcaggaaacgattgccaactatacgaatggcttcgaggagataaactgaaatttgctatataattaatattttggcagatgataggggaactcctcaacactcagtgggccaattgttcttaaaaccaattgcacgtttggtgaaagtttcttcaactctgaatcaaaagctgaaattctcagaattacaggaaatgcaaaccatcatttaatttctaatttcaagttacatccgctttatggagatactatttagataacaagaatacaacttgatacttttattgttatacctttttgaacatgtatgatttctgttgttattcctattggagctaagtttgtctacactaaaatttaaatcagactagagaataatttttgtggcatgttgtaacatttcacagtatttacaagctatttttgcacaggtacatagctctcatgtatttaaagaacactgcagtgttattttctttgaaattcatcctccacggacccattcatactaaataaaacaatgtaattacattaaaatggacctatctgtaagaggtactaaaaacactggattcatttcatcttgcaaatgttgtatttcaaaccagtttcacataagttatttgtcttcttttcaaaataattagctatatttttatataatatgaatatatacataaaaattgtttctataaattgtagaacatagatgctacagtattttttatttaattatattatgaataaaattgttatttcaatagtacccaaccaaagatgcttaaaaaccttctatgttcataaaaaataacaactgagatgttaaaatagtcatacgtctttagatgctattaaagtttcattagtcatatttttgtaaatatgacagaatttgtgaatatatttttaaagcaaaaaacttcaacatgcatatgatatatagttacaacattaattttatgaactggagagctttactttgtggatatatttaaaattcatattatagctcctattaaattccttccatgatagatataaaggactggtttttaagtgcactgcacttctggaatactgaaaaagaatgaaaacaatatgttagattaggtgtaagactttaagaagcgaacaaaaagtaatgtatatctgtaatatataatcaaatgattcatttttctgttagactaggcaaattgttcaaaaataacctttttgtcttttaagtagcagtcactttgcttaagatgctaatagaaaactgtggttaaagatttaccctccctcttggtgaattattacactgtaagaaatgtatatgctactgtgttacatgttgtattagtaaattattagaatccaattaatgattcaattaacatatatcttatccaattcattatgtcaattcattaataaaataccttttatgtagaggctttatgttgcaattaaaaagttgggaaaatgaga

SEQ ID NO: 17062 - DNA, 1146 bp, Artificial Sequence
  derived and/or modified sequence
atgggcccaattggcgctgaagccgacgaaaatcagactgtggaggaaatgaaagtggagcaatatggaccgcagacgacaccaagaggcgagcttgtaccagatcccgaaccagagctcatcgatagtacaaagctgatcgaggtgcaggtggtattaatcctggcatattgtagtatcatcctgctcggagtcattgggaacagtttagtaattcacgttgtcatcaagtttaaatccatgaggaccgtgactaatttcttcatcgcgaatctggctgtggctgatctgcttgtaaatacactctgcctgccctttacactgacatatacactgatgggagagtggaagatgggaccggttttgtgtcatttagtgccttacgcacagggattagccgttcaggtgagcacgatcactctgacagtgattgccctcgacagacacagatgcatcgtgtaccatttagagagcaagatttcaaagagaatatccttcctgatcatcggcttagcatggggaatatcagccctccttgcatcacctttggccatcttcagggaatattctttaattgagatcatccctgactttgaaatcgtggcctgcactgaaaaatggccaggcgaggaaaagagtatctacgggactgtctacagtcttagctcattgctcatcctatacgtcttgcccctcgggattatcagtttttcatatactcggatctggtccaagctgaaaaaccacgtgtcaccaggagccgctaacgaccactatcaccaaagaagacagaagaccaccaaaatgttggtgtgcgtggtagtggtcttcgcggtgagttggttaccattgcacgccttccagcttgcagtcgacattgatagccaggtccttgacttgaaggagtataagctgatttttactgtgttccatataattgcaatgtgcagcacgtttgccaatccactgttgtatggatggatgaactctaactaccgcaaggcattcctctcggccttccgctgtgagcaaaggctcgatgctattcactcagaggtgtccgtcactttcaaggcgaaaaaaaatctggaagtgcggaaaaatagcggaccaaacgacagtttcacagaagccaccaacgtgtag

SEQ ID NO: 17063 - DNA, 1146 bp, Artificial Sequence
  derived and/or modified sequence
atgggtccaattggagccgaagctgacgaaaatcagacggttgaggaaatgaaagtagagcagtatgggccacagacaacgccccgaggggaactggtgccagaccctgagccagagttaatcgattccacaaagcttatcgaagtgcaagttgtcctgatcctggcgtattgcagcattatactcctgggggtaatcggtaatagccttgtgattcacgttgtcataaagttcaaatcaatgcgtacggtcaccaacttcttcatcgccaatctggcggtggcagaccttctggtaaacacactctgtctaccgtttaccctgacttacactctgatgggcgagtggaaaatgggtcctgtgctgtgccatctggtgccatatgctcagggcctcgcggtgcaggtatccaccattactttgactgtgattgcgctggaccgacaccgatgcattgtgtaccatctagagtctaaaatctcgaaacgtatttcatttctgattattggactggcgtgggggatttcggcattgctagccagtcctctggctatcttcagggaatactccttgatcgaaatcatacccgacttcgaaatagtggcctgtaccgaaaagtggccaggagaggagaagagtatctacggcaccgtatacagcctgtcatcactgctgattctctacgtactccccctgggcattatttcattctcatacacccgtatctggtctaagcttaagaaccacgtctcgcctggggctgccaacgatcattatcatcaacggagacagaagactaccaagatgctggtttgcgttgtcgtcgtattcgcggtgtcctggctccctctgcatgcctttcagctggctgttgatatcgattcgcaggttctggatcttaaagagtacaagctgattttcacagtttttcacattatcgctatgtgcagcacctttgcgaaccccctcttgtatggctggatgaattctaattaccggaaggcttttctgtctgcattcagatgtgagcagcgtctggacgcaattcacagcgaggtctcagtcacctttaaggctaaaaagaatctggaggtccgaaaaaactccggcccaaatgatagttttactgaagccaccaatgtttag

SEQ ID NO: 17064 - DNA, 1146 bp, Artificial Sequence
  derived and/or modified sequence
atgggccccatcggcgccgaggccgacgagaaccagaccgtggaggagatgaaggtggagcagtacggcccccagaccacccccagaggcgagctggtgcccgaccccgagcccgagctgatcgacagcaccaagctgatcgaggtgcaggtggtgctgatcctggcctactgcagcatcatcctgctgggcgtgatcggcaacagcctggtgatccacgtggtgatcaagttcaagagcatgagaaccgtgaccaacttcttcatcgccaacctggccgtggccgacctgctggtgaacaccctgtgcctgcccttcaccctgacctacaccctgatgggcgagtggaagatgggccccgtgctgtgccacctggtgccctacgcccagggcctggccgtgcaggtgagcaccatcaccctgaccgtgatcgccctggacagacacagatgcatcgtgtaccacctggagagcaagatcagcaagagaatcagcttcctgatcatcggcctggcctggggcatcagcgccctgctggccagccccctggccatcttcagagagtacagcctgatcgagatcatccccgacttcgagatcgtggcctgcaccgagaagtggcccggcgaggagaagagcatctacggcaccgtgtacagcctgagcagcctgctgatcctgtacgtgctgcccctgggcatcatcagcttcagctacaccagaatctggagcaagctgaagaaccacgtgagccccggcgccgccaacgaccactaccaccagagaagacagaagaccaccaagatgctggtgtgcgtggtggtggtgttcgccgtgagctggctgcccctgcacgccttccagctggccgtggacatcgacagccaggtgctggacctgaaggagtacaagctgatcttcaccgtgttccacatcatcgccatgtgcagcaccttcgccaaccccctgctgtacggctggatgaacagcaactacagaaaggccttcctgagcgccttcagatgcgagcagagactggacgccatccacagcgaggtgagcgtgaccttcaaggccaagaagaacctggaggtgagaaagaacagcggccccaacgacagcttcaccgaggccaccaacgtgtag

SEQ ID NO: 17065 - DNA, 1143 bp, Artificial Sequence
  derived and/or modified sequence
atggacagcccaatccaaattttcagaggtgaacccggccctacctgtgcgcccagtgcttgtctaccacccaatagtagcgcctggtttcccgggtgggcggagcctgattcgaatggctccgccggctccgaagacgcacagctcgagccagcccacatcagtcctgctattcctgtcattatcactgccgtgtacagcgtcgtttttgtcgtcggattagtgggcaatagcctcgttatgttcgtgatcattcggtatacaaagatgaagactgccactaatatttacatcttcaatctggctctggccgacgctctggtgaccacgaccatgccatttcagtcaactgtgtatctgatgaatagttggccttttggggacgtgctttgcaagatcgtgatctctattgattattacaacatgttcactagcatctttaccctgactatgatgtccgtggacaggtatattgctgtgtgtcatcctgtgaaggccctggacttccgaaccccattgaaggccaagatcattaacatatgtatttggttgctgtcaagctctgtcggaatttcagctatcgtcctcggggggactaaggtgcgtgaggacgttgacgtgatcgagtgctcgcttcagtttccagatgatgattactcctggtgggacctgtttatgaaaatttgcgtgtttatctttgccttcgtaatccccgtattgattatcatagtgtgctacaccctgatgatcctgcgtctgaaatctgtccgactgctgtctggaagccgcgagaaagacaggaacctccggagaatcactagactcgtcttagttgtggtcgctgtcttcgtggtttgctggacaccaattcatatctttatcctcgtggaagccctcggctccacctcacactctacagctgccctgtcttcatactatttttgcatcgctctgggttatacaaatagcagcctgaacccgatcctgtatgcattcctcgatgaaaacttcaagaggtgttttcgggacttttgcttcccactgaagatgcggatggagcgccaatccactagccgggtccgcaacacagttcaagaccctgcttatcttagagatattgacggtatgaataaacctgtatag

SEQ ID NO: 17066 - DNA, 1101 bp, Artificial Sequence
  derived and/or modified sequence
atggatagcccaattcaaatttttaggggggaacctggtcctacatgtgccccgtccgcttgcctgccccccaacagctccgccgggtccgaagacgctcaactggaacccgcccacatttcgcctgctattcctgtgatcatcaccgcagtttacagtgtggtgtttgtggtcggtttggtgggtaacagtctcgtgatgtttgtcattatccgctacaccaagatgaaaacagccaccaacatttacatattcaatttggccctcgccgacgccttagtgactactacaatgccgttccaatccacggtgtatctcatgaactcctggcccttcggggacgttctgtgtaagatcgttatatctattgactattataacatgtttacttcaattttcacactaaccatgatgtctgtggatcgctatatcgcagtctgccatccggtaaaggctctggacttccggactcccctcaaagctaaaataattaacatatgtatctggctcctttcctcttcggtagggataagcgcaattgtgctgggaggcacgaaagtccgtgaggatgtggatgtgattgaatgctccttacagtttccagacgacgattacagctggtgggatctgttcatgaaaatttgtgtgttcatcttcgccttcgttataccagttctaatcatcatcgtgtgttatacattaatgattctccgcttaaaaagtgttagactgttgtcggggtcccgcgagaaggatagaaatctgcggcgcataactcgcctggttctggtcgtcgtcgctgtgtttgtcgtgtgctggacccctatccacatcttcattttggtagaggccctcgggtctacatcgcacagcacggcagctctcagttcttattatttttgcatcgcacttgggtataccaattcatccttaaaccctattttatacgcgtttctggacgagaatttcaaaagatgcttcagggatttttgctttcctctcaagatgcggatggagcgtcagtccacatctagagttcgaaatacagtgcaggacccagcctatctgcgcgacatcgatggaatgaacaagccagtctag

SEQ ID NO: 17067 - DNA, 1143 bp, Artificial Sequence
  derived and/or modified sequence
atggactctccgatccagatcttcagaggggagcccggacccacatgcgctccctctgcttgcctcccacccaatagcagcgcttggtttccaggctgggccgagcccgattctaatgggagtgcagggagtgaggacgctcagctggagcctgctcacatttcccccgctattccagtgattatcacggcagtctacagtgttgtttttgtagttggtttagttggtaacagcctggttatgttcgtgattatccggtacacaaagatgaaaacagcgacaaacatttatatcttcaatctcgctctcgcagacgctcttgtgaccacgactatgccgtttcaatccaccgtgtacctgatgaattcatggcccttcggggacgtgctgtgtaagatagtgatctcaattgactattacaatatgttcacaagtatctttacgttgaccatgatgtcagtggaccgatacattgcagtttgccatcctgtgaaagccttggatttcaggacccctttgaaagccaagattattaatatttgcatctggcttttgtccagctcagtcggaatcagcgcgattgtgctaggggggactaaggtccgggaagacgtcgatgtcatagagtgtagcctgcagtttccggatgacgattatagctggtgggacctctttatgaagatatgcgtattcatcttcgccttcgttatccccgtgcttattattattgtgtgctacactctgatgattctgcggctcaaaagtgttcgactgctttccggaagtcgtgaaaaggatagaaatctccgaagaattacaaggctggtcctggtggtcgttgcggtgttcgtagtttgttggacccccattcacattttcatattggtagaggctcttggaagcacatcacacagcactgccgccctgtccagctattatttctgcatagccttaggctacaccaatagtagtctcaaccccattctctacgcctttctggatgaaaacttcaagcggtgtttcagagatttctgctttccattaaagatgcggatggagcgccagagcacctccagggtgcgcaacacagtgcaggatcccgcgtaccttagagacatagatggcatgaacaaacctgtctag

SEQ ID NO: 17068 - DNA, 1143 bp, Artificial Sequence
  derived and/or modified sequence
atggacagccccatccagatcttccggggggagcccggccccacctgtgcccccagcgcctgcctgccccccaacagcagcgcctggttccctggctgggccgagccagacagcaatggatctgctggctctgaagatgcccagctggagcccgcccacatcagccctgccatccctgtgatcatcacagctgtgtacagcgtggtgtttgtggtgggcctggtgggcaacagcctggtgatgtttgtgatcatccgctacaccaagatgaagacagccaccaacatctacatcttcaacctggccctggctgatgccctggtgaccaccaccatgcccttccagagcacagtgtacctgatgaacagctggccctttggagatgtgctgtgcaagatcgtcatcagcattgactactacaacatgttcaccagcatcttcaccctgaccatgatgtctgtggaccgctacatcgctgtgtgccaccctgtgaaggccctggacttccgcacccccctgaaggccaagatcatcaacatctgcatctggctgctgagcagctctgtgggcatcagcgccatcgtgctgggcggcaccaaggtgagagaagatgtggatgtgattgaatgttccctgcagttcccagatgatgactacagctggtgggacctcttcatgaagatctgtgtgttcatctttgcctttgtgattcctgtgctgatcatcatcgtgtgctacaccctgatgatcctgcggctgaagtctgtgcggctgctgagcggcagccgggagaaggacaggaacctgcggcgcatcacccggctggtgctggtggtggtggccgtgtttgtggtgtgctggacccccatccacatcttcatcctggtggaggccctgggcagcaccagccacagcacagctgccctgagcagctactacttctgcatcgccctgggctacaccaacagcagcctgaaccccatcctgtatgccttcctggatgagaacttcaagcgctgcttccgggacttctgcttccccctgaagatgaggatggagcggcagagcaccagccgggtgaggaacacagtgcaggaccctgcctacctgcgggacattgatggcatgaacaagcctgtgtag

SEQ ID NO: 17069 - DNA, 1101 bp, Artificial Sequence
  derived and/or modified sequence
atggacagccccatccagatcttccggggggagcccggccccacctgtgcccccagcgcctgcctgccccccaacagcagcgctggctctgaagatgcccagctggagcccgcccacatcagccctgccatccctgtgatcatcacagctgtgtacagcgtggtgtttgtggtgggcctggtgggcaacagcctggtgatgtttgtgatcatccgctacaccaagatgaagacagccaccaacatctacatcttcaacctggccctggctgatgccctggtgaccaccaccatgcccttccagagcacagtgtacctgatgaacagctggccctttggagatgtgctgtgcaagatcgtcatcagcattgactactacaacatgttcaccagcatcttcaccctgaccatgatgtctgtggaccgctacatcgctgtgtgccaccctgtgaaggccctggacttccgcacccccctgaaggccaagatcatcaacatctgcatctggctgctgagcagctctgtgggcatcagcgccatcgtgctgggcggcaccaaggtgagagaagatgtggatgtgattgaatgttccctgcagttcccagatgatgactacagctggtgggacctcttcatgaagatctgtgtgttcatctttgcctttgtgattcctgtgctgatcatcatcgtgtgctacaccctgatgatcctgcggctgaagtctgtgcggctgctgagcggcagccgggagaaggacaggaacctgcggcgcatcacccggctggtgctggtggtggtggccgtgtttgtggtgtgctggacccccatccacatcttcatcctggtggaggccctgggcagcaccagccacagcacagctgccctgagcagctactacttctgcatcgccctgggctacaccaacagcagcctgaaccccatcctgtatgccttcctggatgagaacttcaagcgctgcttccgggacttctgcttccccctgaagatgaggatggagcggcagagcaccagccgggtgaggaacacagtgcaggaccctgcctacctgcgggacattgatggcatgaacaagcctgtgtag

SEQ ID NO: 17070 - DNA, 1143 bp, Artificial Sequence
  derived and/or modified sequence
atggacagccccatccagatcttccggggcgagcccggccccacctgtgccccttccgcctgcttacctcccaactcctctgcctggttcccaggctgggccgagccagattccaacgggtcagcagggagcgaagatgcccaacttgaacccgcacacatctccccagcgattcctgtgattatcacggcggtgtactcagttgtttttgtagtgggactggtaggtaacagcctcgtgatgttcgtgattattaggtacacaaaaatgaagactgccactaacatctatatctttaatctggcattggcggatgccctcgtgaccactactatgccgtttcaatctacagtgtatctgatgaattcatggcctttcggagacgtattgtgtaagatagtcatttccatagactattacaatatgtttaccagcatcttcactctgactatgatgtccgtagaccgctatattgctgtgtgtcacccagtcaaggcactcgatttcaggacacctttgaaagccaaaattatcaatatctgcatttggctgctcagctccagcgtcggtatcagcgcgattgtcctaggcggaactaaggtgcgcgaggatgtggatgtgatcgaatgtagcttgcagtttcccgacgacgattacagttggtgggacctgtttatgaaaatttgtgtgttcatctttgcctttgtaataccagtcctcatcatcatcgtctgctataccctgatgatactgcgtctcaagagtgtgcgcctcctgtccggcagccgcgaaaaggacaggaacctgaggaggattactcgactggtgctggtggttgttgcagttttcgtcgtatgctggacgcccatccacatctttatcctggttgaggccctgggctccacaagccactctaccgcagccctctcatcatattacttttgcatagccctcggatacacaaattcatccctgaatccaatcctgtacgcttttcttgatgaaaattttaaacggtgttttcgggatttctgcttcccgctgaagatgagaatggaaaggcagtctacgagtcgagtgaggaatacagtgcaggacccagcctatcttagggacatcgacggtatgaacaagccagtctag

SEQ ID NO: 17071 - DNA, 1101 bp, Artificial Sequence
  derived and/or modified sequence
atggacagccccatccagatcttccggggcgagcccggccccacctgtgccccatccgcgtgcctgcccccaaattcatctgcgggatccgaggacgcccaactggaaccagcacatatcagccccgctatacctgtcatcatcactgccgtctacagcgtggtgtttgtcgttggcctggtcgggaactcactggtgatgttcgtaataatcaggtataccaagatgaagaccgctaccaatatctacatattcaatttagccttagccgacgccctcgtaacaactaccatgcctttccagagcaccgtttacctaatgaacagctggcctttcggcgatgtactctgcaagatagtaatatccattgattactataatatgtttacctccatcttcaccctgacaatgatgagtgttgatcgatacattgccgtatgccaccctgtcaaggccttagactttaggacaccgcttaaagccaagattattaatatctgcatctggttacttagttcaagtgttggcatctctgccattgtgctaggcggtacgaaggtgagagaggatgtcgatgtcatagagtgttccctgcagtttcctgacgacgattactcttggtgggatctctttatgaaaatttgtgttttcatttttgcatttgttatccctgtattgattattatcgtctgctacacactgatgatcctgagacttaaatctgtccgcctgctcagtggtagcagggagaaagacaggaacctgcggcgaatcacccgccttgttctggtagtggtggccgtgttcgtggtgtgctggactcctatacatatttttatcctggtggaggcgcttgggtcaacctctcatagtacagccgcattatcatcctattatttctgtatcgccctggggtacaccaactcatctctgaaccccattttgtacgccttcctggatgagaattttaaaagatgcttcagggatttctgtttcccccttaagatgagaatggagcggcaatccacttccagggttcggaacacagtccaggacccggcataccttagggacattgatgggatgaataaaccagtctag

SEQ ID NO: 17072 - DNA, 1143 bp, Artificial Sequence
  derived and/or modified sequence
atggacagccccatccagatcttccggggcgagcccggccccacctgcgcccctagcgcctgtttgccacccaactcgtctgcatggttccctggctgggccgagccggattcgaatggaagcgcaggctcagaggacgcccagctcgagcccgcccacatttctcctgcgatcccggtcattatcactgcagtgtatagcgtggtgtttgtcgtcgggttagtgggaaactccctagtgatgtttgttatcattagatacactaaaatgaagacagccactaacatttatatatttaacctggctctggcagacgccctggtgacaaccactatgccattccagtcaacagtgtatctcatgaattcatggccgttcggggacgttttgtgcaagattgttatttcgatagattattacaacatgttcactagtatttttacactcacaatgatgagtgtggatagatatattgccgtctgccatccagtgaaggccctcgattttcgaacacccctgaaagcaaaaatcatcaatatctgcatctggctcttgagctcttccgtcggtatttcggccattgtgctggggggaacaaaggtgcgcgaggacgtggacgtcattgaatgttctctgcaatttcctgacgatgattacagctggtgggacctgttcatgaaaatttgcgttttcatcttcgcattcgtgatccccgtcttaatcatcattgtatgttacacattaatgattctgaggcttaaatctgtgcgtctgctttctggctcccgagagaaggataggaatctgagacgcatcactaggctggtgctggtggtggtggccgtgtttgttgtctgctggacacccattcacatcttcattctagttgaggctctcggcagcacttcacactcgacagccgccctctcctcatattatttctgcattgcgctcggctacaccaactccagcctcaaccctatcctttatgctttcttggacgagaattttaaacggtgtttccgggatttctgttttcctctcaaaatgcgcatggagagacagtctacctctcgcgtacgaaacactgtccaggacccagcataccttcgggatatcgacgggatgaacaagcccgtctag

SEQ ID NO: 17073 - DNA, 1143 bp, Artificial Sequence
  derived and/or modified sequence
atggactcccccatccagatcttccgcggagagccaggacccacatgcgcgccaagcgcttgcctgccgcctaattcctctgcctggttccctgggtgggcagagcctgactctaatgggagcgctggatcagaagacgctcagctggaaccggctcatatctctcccgcaattcctgtgatcataacagcagtgtatagcgtcgttttcgttgtgggcctcgtcggcaacagcctcgtaatgttcgtgattatacgatatacaaaaatgaagactgccaccaacatttacatttttaaccttgcactcgccgacgctctggtgactactactatgccctttcaatctacagtgtatctgatgaactcttggcccttcggcgacgtgctttgtaaaattgtaattagtatcgactattacaatatgtttacaagtatcttcacactgacaatgatgtcagtagaccggtacatagccgtgtgccaccccgtaaaagccttggatttccggacaccattaaaagccaaaatcatcaatatttgcatctggctgttatctagctcggttggaatcagcgccatcgtgctcggcggtacgaaggtgagggaggatgtcgacgtcatagaatgttccttgcagttccctgacgacgattattcttggtgggacctcttcatgaaaatatgtgtgttcatctttgcattcgtgatacccgtactcatcatcattgtgtgctacacgctgatgattctgagactgaagagtgtgaggttgctgagtgggtcgcgagaaaaagacagaaatctgcggagaattacccgactggtgctagtcgtagtagccgtgtttgtggtgtgctggacacccattcacattttcattctggtggaggcgttgggtagtacatctcattcaaccgccgctctgtcgagctattacttctgcattgcactggggtacactaactcaagtctgaacccaattttatatgcattcctcgatgagaactttaaaaggtgtttcagagacttttgttttccacttaaaatgcgcatggagaggcagtccaccagcagggtccggaataccgtccaggatcccgcataccttcgagatattgatggtatgaataagcccgtgtag

SEQ ID NO: 17074 - DNA, 1101 bp, Artificial Sequence
  derived and/or modified sequence
atggactctcctattcagatttttagaggcgagccagggccaacatgtgcaccttccgcctgcctaccacctaattcatccgctggatccgaggacgcccagctggagccagcccacataagccctgccatacctgtgataattacagcagtgtatagcgtagttttcgtcgtgggattagtgggcaattccttggtcatgtttgtcattattaggtacaccaagatgaaaacggccaccaacatttatatctttaacttggcccttgccgatgcacttgtgacaacaactatgccatttcagtcgacagtttacctgatgaattcctggcccttcggtgacgtgctgtgcaagatcgtgatcagcatagattattataatatgtttacctccatatttacgctcaccatgatgtccgttgaccggtatattgccgtctgtcaccccgtcaaggctttggacttccgaactccgctgaaggccaagataatcaatatctgcatctggctgctgtcttcctcagtgggaatttctgccattgttctggggggaactaaggttagggaagatgtggacgtcatcgaatgctcactccagtttcctgacgacgactacagttggtgggacctgttcatgaaaatttgcgtgtttatctttgcattcgtaatccccgtgctgatcatcattgtctgttatacactcatgattcttcggctcaaatctgttaggctgctcagtggctcccgcgaaaaagatagaaacctacgtcgcattactcgcctcgtactagtcgttgtagccgtgtttgtggtctgttggacccccatccacatattcatactggtggaagcgcttgggagtacatcgcattcaacagccgctctgagctcctattacttctgtattgcgctcggatatacaaatagctctctaaatcctatcttatatgcatttttagatgaaaactttaaacgatgcttccgtgacttttgctttccgctgaagatgcgtatggagaggcagtctacgtcccgggtacggaacaccgtgcaggatccagcctatctccgtgacatcgatggcatgaacaagccagtgtag

SEQ ID NO: 17075 - DNA, 1143 bp, Artificial Sequence
  derived and/or modified sequence
atggatagccccatccagatttttcggggtgagcccggtcccacctgcgcgccttcggcctgcctgcctcctaattcttctgcctggttcccaggatgggctgaaccagacagcaacggaagtgcaggttcagaagacgcccaactagagccggctcacatctcaccagccatacccgttattatcacagcagtgtactctgtggtgtttgtcgtgggcttggttggaaacagcctagtcatgtttgtgatcatacgctatactaaaatgaagactgccaccaatatctatatcttcaatctggctctagcagatgcgctggtgacgacaaccatgccatttcagagcacagtctacttgatgaatagttggccttttggagacgtgctgtgcaagatcgtgatcagcattgactactacaacatgttcaccagcatctttacattgaccatgatgagcgtggataggtatattgcagtctgccatcctgtgaaggcgctggacttccggacccccttgaaagccaagatcatcaacatctgtatctggctgttaagctcctccgtgggcatatccgcaattgttctcggtggcaccaaagtgcgcgaggacgtagatgtgattgagtgttcgctacagttcccagacgatgattactcctggtgggatctcttcatgaagatttgtgtctttatttttgccttcgtaatccctgtccttattattattgtatgctataccttgatgattctcagacttaaatcagtccggcttctaagtggtagcagagagaaggatagaaacctgcgcaggatcacccggttggtgcttgttgtggttgccgtgtttgtagtatgctggacacccatacatatctttattctcgttgaggcacttggaagcacctcacattctacagccgctctctccagttactacttttgtatcgccctgggatacactaactcctctctgaatcccattctgtacgcattccttgatgaaaacttcaagcggtgcttccgtgatttttgttttccactgaagatgaggatggagaggcaatctacatccagggtccggaacacagtccaggatccagcctatttgagagacatcgacggtatgaataagcctgtttag

SEQ ID NO: 17076 - DNA, 1143 bp, Artificial Sequence
  derived and/or modified sequence
atggacagccccatccagatcttcagaggcgagcccggccccacctgcgcccccagcgcctgcctgccccccaacagcagcgcctggttccccggctgggccgagcccgacagcaacggcagcgccggcagcgaggacgcccagctggagcccgcccacatcagccccgccatccccgtgatcatcaccgccgtgtacagcgtggtgttcgtggtgggcctggtgggcaacagcctggtgatgttcgtgatcatcagatacaccaagatgaagaccgccaccaacatctacatcttcaacctggccctggccgacgccctggtgaccaccaccatgcccttccagagcaccgtgtacctgatgaacagctggcccttcggcgacgtgctgtgcaagatcgtgatcagcatcgactactacaacatgttcaccagcatcttcaccctgaccatgatgagcgtggacagatacatcgccgtgtgccaccccgtgaaggccctggacttcagaacccccctgaaggccaagatcatcaacatctgcatctggctgctgagcagcagcgtgggcatcagcgccatcgtgctgggcggcaccaaggtgagagaggacgtggacgtgatcgagtgcagcctgcagttccccgacgacgactacagctggtgggacctgttcatgaagatctgcgtgttcatcttcgccttcgtgatccccgtgctgatcatcatcgtgtgctacaccctgatgatcctgagactgaagagcgtgagactgctgagcggcagcagagagaaggacagaaacctgagaagaatcaccagactggtgctggtggtggtggccgtgttcgtggtgtgctggacccccatccacatcttcatcctggtggaggccctgggcagcaccagccacagcaccgccgccctgagcagctactacttctgcatcgccctgggctacaccaacagcagcctgaaccccatcctgtacgccttcctggacgagaacttcaagagatgcttcagagacttctgcttccccctgaagatgagaatggagagacagagcaccagcagagtgagaaacaccgtgcaggaccccgcctacctgagagacatcgacggcatgaacaagcccgtgtag

SEQ ID NO: 17077 - DNA, 1101 bp, Artificial Sequence
  derived and/or modified sequence
atggacagccccatccagatcttcagaggcgagcccggccccacctgcgcccccagcgcctgcctgccccccaacagcagcgccggcagcgaggacgcccagctggagcccgcccacatcagccccgccatccccgtgatcatcaccgccgtgtacagcgtggtgttcgtggtgggcctggtgggcaacagcctggtgatgttcgtgatcatcagatacaccaagatgaagaccgccaccaacatctacatcttcaacctggccctggccgacgccctggtgaccaccaccatgcccttccagagcaccgtgtacctgatgaacagctggcccttcggcgacgtgctgtgcaagatcgtgatcagcatcgactactacaacatgttcaccagcatcttcaccctgaccatgatgagcgtggacagatacatcgccgtgtgccaccccgtgaaggccctggacttcagaacccccctgaaggccaagatcatcaacatctgcatctggctgctgagcagcagcgtgggcatcagcgccatcgtgctgggcggcaccaaggtgagagaggacgtggacgtgatcgagtgcagcctgcagttccccgacgacgactacagctggtgggacctgttcatgaagatctgcgtgttcatcttcgccttcgtgatccccgtgctgatcatcatcgtgtgctacaccctgatgatcctgagactgaagagcgtgagactgctgagcggcagcagagagaaggacagaaacctgagaagaatcaccagactggtgctggtggtggtggccgtgttcgtggtgtgctggacccccatccacatcttcatcctggtggaggccctgggcagcaccagccacagcaccgccgccctgagcagctactacttctgcatcgccctgggctacaccaacagcagcctgaaccccatcctgtacgccttcctggacgagaacttcaagagatgcttcagagacttctgcttccccctgaagatgagaatggagagacagagcaccagcagagtgagaaacaccgtgcaggaccccgcctacctgagagacatcgacggcatgaacaagcccgtgtag

SEQ ID NO: 17078 - DNA, 1203 bp, Artificial Sequence
  derived and/or modified sequence
atggattcatctgcggctcccaccaacgctagtaactgcacagatgccctcgcatactcaagctgttcgcccgccccgtcaccaggatcctgggtgaacctatcacacctagacggaaatttgagcgacccctgcggacccaacaggacggatctgggcggccgcgattccttatgcccccctacaggatcacctagtatgattaccgcaattaccattatggccctttactccatcgtttgtgttgtagggctttttgggaattttctggtcatgtacgtgatcgtccggtatacgaaaatgaaaactgcaacgaacatatatatcttcaatctcgcccttgccgacgctcttgccactagcactctgccatttcagagtgtgaactacctgatgggcacatggcctttcggtaccattctgtgtaagatcgtgatctctatcgactactacaatatgttcacctcaatcttcaccctgtgcaccatgagcgtcgatcggtatattgctgtgtgtcatcctgtgaaggcgctcgacttccgcacgccccggaacgccaaaattatcaacgtgtgcaactggattttgagtagcgcaatcgggctgcccgttatgttcatggctaccacgaaatatcgtcaggggtctatcgactgtacccttacattcagccaccctacttggtattgggagaatctcctgaaaatatgcgtgttcattttcgcgttcattatgccagtgctcattatcaccgtgtgttatggcctgatgatcctgagactgaagtcagttcggatgctttctggcagcaaggagaaagatcggaacctgagacgcatcaccagaatggtgctcgtcgttgtggcagtgttcatcgtctgttggacgccaatccatatctatgtaataattaaggcccttgtcactattccggaaaccacctttcagaccgttagttggcatttctgtattgctttggggtataccaatagctgtctaaatcccgtactgtatgcgtttcttgatgagaacttcaagagatgcttccgagaattctgcattcctaccagttcaaatattgagcaacagaacagcacaagaattaggcagaatacaagggaccacccttctactgcaaacaccgtcgaccgaacaaaccaccaactcgaaaatcttgaggccgaaacagctccactcccttag

SEQ ID NO: 17079 - DNA, 1203 bp, Artificial Sequence
  derived and/or modified sequence
atggacagcagcgctgcccccaccaatgccagcaactgcacagatgccctggcctacagcagctgcagccctgcccccagccctggctcctgggtgaacctgagccacctggatggcaacctgagtgacccctgtggccccaacagaacagacctgggcggccgggacagcctgtgcccccccaccggcagccccagcatgatcacagccatcaccatcatggccctgtacagcatcgtgtgtgtggtgggcctgtttggaaacttcctggtgatgtatgtgattgtgcgctacaccaagatgaagacagccaccaacatctacatcttcaacctggccctggctgatgccctggccaccagcaccctgcccttccagagcgtgaactacctgatgggcacctggcccttcggcaccatcctgtgcaagatcgtcatcagcattgactactacaacatgttcaccagcatcttcaccctgtgcaccatgtctgtggaccgctacatcgctgtgtgccaccctgtgaaggccctggacttccgcaccccaagaaatgccaagatcatcaacgtgtgcaactggatcctgagcagcgccatcggcctgcctgtgatgttcatggccaccaccaagtaccggcagggcagcattgactgcaccctgaccttcagccaccccacctggtactgggagaacctgctgaagatctgtgtgttcatctttgccttcatcatgcctgtgctgatcatcaccgtgtgctacggcctgatgatcctgcggctgaagtctgtgaggatgctgagcggcagcaaggagaaggacaggaacctgcggcgcatcaccaggatggtgctggtggtggtggccgtgttcatcgtgtgctggacccccatccacatctacgtgatcatcaaggccctggtgaccatccctgagaccaccttccagacagtgtcctggcacttctgcatcgccctgggctacaccaacagctgcctgaaccctgtgctgtatgccttcctggatgagaacttcaagcgctgcttccgggagttctgcatccccaccagcagcaacatcgagcagcagaacagcacccgcatccggcagaacacccgggaccaccccagcacagccaacacagtggacaggaccaaccaccagctggagaacctggaggccgagacagcccccctgccctag

SEQ ID NO: 17080 - DNA, 1203 bp, Artificial Sequence
  derived and/or modified sequence
atggacagcagcgccgcccccaccaacgccagcaactgcaccgacgctctcgcctattcatcctgtagtcccgcacccagtcccggttcttgggtaaacctttcccacctggatggtaacttgagtgatccttgtggcccgaataggacggatttgggcggacgcgattccctgtgtccgccaactggatccccctctatgataacagcgataactattatggctctgtattccatagtatgcgtcgtcggcctgtttggcaatttcctggttatgtatgtaattgtgagatacaccaaaatgaagacagctactaatatctatatctttaatcttgctcttgcagatgctttggccacatctaccctgcccttccaaagcgtcaattatctcatgggcacatggccatttgggacaatcctgtgtaagattgtcatttctattgattactacaacatgttcacctctatttttactctgtgcacaatgagcgttgaccggtacatcgccgtgtgccatcccgtcaaggctcttgacttccgcacaccacgcaatgccaagatcattaacgtgtgtaactggatcctcagttcagccattggtctgccagtgatgtttatggcaaccactaagtacagacaggggtctattgactgcacactgacattcagtcatcccacctggtactgggaaaacctgctgaaaatatgcgtgtttatttttgcctttattatgccagtgctgatcatcacggtgtgctatggcctgatgatcctgcggctaaaatccgtgaggatgctgtccggatccaaagaaaaagataggaacctgagacgcataaccagaatggtgttggttgttgtggcagtgttcatagtctgctggacgccaatccacatctacgtgatcatcaaagctctggtcaccatacctgaaactaccttccagacagtgtcttggcacttttgcatcgcccttggctacacaaactcctgcctgaatccggtgctgtatgccttccttgatgaaaatttcaaacgctgcttcagagaattttgtattcccacctcctcgaacatcgaacagcagaactctactaggattagacagaacacaagagaccatccatcaacagcaaacactgttgaccgcaccaatcatcagctggagaacctagaggccgaaacagccccgctcccatag

SEQ ID NO: 17081 - DNA, 1203 bp, Artificial Sequence
  derived and/or modified sequence
atggactcctctgctgctcctactaatgccagtaattgcaccgacgcactggcatactcctcttgtagtcccgctcccagcccagggtcctgggtcaacctctctcatttagatggtaatctgtctgacccgtgcggccctaatagaaccgacctgggcggaagggattcgttatgtccaccaacaggttcgcccagcatgatcaccgcgatcacaataatggccctgtattcgattgtgtgtgtggtgggactattcggaaactttctcgtgatgtatgtcatcgtacggtataccaaaatgaagacagcgaccaatatctacatttttaatctggcgctcgctgatgcattagccacatctaccctcccattccagtctgtaaattatttaatgggtacatggccattcggaactattttatgtaagatagtcatttctattgactactacaacatgtttacctcaatcttcactctgtgcacaatgagtgtcgataggtacatcgccgtgtgtcatcctgttaaagcgctcgattttcgcaccccacggaacgccaaaattataaatgtgtgtaattggattctgtcttcggcaatagggctgcctgtcatgtttatggctactactaaatacaggcagggtagtatcgattgcacgctgacttttagccaccccacatggtattgggagaacctgctgaagatctgtgtgtttatctttgcattcattatgcctgtcctgatcatcaccgtctgctacgggctgatgatcctccgcctgaagagcgttaggatgctcagcggctcaaaggagaaggatcgcaacctcagaagaatcaccaggatggtactggtcgtggttgctgtattcattgtgtgctggaccccgattcacatttacgttattattaaagccctggttaccatcccggagacgactttccagacagtgagttggcacttttgtatagcgctaggatacaccaactcctgtctgaatcctgtactgtatgcatttctggatgagaattttaaacgatgcttcagggaattctgtattccaacatcaagcaatatcgagcagcagaatagcacccgcattaggcagaacacccgcgatcacccttccacagctaatacggtggatcgtactaaccatcagctggagaacctggaagcagaaaccgccccattaccgtag

SEQ ID NO: 17082 - DNA, 1203 bp, Artificial Sequence
  derived and/or modified sequence
atggacagcagcgccgcccccaccaacgccagcaactgcaccgacgccctggcctacagcagctgcagccccgcccccagccccggcagctgggtgaacctgagccacctggacggcaacctgagcgacccctgcggccccaacagaaccgacctgggcggcagagacagcctgtgcccccccaccggcagccccagcatgatcaccgccatcaccatcatggccctgtacagcatcgtgtgcgtggtgggcctgttcggcaacttcctggtgatgtacgtgatcgtgagatacaccaagatgaagaccgccaccaacatctacatcttcaacctggccctggccgacgccctggccaccagcaccctgcccttccagagcgtgaactacctgatgggcacctggcccttcggcaccatcctgtgcaagatcgtgatcagcatcgactactacaacatgttcaccagcatcttcaccctgtgcaccatgagcgtggacagatacatcgccgtgtgccaccccgtgaaggccctggacttcagaacccccagaaacgccaagatcatcaacgtgtgcaactggatcctgagcagcgccatcggcctgcccgtgatgttcatggccaccaccaagtacagacagggcagcatcgactgcaccctgaccttcagccaccccacctggtactgggagaacctgctgaagatctgcgtgttcatcttcgccttcatcatgcccgtgctgatcatcaccgtgtgctacggcctgatgatcctgagactgaagagcgtgagaatgctgagcggcagcaaggagaaggacagaaacctgagaagaatcaccagaatggtgctggtggtggtggccgtgttcatcgtgtgctggacccccatccacatctacgtgatcatcaaggccctggtgaccatccccgagaccaccttccagaccgtgagctggcacttctgcatcgccctgggctacaccaacagctgcctgaaccccgtgctgtacgccttcctggacgagaacttcaagagatgcttcagagagttctgcatccccaccagcagcaacatcgagcagcagaacagcaccagaatcagacagaacaccagagaccaccccagcaccgccaacaccgtggacagaaccaaccaccagctggagaacctggaggccgagaccgcccccctgccctag

SEQ ID NO: 17083 - protein, 389 aa, Artificial Sequence
  derived and/or modified sequence
MEGALAANWSAEAANASAAPPGAEGNRTAGPPRRNEALARVEVAVLCLILLLALSGNACVLLALRTTRQKHSRLFFFMKHLSIADLVVAVFQVLPQLLWDITFRFYGPDLLCRLVKYLQVVGMFASTYLLLLMSLDRCLAICQPLRSLRRRTDRLAVLATWLGCLVASAPQVHIFSLREVADGVFDCWAVFIQPWGPKAYITWITLAVYIVPVIVLAACYGLISFKIWQNLRLKTAAAAAAEAPEGAAAGDGGRVALARVSSVKLISKAKIRTVKMTFIIVLAFIVCWTPFFFVQMWSVWDANAPKEASAFIIVMLLASLNSCCNPWIYMLFTGHLFHELVQRFLCCSASYLKGRRLGETSASKKSNSSSFVLSHRSSSQRSCSQPSTA

SEQ ID NO: 17084 - protein, 43 aa, Artificial Sequence
  derived and/or modified sequence
MEGALAANWSAEAANASAAPPGAEGNRTAGPPRRNEALARVEV

SEQ ID NO: 17085 - protein, 92 aa, Artificial Sequence
  derived and/or modified sequence
MEGALAANWSAEAANASAAPPGAEGNRTAGPPRRNEALARVEVAVLCLILLLALSGNACVLLALRTTRQKHSRLFFFMKHLSIADLVVAVFQ

SEQ ID NO: 17086 - DNA, 1170 bp, Artificial Sequence
  derived and/or modified sequence
atggagggagccctggccgccaactggtcagctgaagctgccaatgcaagcgcggccccccctggagccgaaggcaaccgaacggcgggcccaccacggaggaacgaggctctggccagggtggaggtggcggttttatgtcttatcctgctgctggccctgagtggcaatgcctgcgtgttgctagctctgaggacaacacgtcagaagcactccagactgttttttttcatgaaacacctgagcatcgcagacctcgttgtggccgtcttccaggtactaccacaactcctgtgggacatcacctttcgcttttacggaccagacctgctttgcaggcttgtcaaatacctccaggtggtaggcatgtttgcatctacttatctactgctgctgatgtccctggaccggtgtttggcaatttgtcagccactgaggagtctgaggcgccggaccgatagattggctgtactggctacctggctggggtgtctggtggctagcgcaccccaggtgcatatcttcagcctgcgggaggttgctgacggcgtcttcgactgttgggccgtgtttattcagccctgggggcccaaggcctatatcacatggatcacacttgccgtgtatatcgttcccgtgattgtactcgccgcttgttacgggcttatctcctttaagatatggcaaaatctgcgcctcaaaacggcagcagctgcggcagcagaggcgccagagggcgcggctgcgggagatggggggcgcgtggcactcgcccgcgtgtcttccgttaaacttatttccaaggccaagatccgtactgttaagatgacgttcatcatcgtgctggctttcatcgtgtgctggacgcccttcttttttgtccagatgtggtccgtttgggatgctaatgctccaaaagaagcttctgctttcataatcgtaatgctgctggcgagcctgaacagttgttgcaacccatggatttatatgttatttaccggacaccttttccatgagctggtgcagcgatttctctgttgtagcgcctcatacttaaaaggtagaagactcggagaaacaagcgcgtccaaaaagtcaaatagctcctcttttgtgttaagccatagatcatcatctcagcgaagctgttcccaaccctccactgcctag

SEQ ID NO: 17087 - DNA, 132 bp, Artificial Sequence
  derived and/or modified sequence
atggagggagccctcgctgctaattggtcagccgaggcagcaaacgcaagtgccgcacccccaggtgccgagggcaacagaaccgccgggcccccacgcaggaatgaagccctggcccgggtcgaagtttag

SEQ ID NO: 17088 - DNA, 279 bp, Artificial Sequence
  derived and/or modified sequence
atggaaggggccctggccgccaactggtctgcagaagcagccaatgcctcagcggccccacctggagcggaaggcaaccggactgccgggcccccaagacggaacgaggctctcgcccgagttgaggtagcagtcctctgcttgattctccttctggcacttagcggcaacgcctgtgtccttctggccctgcggacaactagacagaagcattctagactgttttttttcatgaaacatctgagcatagcagacctggtcgtcgcagtgtttcagtag

SEQ ID NO: 17089 - DNA, 1170 bp, Artificial Sequence
  derived and/or modified sequence
atggagggcgccctggccgccaactggagcgctgaggccgccaatgccagcgctgcccctcctggagctgagggcaacagaacagctggccccccaagaagaaatgaggccctggcccgggtggaggtggccgtgctgtgcctgatcctgctgctggccctgtctggaaatgcctgtgtgctgctggccctgcggaccacccggcagaagcacagccgcctcttcttcttcatgaagcacctgagcattgctgacctggtggtggccgtgttccaggtgctgccccagctgctgtgggacatcaccttccgcttctacggccctgacctgctgtgccgcctggtgaagtacctgcaggtggtgggcatgtttgccagcacctacctgctgctgctgatgagcctggaccgctgcctggccatctgccagcccctgcggagcctgcggcggaggacagaccggctggccgtgctggccacctggctgggctgcctggtggccagcgccccccaggtgcacatcttcagcctgcgggaggtggctgatggagtgtttgactgctgggccgtgttcatccagccctggggccccaaggcctacatcacctggatcaccctggccgtgtacatcgtgcctgtgattgtgctggccgcctgctacggcctcatctccttcaagatctggcagaacctgcggctgaagacagctgctgctgctgctgctgaggcccctgagggcgctgctgctggagatggcggccgggtggccctggcccgggtgtcctctgtgaagctgatcagcaaggccaagatcagaacagtgaagatgaccttcatcatcgtgctggccttcatcgtgtgctggacccccttcttctttgtgcagatgtggagcgtgtgggatgccaatgcccccaaggaggccagcgccttcatcatcgtgatgctgctggccagcctgaacagctgctgcaacccctggatctacatgctgttcaccggccacctgttccacgagctggtgcagcgcttcctgtgctgcagcgccagctacctgaagggccgccgcctgggggagaccagcgccagcaagaagagcaacagcagcagctttgtgctgagccacaggagcagcagccagaggagctgcagccagcccagcacagcctag

SEQ ID NO: 17090 - DNA, 132 bp, Artificial Sequence
  derived and/or modified sequence
atggagggcgccctggccgccaactggagcgctgaggccgccaatgccagcgctgcccctcctggagctgagggcaacagaacagctggccccccaagaagaaatgaggccctggcccgggtggaggtgtag

SEQ ID NO: 17091 - DNA, 279 bp, Artificial Sequence
  derived and/or modified sequence
atggagggcgccctggccgccaactggagcgctgaggccgccaatgccagcgctgcccctcctggagctgagggcaacagaacagctggccccccaagaagaaatgaggccctggcccgggtggaggtggccgtgctgtgcctgatcctgctgctggccctgtctggaaatgcctgtgtgctgctggccctgcggaccacccggcagaagcacagccgcctcttcttcttcatgaagcacctgagcattgctgacctggtggtggccgtgttccagtag

SEQ ID NO: 17092 - DNA, 1170 bp, Artificial Sequence
  derived and/or modified sequence
atggagggcgccctggccgccaactggagcgccgaggccgccaacgcatctgctgcaccgcctggcgccgagggaaacaggaccgctggcccaccccgtcgcaatgaagccctggctagggttgaagtcgccgtcctgtgcctgattttactcctggccttatccggcaatgcttgtgtgctcctggctcttaggacgacccgccaaaagcatagccggctttttttttttatgaagcatctgagcattgctgatctcgtggttgccgtgtttcaggtcctgccccagcttctgtgggatattacatttcgattttatggacccgatttattgtgtcgccttgttaagtacctgcaagtcgttggaatgttcgcctccacttatttgctgttattaatgtctcttgacaggtgcttggcaatttgtcagcctttgaggtcactgcggaggcgtactgaccgcctggccgtacttgcaacctggctgggctgcctggtcgcatcggctccccaggtacacattttctctttgagagaggtggccgacggggtgttcgactgctgggctgttttcattcagccgtggggtccgaaggcctatattacctggattacacttgcagtatacatcgtgcccgtcattgtgctcgctgcgtgctacgggttaatatcatttaagatctggcagaatcttaggttgaagaccgcagcggctgccgcggctgaggcccctgagggggccgcggcaggggacgggggcagggttgcattggcaagagttagtagtgttaagctgattagtaaagccaaaatcaggaccgttaagatgacgttcattatcgtgttggcattcatcgtgtgctggactcctttcttctttgtgcaaatgtggtccgtttgggacgcaaatgcaccaaaagaagcatcagcttttatcattgtgatgctgctcgcctccctgaactcatgctgtaatccttggatttacatgcttttcaccggtcatcttttccatgaattggtccagcggtttctttgttgctcagcatcctatttaaaaggacggcggcttggcgaaacctcagcgtctaaaaaaagtaactccagctcctttgtgttaagccacagaagctccagccagcgcagctgcagccagccctcaactgcctag

SEQ ID NO: 17093 - DNA, 132 bp, Artificial Sequence
  derived and/or modified sequence
atggagggcgccctggccgccaactggagcgccgaggccgccaacgcttcggccgcgccgcctggcgcagaagggaacaggacggctgggcctccccggcggaacgaggccctggccagggtcgaggtgtag

SEQ ID NO: 17094 - DNA, 279 bp, Artificial Sequence
  derived and/or modified sequence
atggagggcgccctggccgccaactggagcgccgaggccgccaacgcatctgcagcacccccgggcgctgagggaaacagaactgccggtccccccaggcgtaacgaggcgctggcgagagtcgaagtggctgttctgtgccttatactcttgttagccttaagtggcaacgcctgtgtgttattggccctgcggacgaccaggcagaagcacagtagattgtttttttttatgaaacacctgagcatagcagatctcgtagtagccgtcttccagtag

SEQ ID NO: 17095 - DNA, 4364 bp, Artificial Sequence
  derived and/or modified sequence
atttgttaaggctctgggaccaacgctgggcgaaccagctccgctccggaggggtctgcgcggctggcctcgcccgccccctagcggacccgtgcgatagtgcagcctcagccccagcgcacagcgccgcatccagacgctgtccgcgcgcgcagcctgggaggcgctcctcgctcgcctcctgtacccatccagcgaccagccaggctgcggcgaggggattccaaccgaggctccagtgagagacctcagcttagcatcacattaggtgcagccggcaggccatcccaactcgggccgggagcgcacgcgtcactggggccgtcagtcgccgtgcaacttccccggggggagtcaactttaggttcgcctgcggactcggtgcagtggaagccgctgaacatcccgaggaactggcacgctgggggctctgggcttgtggccggtagaggattcccgctcatttgcagtggctcagaggagggtggacccagcagatccgtccgtggagtctccaggagtggagccccgggcgcccctacaccctccgacacgccggatccggcccagccgcgccaagccgtaaagggctcgaaggccggggcgcaccgctgccgccagggtcatggagggcgcgctcgcagccaactggagcgccgaggcagccaacgccagcgccgcgccgccgggggccgagggcaaccgcaccgccggacccccgcggcgcaacgaggccctggcgcgcgtggaggtggcggtgctgtgtctcatcctgctcctggcgctgagcgggaacgcgtgtgtgctgctggcgctgcgcaccacacgccagaagcactcgcgcctcttcttcttcatgaagcacctaagcatcgccgacctggtggtggcagtgtttcaggtgctgccgcagttgctgtgggacatcaccttccgcttctacgggcccgacctgctgtgccgcctggtcaagtacttgcaggtggtgggcatgttcgcctccacctacctgctgctgctcatgtccctggaccgctgcctggccatctgccagccgctgcgctcgctgcgccgccgcaccgaccgcctggcagtgctcgccacgtggctcggctgcctggtggccagcgcgccgcaggtgcacatcttctctctgcgcgaggtggctgacggcgtcttcgactgctgggccgtcttcatccagccctggggacccaaggcctacatcacatggatcacgctagctgtctacatcgtgccggtcatcgtgctcgctgcctgctacggccttatcagcttcaagatctggcagaacttgcggctcaagaccgctgcagcggcggcggccgaggcgccagagggcgcggcggctggcgatggggggcgcgtggccctggcgcgtgtcagcagcgtcaagctcatctccaaggccaagatccgcacggtcaagatgactttcatcatcgtgctggccttcatcgtgtgctggacgcctttcttcttcgtgcagatgtggagcgtctgggatgccaacgcgcccaaggaagcctcggccttcatcatcgtcatgctcctggccagcctcaacagctgctgcaacccctggatctacatgctgttcacgggccacctcttccacgaactcgtgcagcgcttcctgtgctgctccgccagctacctgaagggcagacgcctgggagagacgagtgccagcaaaaagagcaactcgtcctcctttgtcctgagccatcgcagctccagccagaggagctgctcccagccatccacggcgtgacccaccagccagggccagggctgcagcctgaggctcaggctgtgctggcataagtgctctgctcctaggtgatggcgtatgtttgtgtataaggtacctatcagtttgtatccctcccctccttggggtggcttcagtggggtggagagtggcctccatgatggaagatgataggggactcagccatcagacaacaccctggcctcctacacgtacttctaccaccctgaacccactgctgccctgggcagtgagtggcttgttttttctcctggacttgtaatttcactccagtatatttttacttcttcattctgggatattgtgaaaagcggtaaatataggattggtgaccaattgggtcaggaagtccagtgttctggacttggggtaagcagtggggttgggacctcagatgggaagggtggtgctaagatcctcctgacctcaaagtgtatttgcctttaagcgaacaaatgctggggtccttggggaccagcttgtcagagggtagccctaagagaaggggattaccttgtaagaccatctggcgcagtggacctattagaacttgggttaaaaatgtttaagaagctaatgtttaagaagcatttgggaaagaaaaagaaataaatgtatccagataggaaaagaagaagtaaaactatttgcagatgacacagttttgtatatagaaaatcctaaggaactcacacacacacacacacacacacacgcacacagctattagaactaataagcaagttccgcaaggtttcaagatacaagatcaatatacaaaaatgaattgtatttctttatactagcaacaaacaatatgaaaacgaagttaaataattccatttataataccatcagaaagaataaaataggaatcaacttaacaaaacaagtgcaagactgaaaactacaaaattggaaagaaattaaagaaggcttaaataaatggaaagacatcctgtgttcatggatcagacttagtattgttaagatggcaatactatcctaactgacatgcagattcagtgcaatccttatgaaaatcatagctggcttctttacagaaattgataagctagtcccaaaattcataaagaaatgcaagggacccagaatatccaaataagccttgaaaaagaacaaagttggtggattcacacttcctgatttcataatttacgataaaggtaatcagctcagtgtgttactggtttaaggatagacatacggagcagaataaagagtacagatatgaacacttatacttacggtcaattgatttttgacaaggttcccaagacaattcaatagagaaaggagagtcttttcaacaaatggcaccgagacaatgatatgcaagtgcaaaagaatgaggttggacctttactcacactatgtgcaaaaatcaactcaaaacgcatccaagatctaaatataagagctgaaactataaaatcttagaaagaaacataggcatagatctttgtaaccttgaattaggcagtggtttcttagatatgataccaaagacacaagcaaccaatggaaaaataggtaaattggacttaatcaagatttgaagcttttgtgattgaaaagaccctatcaagaaggtgaaaagataacctgcagaatgggagaaaatatttgcgagtcatatatatgataaggggcttgtatctggaatatataaataactcttataacacaacaataaggagaaaaataaatcaatttaaaaaatgggctaacggtttgaatagacatttctccaaagaagatatgcaaatggctactaagcacatgaaaaaatactcaacattattattcattagggaaatgcaagtcaaaatcacaatgagattccagtttacaatcactaggatggctacaataaaaagatggacaagaacgagtgtcggtgaggatgtagagaaactggtagaaatttaaattgttggtgggaatgtaaatggtgcacctgctttgaaaaacagtttggcagtacctcaaaaagttaaacgtagagtgaccatatgacccaggaatgccactcctaggtatttacccaagagaaatgaaaacgtacatacacacaaaaacttgtacaccaatgttcatagcaacattatttgtaatagccaaaaagtggaaacaacccaaatgtctaccaactgatgaatgggaaataaaatgtggtctgtccacgcaatggaacattattagactctaaaaagaaatgaagtactcacacatgccacaacatggatgagccttgaaaacttgctaagtgaaagaagccaggtgcaaaagcccacatattgtctgactgcattgaaatgcaatgtctaaaatggacgaatctatatagagtgaatatagattagcgtttgccagggcctggaggctgtgagagatgaggcatgactactaagggtttggggtttctttttcgggtgatgaaaatgttctgaaattagtggtgattgtgcacgattttgagaatgtactaaaaaccaatgaactttaaaaaataaaaataaacaaa

SEQ ID NO: 17096 - DNA, 600 bp, Artificial Sequence
  derived and/or modified sequence
tggagattccctcggggaggtgatttggttttagattcccactcccggaggaacgttgctgattttgaccctcccttctcccccagtggaagccgctgaacatcccgaggaactggcacgctgggggctctgggcttgtggccggtagaggattcccgctcatttgcagtggctcagaggagggtggacccagcagatccgtccgtggagtctccaggagtggagccccgggcgcccctacaccctccgacacgccggatccggcccagccgcgccaagccgtaaagggctcgaaggccggggcgcaccgctgccgccagggtcatggagggcgcgctcgcagccaactggagcgccgaggcagccaacgccagcgccgcgccgccgggggccgagggcaaccgcaccgccggacccccgcggcgcaacgaggccctggcgcgcgtggaggtggcggtgctgtgtctcatcctgctcctggcgctgagcgggaacgcgtgtgtgctgctggcgctgcgcaccacacgccagaagcactcgcgcctcttcttcttcatgaagcacctaagcatcgccgacctggtggtggcagtgtttcag

SEQ ID NO: 17097 - DNA, 1170 bp, Artificial Sequence
  derived and/or modified sequence
atggaaggggctctggctgcgaattggtcggctgaagccgctaacgcttctgccgctcccccaggcgcagagggcaaccggacggcagggcctccccgaaggaatgaagctctggctcgggtggaggtcgcagtactatgccttatactgctgttagcactcagtggaaatgcctgcgtcctgttggccttgcgaactacccggcagaaacacagcagattgttcttttttatgaaacatttgtcaattgccgatctggtggtcgccgtctttcaggtgcttcctcaactactttgggacatcacatttcgtttttatggcccagatctgctctgcaggttagtcaagtacttgcaggttgtcggaatgtttgccagcacctatctcctcttactgatgtccctggatcgctgcctcgctatctgccagcctctgcggagcctcagaagacggactgatcggctcgcagtcctggctacctggctggggtgcctggtagcaagcgcccctcaggtgcacatctttagtcttcgggaagtagccgatggggtgtttgattgctgggccgtcttcattcagccttggggaccaaaagcctacattacctggattacgctcgcggtgtacattgtgccggtcatcgtactagctgcctgttacggactcattagctttaaaatctggcagaacctcagactgaaaacggcagccgcagccgctgccgaggcccctgaaggcgcagcggcaggcgatgggggacgcgtggccttagccagggtctccagcgtgaagctaatttcaaaggcgaaaatcagaaccgttaaaatgaccttcatcatagtgctggcatttattgtctgttggaccccctttttcttcgttcagatgtggtcggtgtgggacgctaatgcccctaaagaggccagtgcctttatcatagtgatgttactagcctccctgaacagctgctgtaatccttggatctatatgctgtttactggacatctgttccacgagctggtgcagcggtttctgtgctgctccgcttcttacttgaaaggcaggcgcttgggtgaaaccagcgcgtcaaagaagagtaattcctcaagcttcgtgctgtctcatcgaagtagttcacaacggagttgcagccagccaagcacagcatag

SEQ ID NO: 17098 - DNA, 132 bp, Artificial Sequence
  derived and/or modified sequence
atggaaggggctctcgccgcaaattggagtgccgaggccgctaacgcttccgcagcacccccaggcgctgaggggaacaggactgcaggcccaccccgtagaaatgaggccttagcccgagtggaagtatag

SEQ ID NO: 17099 - DNA, 279 bp, Artificial Sequence
  derived and/or modified sequence
atggaaggggcactcgcagcaaattggtcagcagaggcagccaacgcctcggccgcacctcccggagcagagggaaatcgcacagccggtcctccacgccgaaatgaagccctcgcccgtgtggaggtggctgtcctctgcctcattttgctcctggccctgtctggaaatgcctgcgtcttgcttgcccttagaacaacaagacagaagcactcaagattatttttttttatgaaacaccttagtatcgctgacctggtcgtggccgtctttcaatag

SEQ ID NO: 17100 - DNA, 1170 bp, Artificial Sequence
  derived and/or modified sequence
atggagggcgccctggccgccaactggagcgccgaggccgccaacgccagcgccgccccccccggcgccgagggcaacagaaccgccggcccccccagaagaaacgaggccctggccagagtggaggtggccgtgctgtgcctgatcctgctgctggccctgagcggcaacgcctgcgtgctgctggccctgagaaccaccagacagaagcacagcagactgttcttcttcatgaagcacctgagcatcgccgacctggtggtggccgtgttccaggtgctgccccagctgctgtgggacatcaccttcagattctacggccccgacctgctgtgcagactggtgaagtacctgcaggtggtgggcatgttcgccagcacctacctgctgctgctgatgagcctggacagatgcctggccatctgccagcccctgagaagcctgagaagaagaaccgacagactggccgtgctggccacctggctgggctgcctggtggccagcgccccccaggtgcacatcttcagcctgagagaggtggccgacggcgtgttcgactgctgggccgtgttcatccagccctggggccccaaggcctacatcacctggatcaccctggccgtgtacatcgtgcccgtgatcgtgctggccgcctgctacggcctgatcagcttcaagatctggcagaacctgagactgaagaccgccgccgccgccgccgccgaggcccccgagggcgccgccgccggcgacggcggcagagtggccctggccagagtgagcagcgtgaagctgatcagcaaggccaagatcagaaccgtgaagatgaccttcatcatcgtgctggccttcatcgtgtgctggacccccttcttcttcgtgcagatgtggagcgtgtgggacgccaacgcccccaaggaggccagcgccttcatcatcgtgatgctgctggccagcctgaacagctgctgcaacccctggatctacatgctgttcaccggccacctgttccacgagctggtgcagagattcctgtgctgcagcgccagctacctgaagggcagaagactgggcgagaccagcgccagcaagaagagcaacagcagcagcttcgtgctgagccacagaagcagcagccagagaagctgcagccagcccagcaccgcctag

SEQ ID NO: 17101 - DNA, 132 bp, Artificial Sequence
  derived and/or modified sequence
atggagggcgccctggccgccaactggagcgccgaggccgccaacgccagcgccgccccccccggcgccgagggcaacagaaccgccggcccccccagaagaaacgaggccctggccagagtggaggtgtag

SEQ ID NO: 17102 - DNA, 279 bp, Artificial Sequence
  derived and/or modified sequence
atggagggcgccctggccgccaactggagcgccgaggccgccaacgccagcgccgccccccccggcgccgagggcaacagaaccgccggcccccccagaagaaacgaggccctggccagagtggaggtggccgtgctgtgcctgatcctgctgctggccctgagcggcaacgcctgcgtgctgctggccctgagaaccaccagacagaagcacagcagactgttcttcttcatgaagcacctgagcatcgccgacctggtggtggccgtgttccagtag

SEQ ID NO: 17103 - protein, 534 aa, Artificial Sequence
  derived and/or modified sequence
MIWYILIIGILLPQSLAHPGFFTSIGQMTDLIHTEKDLVTSLKDYIKAEEDKLEQIKKWAEKLDRLTSTATKDPEGFVGHPVNAFKLMKRLNTEWSELENLVLKDMSDGFISNLTIQRQYFPNDEDQVGAAKALLRLQDTYNLDTDTISKGNLPGVKHKSFLTAEDCFELGKVAYTEADYYHTELWMEQALRQLDEGEISTIDKVSVLDYLSYAVYQQGDLDKALLLTKKLLELDPEHQRANGNLKYFEYIMAKEKDVNKSASDDQSDQKTTPKKKGVAVDYLPERQKYEMLCRGEGIKMTPRRQKKLFCRYHDGNRNPKFILAPAKQEDEWDKPRIIRFHDIISDAEIEIVKDLAKPRLSRATVHDPETGKLTTAQYRVSKSAWLSGYENPVVSRINMRIQDLTGLDVSTAEELQVANYGVGGQYEPHFDFARKDEPDAFKELGTGNRIATWLFYMSDVSAGGATVFPEVGASVWPKKGTAVFWYNLFASGEGDYSTRHAACPVLVGNKWVSNKWLHERGQEFRRPCTLSELE

SEQ ID NO: 17104 - DNA, 1605 bp, Artificial Sequence
  derived and/or modified sequence
atgatttggtatattctgatcatcggcatcctcctacctcaaagcctggcacatcctggatttttcaccagcattggccagatgaccgatctaattcatactgagaaggaccttgtgacctccctaaaagactatataaaagctgaagaggataagctcgaacagatcaagaagtgggctgagaagctcgacagactaacctctactgcaactaaagatccagaaggattcgtggggcacccggttaatgcatttaaattgatgaagaggctgaatacggaatggtcagagctggaaaatctggtgcttaaggatatgagcgatgggttcatatcaaatctaacaatccaaaggcagtactttcccaatgacgaggatcaggttggcgccgcaaaggctctcctgcggctgcaggacacctataacctggacaccgatacaatcagtaagggcaacctcccaggggttaagcataagagttttcttactgccgaagactgctttgagctgggaaaagtggcctataccgaggctgactattatcacaccgaattgtggatggaacaggccctgcggcagttggacgagggggaaattagtaccattgataaagtcagtgtgttggactacctctcgtacgccgtctaccagcagggagatttggacaaggccctgctgcttacgaaaaaactgcttgaacttgatcctgaacatcagagagctaacggaaatcttaaatattttgagtatatcatggctaaagaaaaagacgtgaacaagagcgcatcagatgatcagtcagatcaaaaaaccactcctaaaaaaaaaggggtcgctgttgattatctacctgagcgccaaaagtacgaaatgctgtgccgaggggaaggtattaagatgacgccccggcgccaaaagaagctgttctgccgataccatgatggcaaccggaatcctaagtttattctcgccccagccaagcaggaggatgaatgggacaaaccgcgcatcattcgctttcatgacattatttcggacgcagaaatagaaattgtgaaggatcttgctaagcctcgattgtccagggccaccgttcatgatcctgaaactgggaagttgaccactgcgcagtatcgggtctctaaatcagcatggctctccggctacgagaaccctgttgtctctaggattaacatgaggatccaagatctgaccggtctggacgtctctacggctgaggagctccaggtggctaattatggagtgggcgggcagtatgagccgcactttgattttgcccgcaaggacgagcctgatgcattcaaagaacttggaacagggaacagaattgcaacgtggctgttttacatgtcagacgttagcgcgggaggagcaactgttttccccgaagtgggcgcttccgtgtggccaaagaagggcaccgctgtgttttggtataacctctttgcaagtggtgagggagactacagcactcggcatgcggcttgccccgtcctggtgggaaacaagtgggtctctaacaaatggctgcacgaacggggtcaggaattccggagaccctgcactctcagcgagctggaatag

SEQ ID NO: 17105 - DNA, 1605 bp, Artificial Sequence
  derived and/or modified sequence
atgatctggtatatcctcatcatcggaatactccttcctcagtctttagctcatccaggattttttacctccatcggtcagatgactgacttaattcatactgagaaggacctcgtgacctccctcaaagattatattaaggctgaggaggataagctggagcaaattaaaaaatgggctgaaaagttagatagacttacttctaccgcgacaaaggatcccgaaggatttgtcggccaccctgtgaatgcttttaagctaatgaaaagactcaatacagagtggtctgagctggagaacctcgtcctcaaggatatgagcgacggttttatcagcaatcttaccattcagagacaatacttccctaacgacgaagatcaggtaggcgcggccaaagccctactgagactgcaagacacctacaatctcgacaccgacactatctccaagggtaatctccctggtgtgaagcacaaatcgttccttaccgccgaggactgctttgagttgggtaaagtggcttataccgaggctgactactatcatactgagctgtggatggagcaggccctgagacagctggatgagggtgagatcagtaccattgataaggtttctgttcttgattatttatcctacgccgtttaccagcagggcgacttggataaggcacttctgctcactaagaaacttctggaactggaccctgagcatcagagagctaatggaaatctcaaatacttcgagtacattatggcaaaagaaaaggatgtgaataaatcagcctcagacgatcagagcgaccagaagacaaccccaaaaaaaaaaggtgtggctgtggactacctccccgaaagacagaaatatgagatgctgtgccgtggcgaaggcataaagatgacccctcgcaggcagaaaaaattgttctgcagatatcacgacggaaacagaaatccgaagttcattttagcccccgcaaaacaggaagatgaatgggataagccgcgaataattagattccatgacatcataagcgacgccgagatagaaattgtgaaagacctcgctaagcctaggttgtcccgagcgacggtgcatgacccggagacgggaaagctcaccaccgcccagtatcgggtttcgaagagcgcttggctgtctggttatgaaaacccagtcgttagcagaatcaatatgagaatacaggatctgactgggctggatgtgagcacagccgaagagcttcaagtggctaactacggggtgggcggccagtatgagcctcatttcgacttcgctaggaaagatgaaccagacgcgttcaaggagcttggtacagggaatcgtatcgccacttggctgttctatatgagcgacgtgtccgctggaggcgctaccgttttcccagaagtgggcgcctcagtctggcctaaaaaaggcacagccgtcttctggtataatctttttgcgtccggcgagggcgattacagtacccgccatgccgcctgccctgtgctggttggcaataaatgggtgtccaacaaatggctgcatgaacggggccaagagttccgacgcccctgtaccttatccgaactggaatag

SEQ ID NO: 17106 - DNA, 1605 bp, Artificial Sequence
  derived and/or modified sequence
atgatctggtacatcctgatcatcggcatcctgctgccccagagcctggcccaccctggcttcttcaccagcatcggccagatgacagacctgatccacacagagaaggacctggtgaccagcctgaaggactacatcaaggccgaggaggacaagctggagcagatcaagaagtgggccgagaagctggaccggctgaccagcacagccaccaaggaccctgagggctttgtgggccaccctgtgaatgccttcaagctgatgaagaggctgaacacagagtggagcgagctggagaacctggtgctgaaggacatgtctgatggcttcatcagcaacctgaccatccagaggcagtacttccccaatgatgaggaccaggtgggcgccgccaaggccctgctgcggctgcaggacacctacaacctggacacagacaccatcagcaagggcaacctgcccggggtgaagcacaagagcttcctgacagctgaggactgctttgagctgggcaaggtggcctacacagaggccgactactaccacacagagctgtggatggagcaggccctgcggcagctggatgaaggagagatcagcaccatcgacaaggtgtctgtgctggactacctgtcctatgctgtgtaccagcagggcgacctggacaaggccctgctgctgaccaagaagctgctggagctggaccctgagcaccagagggccaacggcaacctgaagtactttgagtacatcatggccaaggagaaggatgtgaacaagagcgccagtgatgaccagagcgaccagaagaccacccccaagaagaagggcgtggccgtggactacctgcctgagcggcagaagtatgagatgctgtgccgcggggagggcatcaagatgaccccccggcggcagaagaagctgttctgccgctaccatgatggcaacagaaaccccaagttcatcctggccccagccaagcaggaggatgagtgggacaagccccgcatcatccgcttccatgacatcatcagtgatgctgagattgaaattgtgaaggacctggccaagccccggctgagccgggccaccgtgcatgaccctgagaccgggaagctgaccacagcccagtacagagtgtccaagagcgcctggctgagcggctatgagaaccctgtggtgagccgcatcaacatgaggatccaggacctgaccggcctggatgtgtccacagctgaggagctgcaggtggccaactacggcgtgggcggccagtatgagccccactttgattttgccaggaaggatgagccagatgccttcaaggagctgggcaccggcaaccgcatcgccacctggctgttctacatgtctgatgtgtctgctgggggcgccaccgtcttccctgaggtgggcgcctctgtgtggcccaagaagggcacagctgtgttctggtacaacctgtttgccagcggggagggggactacagcaccaggcatgctgcctgccctgtgctggtgggcaacaagtgggtgagcaacaagtggctgcacgagcggggccaggagttcagaagaccctgcaccctgtctgagctggagtag

SEQ ID NO: 17107 - DNA, 1605 bp, Artificial Sequence
  derived and/or modified sequence
atgatctggtacatcctgatcatcggcatcctgctgccccagagcctggcccatcccgggttcttcacgtctatcgggcaaatgactgatctgatacacacagagaaggatcttgtgacctccctaaaggattatattaaggccgaagaggacaaactggagcaaatcaaaaaatgggctgaaaaactggaccgtctcacgtccactgccacgaaagatcctgaaggttttgtgggtcatccagtgaacgccttcaaattaatgaagcgccttaacaccgaatggtcagaactggagaatctggtgttgaaagatatgtctgacggcttcatcagcaacttgacaatacaacgtcagtactttcccaacgatgaggatcaggttggtgccgcaaaggccctgctccggcttcaggacacttataatctggacactgacacaattagcaaaggtaatctgcccggtgtcaagcacaagagctttttgaccgctgaggactgtttcgagctaggcaaggtggcttatacggaggccgattactatcatacggaactttggatggagcaagcactgagacaactggatgaaggagaaatctctactatcgacaaagtgtctgtgctggactatctctcttacgccgtttatcagcagggggacttggataaggccctgttactgaccaaaaagttgctcgagctagatccagagcaccaacgggccaatggtaacctaaaatattttgaatatatcatggccaaggagaaggatgtaaacaaatccgctagtgatgaccagagcgaccagaagacgacccctaagaagaagggcgtggctgtggactaccttccagagcggcagaaatatgagatgctgtgccgcggagaaggaataaagatgactcctcgccgccagaaaaagctgttttgtagataccacgacgggaatagaaaccctaaatttatcctggcgcctgctaagcaagaggacgaatgggacaagcctaggattatccgctttcatgacattatctctgatgccgagatcgagattgtgaaggatctggctaagcccaggctgtccagagccacggtgcatgacccagagactggcaagctgactacagcacagtaccgcgtgagtaagagcgcctggctctcgggatatgaaaacccagtcgtgtcccgcataaatatgcgaattcaagatctcacaggcctggatgtaagtacagctgaggagttgcaagtggccaactatggcgtgggcgggcaatatgagcctcactttgacttcgcccgtaaagacgagcctgatgctttcaaagagttgggaacgggcaatcgcatcgcaacttggctgttctacatgtccgacgtctccgctgggggcgctacggtgtttcccgaagtgggtgcgtccgtttggcccaagaagggaaccgcagtgttttggtacaacctgttcgccagtggggagggagactattctacacggcatgctgcatgcccagtgctggttggaaacaagtgggtctccaataagtggttgcacgagcgagggcaggagtttcggcgcccctgtaccttatcagagctggaatag

SEQ ID NO: 17108 - DNA, 1605 bp, Artificial Sequence
  derived and/or modified sequence
atgatctggtacatcctgatcatcggcatcctgctgccccagagcctcgcacaccccggcttttttacgagtatcgggcaaatgactgatctgatccataccgaaaaagatcttgtcacttctctgaaggactatatcaaggccgaagaagacaaactagagcagattaaaaagtgggctgaaaagctcgaccgcctgacaagtaccgccaccaaagatcctgagggctttgtgggccaccccgtcaatgcctttaaactgatgaagagactgaatacagaatggtccgagcttgagaatctggtactgaaggatatgtctgatggcttcatttcgaacctaactattcaacgacagtactttcccaatgatgaagaccaggtaggcgccgcaaaggcgctgctaagactccaggatacttacaatctggacacagacaccatatctaaggggaatttaccaggcgttaagcataagtcttttctgactgccgaggactgttttgaactcggtaaagtagcttataccgaagctgactactaccacaccgagttgtggatggagcaagccctgcgtcagctggatgaaggggagatctccaccattgacaaagtgagcgtcctggactacctctcgtatgccgtttaccagcagggagacctcgacaaggccttgctcctgacaaaaaagttgctggagctcgacccagagcaccagcgagctaacggcaatctgaagtacttcgaatatattatggcaaaagagaaagatgtaaataagagcgcaagtgacgatcaatcggaccagaagactacacctaaaaagaagggagtggctgtggactatctgccagagaggcagaaatatgagatgttatgccggggtgagggaatcaagatgacgcccaggcgccagaagaagcttttttgtcgctaccatgacggcaaccggaacccaaaattcattctcgcaccagccaaacaggaggacgagtgggataagccacgcattatcagatttcacgatattatttcggatgcagaaatagaaattgtgaaagaccttgctaagcctagactttcaagggccaccgtgcacgaccccgagacagggaaattaactaccgcccagtatagggtgagtaagagcgcatggctgtccggctacgaaaatccggtcgtgtcccggataaacatgcgtatccaggacctgaccggccttgacgtgtccacagctgaggagctccaggttgcgaactacggagtgggcggacagtatgaacctcactttgattttgccagaaaggatgagcctgacgcttttaaggaactggggactggaaacagaatcgcaacctggttgttttacatgagcgatgtttcagcaggtggggctactgtgtttcccgaggtcggagcatccgtatggcccaagaaagggacggccgtgttctggtataatctgttcgccagtggggaaggcgattatagtacccggcacgcggcctgtcctgtgcttgtgggcaacaaatgggtgtctaataagtggttgcatgagagaggccaggagtttaggaggccgtgcacattatcagagctcgagtag

SEQ ID NO: 17109 - DNA, 1605 bp, Artificial Sequence
  derived and/or modified sequence
atgatctggtatatccttataatcggcatactcctgccgcaatcacttgcccaccctggcttcttcacatctatcggccagatgaccgacctgatacatactgaaaaagacctagtgacatctctgaaagattacattaaagccgaagaagataaattggagcagatcaagaagtgggctgagaaactcgatcgtcttacatcgaccgcaacgaaggatcccgagggttttgtgggacatcctgtcaacgcattcaagctgatgaaaaggctcaatactgaatggtcggagctagaaaacttggtcctgaaggacatgagtgatggtttcatatccaatctgactattcagcggcagtacttccctaatgacgaggaccaggtaggagccgcaaaggccctgctgaggcttcaggacacgtacaaccttgacactgataccatcagtaaaggcaatctgcctggggtgaagcacaaatcctttctaaccgctgaagattgttttgagcttggcaaagtggcatacaccgaggcagactattaccacaccgagctgtggatggagcaggccctcagacagctcgatgaaggggagatctccacaatcgataaggtttcggtcctagattatctgagctacgccgtttatcagcaaggcgacctcgataaagcactgctgctcacgaagaagctccttgagctcgaccccgagcaccagcgcgcaaatggcaaccttaaatacttcgagtacattatggctaaggaaaaggatgtgaataagagtgcatcagacgatcagagcgatcaaaagaccacacccaaaaagaagggggttgcagtggactacttgccagagaggcagaaatacgaaatgctgtgtaggggtgagggcataaaaatgacaccaagacgccagaaaaagctgttctgcaggtaccatgacggcaatcgaaaccctaaatttatattagctcccgcaaagcaggaggacgaatgggacaaaccgaggatcatccggtttcatgacatcatctctgatgcagagattgaaatagtcaaggacttagctaagcccagactgtctagggctacagtccacgatcccgagactggcaagttgactaccgcgcagtaccgagtgagtaagtctgcctggttgtctggctacgagaatccagtggtttctcgcatcaatatgcgcatccaggacctcaccgggttggacgtgagtaccgccgaggaactgcaggtggctaattatggcgtgggcggacagtatgagccacactttgattttgctagaaaggatgagcccgatgccttcaaggaactgggcacaggcaaccgaatcgccacctggttgttctatatgtcggatgtgagtgcaggcggtgccacagttttcccagaggtgggcgcatctgtttggccgaagaaaggtaccgctgtgttctggtacaatcttttcgcttcgggagaaggagactatagcacacggcacgctgcatgcccggtgctggtggggaataaatgggtgtctaacaagtggctccacgaaaggggccaggaattcagacgcccttgcaccctgtcggaactagaatag

SEQ ID NO: 17110 - DNA, 1605 bp, Artificial Sequence
  derived and/or modified sequence
atgatttggtacatcctgattatcggcattctactcccacagagtcttgctcatcccggattttttacttccattgggcagatgaccgacctgatccacacagaaaaggatttagtaacctcgctgaaggactacataaaggctgaggaagataagctggagcagataaaaaaatgggccgagaagctagatcgcctgacaagcacggcaacgaaggacccggaggggttcgtgggccatcctgttaacgcttttaagctcatgaagaggttaaacactgaatggtccgagctggagaatcttgtgctgaaggacatgtctgatggcttcattagcaacctcaccatacagagacagtatttccccaacgacgaggatcaagtgggcgcagctaaggccctgctgagactgcaggacacatacaacctggacacagatactatttccaagggtaatctgcccggagtgaaacacaagtcatttttgaccgcagaagattgtttcgaactggggaaagtcgcatacactgaggctgattattaccacacagaactgtggatggagcaggcgctgcgacagctggacgagggagaaatcagtacgatcgataaggtgagcgtgctcgactacctgtcttatgcagtttatcaacagggtgatctggataaagctctattgcttaccaagaagttactcgagctggatcccgagcatcagcgagccaatggaaacctgaaatatttcgagtatataatggctaaggagaaggatgttaataagagcgcgagtgacgatcagtccgatcagaagactacaccaaagaagaaaggggtggctgtggactacctcccggaacggcaaaagtacgaaatgctctgtcgcggagaaggtatcaaaatgacaccgcgacgccagaaaaagttattctgccgctaccacgacggaaataggaaccccaagtttattctcgcacctgcgaaacaggaggacgagtgggataaacccagaattatcaggttccacgatattatcagtgatgcggagattgagatcgtgaaagatctcgccaagcccagactgagccgggctacagtccacgatcctgagaccgggaaactcaccactgcacaatacagagtgtcaaaaagcgcatggctgtcagggtacgagaatccagtggtgagccgcatcaatatgcgtatccaggacttaacaggtctggatgtgagtaccgcggaggagctccaggtagcaaactatggcgtgggcggacagtacgagccccatttcgacttcgcacgcaaggatgagccagacgctttcaaggaactgggaactggcaatcgtatcgccacatggctcttttatatgtctgacgtgagcgctggtggagccaccgtttttccggaagttggggcaagtgtgtggccgaagaaaggtaccgctgtcttctggtacaacctgtttgcctcaggtgaaggagattattcaaccagacacgctgcatgtccagtgcttgtgggaaataaatgggtttctaacaaatggctgcacgaaaggggccaggaatttcgtcggccttgcaccttatctgagctggagtag

SEQ ID NO: 17111 - DNA, 2844 bp, Artificial Sequence
  derived and/or modified sequence
ggggcgctggtgtgatcgagctcacgtagcgagggctgcagtcgcctcctccctggcgctgccatcgcggcctagaggttataaaagggctaacgggctccctctgctgcccagtcgcgccgccagcgggctgagggtaggaagtagccgctccgagtggaggcgactgggggctgaagagcgcgccgccctctcgtcccactttccaggtgtgtgatcctgtaaaattaaatcttccaagatgatctggtatatattaattataggaattctgcttccccagtctttggctcatccaggcttttttacttcaattggtcagatgactgatttgatccatactgagaaagatctggtgacttctctgaaagattatattaaggcagaagaggacaagttagaacaaataaaaaaatgggcagagaagttagatcggctaactagtacagcgacaaaagatccagaaggatttgttgggcatccagtaaatgcattcaaattaatgaaacgtctgaatactgagtggagtgagttggagaatctggtccttaaggatatgtcagatggctttatctctaacctaaccattcagagacagtactttcctaatgatgaagatcaggttggggcagccaaagctctgttacgtctccaggatacctacaatttggatacagataccatctcaaagggtaatcttccaggagtgaaacacaaatcttttctaacggctgaggactgctttgagttgggcaaagtggcctatacagaagcagattattaccatacggaactgtggatggaacaagccctaaggcaactggatgaaggcgagatttctaccatagataaagtctctgttctagattatttgagctatgcggtatatcagcagggagacctggataaggcacttttgctcacaaagaagcttcttgaactagatcctgaacatcagagagctaatggtaacttaaaatattttgagtatataatggctaaagaaaaagatgtcaataagtctgcttcagatgaccaatctgatcagaaaactacaccaaagaaaaaaggggttgctgtggattacctgccagagagacagaagtacgaaatgctgtgccgtggggagggtatcaaaatgacccctcggagacagaaaaaactcttttgccgctaccatgatggaaaccgtaatcctaaatttattctggctccagctaaacaggaggatgaatgggacaagcctcgtattattcgcttccatgatattatttctgatgcagaaattgaaatcgtcaaagacctagcaaaaccaaggctgagccgagctacagtacatgaccctgagactggaaaattgaccacagcacagtacagagtatctaagagtgcctggctctctggctatgaaaatcctgtggtgtctcgaattaatatgagaatacaagatctaacaggactagatgtttccacagcagaggaattacaggtagcaaattatggagttggaggacagtatgaaccccattttgactttgcacggaaagatgagccagatgctttcaaagagctggggacaggaaatagaattgctacatggctgttttatatgagtgatgtgtctgcaggaggagccactgtttttcctgaagttggagctagtgtttggcccaaaaaaggaactgctgttttctggtataatctgtttgccagtggagaaggagattatagtacacggcatgcagcctgtccagtgctagttggcaacaaatgggtatccaataaatggctccatgaacgtggacaagaatttcgaagaccttgtacgttgtcagaattggaatgacaaacaggcttccctttttctcctattgttgtactcttatgtgtctgatatacacatttcctagtcttaactttcaggagtttacaattgactaacactccatgattgattcagtcatgaacctcatcccatgtttcatctgtggacaattgcttactttgtgggttcttttaaaagtaacacgaaatcatcatattgcataaaaccttaaagttctgttggtatcacagaagacaaggcagagtttaaagtgaggaattttatatttaaagaactttttggttggataaaaacataatttgagcatccagttttagtatttcactacatctcagttggtgggtgttaagctagaatgggctgtgtgataggaaacaaatgccttacagatgtgcctaggtgttctgtttacctagtgtcttactctgttttctggatctgaagactagtaataaactaggacactaactgggttccatgtgattgccctttcatatgatcttctaagttgatttttttcctcccaagtcttttttaaagaaagtatactgtattttaccaaccccctctcttttcttttagctcctctgtggtgaattaaacgtacttgagttaaaatatttcgattttttttttttttttaatggaaagtcctgcataacaacactgggccttcttaactaaaatgctcaccacttagcctgtttttttatcccttttttaaaatgacagatgattttgttcaggaattttgctgtttttcttagtgctaataccttgcctcttattcctgctacagcagggtggtaatattggcattctgattaaatactgtgccttaggagactggaagtttaaaaatgtacaagtcctttcagtgatgagggaattgattttttttaaaagtctttttcttagaaagccaaaatgtttgtttttttaagattctgaaatgtgttgtgacaacaatgacctatttatgatcttaaatctttttt

SEQ ID NO: 17112 - DNA, 2695 bp, Artificial Sequence
  derived and/or modified sequence
agcgggctgagggtaggaagtagccgctccgagtggaggcgactgggggctgaagagcgcgccgccctctcgtcccactttccagatgatctggtatatattaattataggaattctgcttccccagtctttggctcatccaggcttttttacttcaattggtcagatgactgatttgatccatactgagaaagatctggtgacttctctgaaagattatattaaggcagaagaggacaagttagaacaaataaaaaaatgggcagagaagttagatcggctaactagtacagcgacaaaagatccagaaggatttgttgggcatccagtaaatgcattcaaattaatgaaacgtctgaatactgagtggagtgagttggagaatctggtccttaaggatatgtcagatggctttatctctaacctaaccattcagagacagtactttcctaatgatgaagatcaggttggggcagccaaagctctgttacgtctccaggatacctacaatttggatacagataccatctcaaagggtaatcttccaggagtgaaacacaaatcttttctaacggctgaggactgctttgagttgggcaaagtggcctatacagaagcagattattaccatacggaactgtggatggaacaagccctaaggcaactggatgaaggcgagatttctaccatagataaagtctctgttctagattatttgagctatgcggtatatcagcagggagacctggataaggcacttttgctcacaaagaagcttcttgaactagatcctgaacatcagagagctaatggtaacttaaaatattttgagtatataatggctaaagaaaaagatgtcaataagtctgcttcagatgaccaatctgatcagaaaactacaccaaagaaaaaaggggttgctgtggattacctgccagagagacagaagtacgaaatgctgtgccgtggggagggtatcaaaatgacccctcggagacagaaaaaactcttttgccgctaccatgatggaaaccgtaatcctaaatttattctggctccagctaaacaggaggatgaatgggacaagcctcgtattattcgcttccatgatattatttctgatgcagaaattgaaatcgtcaaagacctagcaaaaccaaggctgagccgagctacagtacatgaccctgagactggaaaattgaccacagcacagtacagagtatctaagagtgcctggctctctggctatgaaaatcctgtggtgtctcgaattaatatgagaatacaagatctaacaggactagatgtttccacagcagaggaattacaggtagcaaattatggagttggaggacagtatgaaccccattttgactttgcacggaaagatgagccagatgctttcaaagagctggggacaggaaatagaattgctacatggctgttttatatgagtgatgtgtctgcaggaggagccactgtttttcctgaagttggagctagtgtttggcccaaaaaaggaactgctgttttctggtataatctgtttgccagtggagaaggagattatagtacacggcatgcagcctgtccagtgctagttggcaacaaatgggtatccaataaatggctccatgaacgtggacaagaatttcgaagaccttgtacgttgtcagaattggaatgacaaacaggcttccctttttctcctattgttgtactcttatgtgtctgatatacacatttcctagtcttaactttcaggagtttacaattgactaacactccatgattgattcagtcatgaacctcatcccatgtttcatctgtggacaattgcttactttgtgggttcttttaaaagtaacacgaaatcatcatattgcataaaaccttaaagttctgttggtatcacagaagacaaggcagagtttaaagtgaggaattttatatttaaagaactttttggttggataaaaacataatttgagcatccagttttagtatttcactacatctcagttggtgggtgttaagctagaatgggctgtgtgataggaaacaaatgccttacagatgtgcctaggtgttctgtttacctagtgtcttactctgttttctggatctgaagactagtaataaactaggacactaactgggttccatgtgattgccctttcatatgatcttctaagttgatttttttcctcccaagtcttttttaaagaaagtatactgtattttaccaaccccctctcttttcttttagctcctctgtggtgaattaaacgtacttgagttaaaatatttcgattttttttttttttttaatggaaagtcctgcataacaacactgggccttcttaactaaaatgctcaccacttagcctgtttttttatcccttttttaaaatgacagatgattttgttcaggaattttgctgtttttcttagtgctaataccttgcctcttattcctgctacagcagggtggtaatattggcattctgattaaatactgtgccttaggagactggaagtttaaaaatgtacaagtcctttcagtgatgagggaattgattttttttaaaagtctttttcttagaaagccaaaatgtttgtttttttaagattctgaaatgtgttgtgacaacaatgacctatttatgatcttaaatcttttttaaaaaaa

SEQ ID NO: 17113 - DNA, 1605 bp, Artificial Sequence
  derived and/or modified sequence
atgatctggtacatcctgatcatcggcatcctgctgccccagagcctggcccaccccggcttcttcaccagcatcggccagatgaccgacctgatccacaccgagaaggacctggtgaccagcctgaaggactacatcaaggccgaggaggacaagctggagcagatcaagaagtgggccgagaagctggacagactgaccagcaccgccaccaaggaccccgagggcttcgtgggccaccccgtgaacgccttcaagctgatgaagagactgaacaccgagtggagcgagctggagaacctggtgctgaaggacatgagcgacggcttcatcagcaacctgaccatccagagacagtacttccccaacgacgaggaccaggtgggcgccgccaaggccctgctgagactgcaggacacctacaacctggacaccgacaccatcagcaagggcaacctgcccggcgtgaagcacaagagcttcctgaccgccgaggactgcttcgagctgggcaaggtggcctacaccgaggccgactactaccacaccgagctgtggatggagcaggccctgagacagctggacgagggcgagatcagcaccatcgacaaggtgagcgtgctggactacctgagctacgccgtgtaccagcagggcgacctggacaaggccctgctgctgaccaagaagctgctggagctggaccccgagcaccagagagccaacggcaacctgaagtacttcgagtacatcatggccaaggagaaggacgtgaacaagagcgccagcgacgaccagagcgaccagaagaccacccccaagaagaagggcgtggccgtggactacctgcccgagagacagaagtacgagatgctgtgcagaggcgagggcatcaagatgacccccagaagacagaagaagctgttctgcagataccacgacggcaacagaaaccccaagttcatcctggcccccgccaagcaggaggacgagtgggacaagcccagaatcatcagattccacgacatcatcagcgacgccgagatcgagatcgtgaaggacctggccaagcccagactgagcagagccaccgtgcacgaccccgagaccggcaagctgaccaccgcccagtacagagtgagcaagagcgcctggctgagcggctacgagaaccccgtggtgagcagaatcaacatgagaatccaggacctgaccggcctggacgtgagcaccgccgaggagctgcaggtggccaactacggcgtgggcggccagtacgagccccacttcgacttcgccagaaaggacgagcccgacgccttcaaggagctgggcaccggcaacagaatcgccacctggctgttctacatgagcgacgtgagcgccggcggcgccaccgtgttccccgaggtgggcgccagcgtgtggcccaagaagggcaccgccgtgttctggtacaacctgttcgccagcggcgagggcgactacagcaccagacacgccgcctgccccgtgctggtgggcaacaagtgggtgagcaacaagtggctgcacgagagaggccaggagttcagaagaccctgcaccctgagcgagctggagtag

SEQ ID NO: 17114 - protein, 508 aa, Artificial Sequence
  derived and/or modified sequence
MLRRALLCLAVAALVRADAPEEEDHVLVLRKSNFAEALAAHKYLLVEFYAPWCGHCKALAPEYAKAAGKLKAEGSEIRLAKVDATEESDLAQQYGVRGYPTIKFFRNGDTASPKEYTAGREADDIVNWLKKRTGPAATTLPDGAAAESLVESSEVAVIGFFKDVESDSAKQFLQAAEAIDDIPFGITSNSDVFSKYQLDKDGVVLFKKFDEGRNNFEGEVTKENLLDFIKHNQLPLVIEFTEQTAPKIFGGEIKTHILLFLPKSVSDYDGKLSNFKTAAESFKGKILFIFIDSDHTDNQRILEFFGLKKEECPAVRLITLEEEMTKYKPESEELTAERITEFCHRFLEGKIKPHLMSQELPEDWDKQPVKVLVGKNFEDVAFDEKKNVFVEFYAPWCGHCKQLAPIWDKLGETYKDHENIVIAKMDSTANEVEAVKVHSFPTLKFFPASADRTVIDYNGERTLDGFKKFLESGGQDGAGDDDDLEDLEEAEEPDMEEDDDQKAVKDEL

SEQ ID NO: 17115 - protein, 492 aa, Artificial Sequence
  derived and/or modified sequence
MLRRALLCLAVAALVRADAPEEEDHKYLLVEFYAPWCGHCKALAPEYAKAAGKLKAEGSEIRLAKVDATEESDLAQQYGVRGYPTIKFFRNGDTASPKEYTAGREADDIVNWLKKRTGPAATTLPDGAAAESLVESSEVAVIGFFKDVESDSAKQFLQAAEAIDDIPFGITSNSDVFSKYQLDKDGVVLFKKFDEGRNNFEGEVTKENLLDFIKHNQLPLVIEFTEQTAPKIFGGEIKTHILLFLPKSVSDYDGKLSNFKTAAESFKGKILFIFIDSDHTDNQRILEFFGLKKEECPAVRLITLEEEMTKYKPESEELTAERITEFCHRFLEGKIKPHLMSQELPEDWDKQPVKVLVGKNFEDVAFDEKKNVFVEFYAPWCGHCKQLAPIWDKLGETYKDHENIVIAKMDSTANEVEAVKVHSFPTLKFFPASADRTVIDYNGERTLDGFKKFLESGGQDGAGDDDDLEDLEEAEEPDMEEDDDQKAVKDEL

SEQ ID NO: 17116 - protein, 451 aa, Artificial Sequence
  derived and/or modified sequence
MLRRALLCLAVAALVRADAPEEEDHVLVLRKSNFAEALAAHKYLLVEFYAPWCGHCKALAPEYAKAAGKLKAEGSEIRLAKVDATEESDLAQQYGVRGYPTIKFFRNGDTASPKEYTAGREADDIPFGITSNSDVFSKYQLDKDGVVLFKKFDEGRNNFEGEVTKENLLDFIKHNQLPLVIEFTEQTAPKIFGGEIKTHILLFLPKSVSDYDGKLSNFKTAAESFKGKILFIFIDSDHTDNQRILEFFGLKKEECPAVRLITLEEEMTKYKPESEELTAERITEFCHRFLEGKIKPHLMSQELPEDWDKQPVKVLVGKNFEDVAFDEKKNVFVEFYAPWCGHCKQLAPIWDKLGETYKDHENIVIAKMDSTANEVEAVKVHSFPTLKFFPASADRTVIDYNGERTLDGFKKFLESGGQDGAGDDDDLEDLEEAEEPDMEEDDDQKAVKDEL

SEQ ID NO: 17117 - DNA, 1527 bp, Artificial Sequence
  derived and/or modified sequence
atgctgaggcgtgcactgttgtgtttggccgtggcagccctcgttcgagcagacgcaccagaggaggaggaccacgtgctggtgctgcgcaagtccaatttcgccgaggctcttgccgcacacaagtatctcctggtcgaattttacgctccgtggtgcgggcactgtaaggccctcgcccccgaatacgctaaggccgcagggaaactgaaggctgagggaagcgaaatcaggctcgctaaagtggatgctacagaggagtcagatctggcccagcaatatggagtaaggggctatcccactataaaattctttcgaaacggggacaccgcttcccctaaggagtacaccgctggacgcgaagctgacgacatcgtgaactggctgaagaagcgaaccggaccagccgctaccacactgccagatggagctgcagcagagtcactggtggaaagctcggaagttgcagttatcggattctttaaggacgtcgagagcgattccgcaaaacagtttttacaggccgcagaagcaatcgacgacattccttttggaattactagcaacagcgacgtttttagtaaataccagctggacaaggatggagtggtacttttcaagaaatttgacgagggccgcaacaatttcgaaggagaggtgactaaggaaaacctactggactttataaagcacaaccaacttccactggtgatcgagtttaccgagcaaactgcaccaaagatcttcgggggagagatcaaaacacacattctcctgttcctgccgaaatccgtctccgactacgatggtaagttgagcaattttaaaaccgctgctgaatcatttaagggtaagatcctttttatatttattgacagtgaccacaccgataatcagagaatattagagtttttcgggctcaagaaggaagagtgtccagccgttcgcctgataacattggaggaagagatgactaaatacaaaccagaatcagaagaactgaccgcagaacgaatcacagagttctgccaccgatttctggaggggaagatcaaacctcacctgatgagtcaggaacttccagaggattgggacaagcagccagtgaaggtgcttgttgggaagaatttcgaggatgtcgccttcgatgaaaagaagaatgtgttcgtggagttctatgcaccatggtgcgggcattgtaaacagctagcgcctatatgggataagctgggcgagacatacaaggaccacgagaacatcgtgattgctaaaatggattcaactgccaatgaagtggaagcggtgaaagtccatagcttccccaccttaaagttcttccccgcctctgcagacagaactgtgattgactacaacggtgagaggactttggatggatttaaaaagtttctcgaatctgggggccaggacggtgccggggatgacgacgacttggaggaccttgaggaagctgaagaacctgacatggaggaggacgacgatcagaaggcagtcaaagatgagctttag

SEQ ID NO: 17118 - DNA, 1479 bp, Artificial Sequence
  derived and/or modified sequence
atgcttcggcgggccctgttatgtctggccgtcgcagccctggtaagggccgatgcccccgaagaggaggatcataaatacctcttagttgagttttatgccccgtggtgtggtcattgcaaagcactggccccagaatacgctaaggcggcaggtaagctaaaggctgagggcagcgaaatcaggctggccaaagttgacgctacggaggagtctgatctagctcaacagtacggagttcgcggataccccacgattaagttctttaggaatggggacaccgcttccccaaaagagtataccgcaggccgagaggccgatgatatcgtcaactggctaaagaagcggaccggccccgccgccaccaccctccccgacggggctgctgccgagtctctggtcgaatcttctgaagtggccgtcattgggttcttcaaagatgtagagtccgacagcgccaaacaatttctgcaagctgcagaggcgatcgatgatattccttttgggatcacgagtaattcagacgtgttttcaaagtatcaacttgataaggatggagtggtgctttttaaaaagtttgatgagggccgcaacaactttgagggtgaggtgaccaaggagaaccttctggatttcataaagcacaaccagctacccctggtgattgaatttactgagcagacagctcccaaaattttcggaggggaaattaaaacgcacattcttctctttctgccaaaatctgtaagcgactacgatggcaagctgtccaatttcaaaaccgcagcagaatctttcaaggggaagatcctctttatcttcatagacagcgaccatacagacaatcaacggatactggagtttttcggcctgaagaaagaggagtgccctgctgttcggctgatcaccttagaggaagagatgacaaaatataagcctgagtcagaagagctcaccgcagagcggatcactgagttctgccaccggtttcttgagggcaagatcaaaccacatctaatgtctcaggagctgcccgaagactgggacaaacaacccgtgaaagtgctagttggcaagaacttcgaggacgtggcatttgacgagaagaagaacgtgtttgttgagttttacgcaccttggtgtgggcactgtaaacagcttgcccccatctgggacaagctcggtgagacatataaggatcatgaaaacattgtgattgcgaaaatggattctacagccaatgaagtagaagctgtgaaggttcactcattcccaaccctgaagtttttccctgcgagtgccgataggaccgtcatcgactataatggagaacgtaccctggatggctttaagaagttccttgagagcggtggacaggacggagccggtgatgatgacgatctagaggacctggaggaagccgaggaaccagacatggaagaggatgatgaccagaaggccgtgaaggatgaactctag

SEQ ID NO: 17119 - DNA, 1356 bp, Artificial Sequence
  derived and/or modified sequence
atgctgcggcgagccctcctctgcctggcagtggctgccctagtgcgagctgacgcgcccgaagaggaagaccacgttctggtgcttcggaaaagcaatttcgctgaagctttagctgctcataagtacttgctagtggagttttacgcaccctggtgcggccactgtaaagctctcgccccggaatacgcaaaggcagccggcaaactaaaagcagaagggtctgaaatccgcttagcaaaagtggatgcgacagaagaatcggacctggctcagcagtacggcgtgcgtggttaccctacaatcaaattctttagaaacggcgacaccgcaagccccaaggaatatactgcggggagagaagcagacgacatcccttttgggatcaccagcaattccgatgttttttcgaaataccaactggacaaagacggggtggttctcttcaagaagttcgacgagggcaggaataactttgaaggtgaagtgacaaaggaaaacctgctggactttatcaaacataaccaactcccactggttattgagtttacagagcagactgcacccaaaatcttcggtggcgaaatcaagacgcacatcctcttatttctgcctaagagcgtttccgactatgacgggaagctgtctaatttcaagactgcagccgaatcctttaagggcaaaattctgttcatctttatagactcagatcacactgacaatcagaggatattagagttttttggattgaaaaaagaagagtgccctgcagtacgcctgatcacccttgaggaagagatgactaagtacaaacccgagagcgaggaactgaccgcagaaaggatcaccgagttctgccaccggtttctggagggaaagattaaacctcacttgatgagccaggagctcccggaggactgggataagcagcccgtgaaagttttggttggcaaaaactttgaggacgtagcttttgatgaaaagaagaatgtgttcgttgagttttacgccccctggtgcggccattgtaagcagttggctcccatttgggataagctcggggaaacctataaggaccatgaaaatatcgtgatagccaaaatggattccactgcgaacgaagttgaagcagttaaagttcattctttccccacattgaaatttttccccgcaagtgcggaccgcactgtgattgactataacggcgaacggacactggatggctttaagaagttcctcgaaagcggcgggcaggacggggctggtgacgacgatgacttggaggaccttgaggaagcagaggagccggacatggaggaagatgacgaccaaaaggcagtcaaggatgagctgtag

SEQ ID NO: 17120 - DNA, 1527 bp, Artificial Sequence
  derived and/or modified sequence
atgctgcggcgggccctgctgtgcctggccgtggccgccctggtgcgggcagatgcccctgaggaggaggaccacgtgctggtgctgaggaagagcaactttgctgaggccctggccgcccacaagtacctgctggtggagttctacgccccctggtgtggccactgcaaggccctggccccagaatatgccaaggctgctgggaagctgaaggccgagggcagcgagatccggctggccaaggtggatgccacagaggagagtgacctggcccagcagtatggagtgcggggctaccccaccatcaagttcttcagaaatggagacacagccagccccaaggagtacacagctggccgggaggctgatgacatcgtgaactggctgaagaagaggactggacctgctgccaccaccctgcctgatggagctgctgctgagagcctggtggagagcagcgaggtggccgtcatcggcttcttcaaggatgtggagagtgacagcgccaagcagttcctgcaggccgctgaggccattgatgacatccccttcggcatcaccagcaacagtgatgtgttcagcaagtaccagctggacaaggatggagtggtgctcttcaagaagtttgatgagggcaggaacaactttgaaggagaggtgaccaaggagaacctgctggacttcatcaagcacaaccagctgcccctggtgattgagttcacagagcagacagcccccaagatctttggaggagagatcaagacccacatcctgctcttcctgcccaagtctgtgtctgactatgatggcaagctgagcaacttcaagacagctgctgagagcttcaagggcaagatcctcttcatcttcatcgacagcgaccacacagacaaccagaggatcctggagttcttcggcctgaagaaggaggagtgcccagctgtgcggctcatcaccctggaggaggagatgaccaagtacaagccagagagcgaggagctgacagctgagcgcatcacagagttctgccaccgcttcctggagggcaagatcaagccccacctgatgagccaggagctgcctgaggactgggacaagcagcctgtgaaggtgctggtgggcaagaactttgaagatgtggcctttgatgagaagaagaatgtgtttgtggagttctacgccccctggtgtggccactgcaagcagctggcccccatctgggacaagctgggggagacctacaaggaccacgagaacatcgtcatcgccaagatggacagcacagccaatgaggtggaggccgtgaaggtgcacagcttccccaccctgaagttcttccctgccagcgctgacagaacagtgattgactacaacggggagaggaccctggatggcttcaagaagttcctggagagcggcggccaggatggagctggagatgatgatgacctggaggacctggaggaggccgaggagccagacatggaggaggatgatgaccagaaggctgtgaaggatgagctgtag

SEQ ID NO: 17121 - DNA, 1479 bp, Artificial Sequence
  derived and/or modified sequence
atgctgcggcgggccctgctgtgcctggccgtggccgccctggtgcgggcagatgcccctgaggaggaggaccacaagtacctgctggtggagttctacgccccctggtgtggccactgcaaggccctggccccagaatatgccaaggctgctgggaagctgaaggccgagggcagcgagatccggctggccaaggtggatgccacagaggagagtgacctggcccagcagtatggagtgcggggctaccccaccatcaagttcttcagaaatggagacacagccagccccaaggagtacacagctggccgggaggctgatgacatcgtgaactggctgaagaagaggactggacctgctgccaccaccctgcctgatggagctgctgctgagagcctggtggagagcagcgaggtggccgtcatcggcttcttcaaggatgtggagagtgacagcgccaagcagttcctgcaggccgctgaggccattgatgacatccccttcggcatcaccagcaacagtgatgtgttcagcaagtaccagctggacaaggatggagtggtgctcttcaagaagtttgatgagggcaggaacaactttgaaggagaggtgaccaaggagaacctgctggacttcatcaagcacaaccagctgcccctggtgattgagttcacagagcagacagcccccaagatctttggaggagagatcaagacccacatcctgctcttcctgcccaagtctgtgtctgactatgatggcaagctgagcaacttcaagacagctgctgagagcttcaagggcaagatcctcttcatcttcatcgacagcgaccacacagacaaccagaggatcctggagttcttcggcctgaagaaggaggagtgcccagctgtgcggctcatcaccctggaggaggagatgaccaagtacaagccagagagcgaggagctgacagctgagcgcatcacagagttctgccaccgcttcctggagggcaagatcaagccccacctgatgagccaggagctgcctgaggactgggacaagcagcctgtgaaggtgctggtgggcaagaactttgaagatgtggcctttgatgagaagaagaatgtgtttgtggagttctacgccccctggtgtggccactgcaagcagctggcccccatctgggacaagctgggggagacctacaaggaccacgagaacatcgtcatcgccaagatggacagcacagccaatgaggtggaggccgtgaaggtgcacagcttccccaccctgaagttcttccctgccagcgctgacagaacagtgattgactacaacggggagaggaccctggatggcttcaagaagttcctggagagcggcggccaggatggagctggagatgatgatgacctggaggacctggaggaggccgaggagccagacatggaggaggatgatgaccagaaggctgtgaaggatgagctgtag

SEQ ID NO: 17122 - DNA, 1356 bp, Artificial Sequence
  derived and/or modified sequence
atgctgcggcgggccctgctgtgcctggccgtggccgccctggtgcgggcagatgcccctgaggaggaggaccacgtgctggtgctgaggaagagcaactttgctgaggccctggccgcccacaagtacctgctggtggagttctacgccccctggtgtggccactgcaaggccctggccccagaatatgccaaggctgctgggaagctgaaggccgagggcagcgagatccggctggccaaggtggatgccacagaggagagtgacctggcccagcagtatggagtgcggggctaccccaccatcaagttcttcagaaatggagacacagccagccccaaggagtacacagctggccgggaggctgatgacatccccttcggcatcaccagcaacagtgatgtgttcagcaagtaccagctggacaaggatggagtggtgctcttcaagaagtttgatgagggcaggaacaactttgaaggagaggtgaccaaggagaacctgctggacttcatcaagcacaaccagctgcccctggtgattgagttcacagagcagacagcccccaagatctttggaggagagatcaagacccacatcctgctcttcctgcccaagtctgtgtctgactatgatggcaagctgagcaacttcaagacagctgctgagagcttcaagggcaagatcctcttcatcttcatcgacagcgaccacacagacaaccagaggatcctggagttcttcggcctgaagaaggaggagtgcccagctgtgcggctcatcaccctggaggaggagatgaccaagtacaagccagagagcgaggagctgacagctgagcgcatcacagagttctgccaccgcttcctggagggcaagatcaagccccacctgatgagccaggagctgcctgaggactgggacaagcagcctgtgaaggtgctggtgggcaagaactttgaagatgtggcctttgatgagaagaagaatgtgtttgtggagttctacgccccctggtgtggccactgcaagcagctggcccccatctgggacaagctgggggagacctacaaggaccatgaaaatattgtgattgccaagatggacagcacagccaatgaggtggaggccgtgaaggtgcacagcttccccaccctgaagttcttccctgccagcgctgacagaactgtcatcgactacaatggagagaggaccctggatggcttcaagaagttcctggagagcggcggccaggatggagctggagatgatgatgacctggaggacctggaggaggccgaggagccagacatggaggaggatgatgaccagaaggctgtgaaggatgagctgtag

SEQ ID NO: 17123 - DNA, 1527 bp, Artificial Sequence
  derived and/or modified sequence
atgctgcggcgggccctgctgtgcctggccgtggccgccctggtgcgggcagatgctccagaggaagaagaccacgttttggtgttgagaaaaagtaatttcgcagaggcacttgccgctcataagtatctgctcgtggaattctatgccccgtggtgtgggcattgtaaagctctggctcccgaatatgccaaggccgcggggaagttgaaagcagagggaagcgagattaggctagcaaaggtagatgccacagaggagtccgacttagcccaacagtacggcgtgcgcggatatcccacaatcaaatttttcagaaatggagataccgctagccccaaggagtatacagccggcagggaggccgacgatattgtgaactggctcaagaaacgcacggggcctgcagccactactcttcccgacggagccgcagccgagagcctggtcgaatcttctgaggtcgcagtcatcggcttcttcaaagacgtcgagagcgactccgctaaacagttcctgcaggccgctgaagctatagatgatatcccatttggcatcacctcaaatagcgatgtgttcagtaaataccagctggacaaggacggggtggtactgtttaagaagtttgacgagggcagaaataattttgagggagaggttaccaaggaaaatcttttggatttcatcaagcacaatcagttaccattagtcattgaattcactgaacagactgcgccaaaaatcttcggtggtgagattaagacccatatccttctgtttctgcccaaatccgtctctgattacgatgggaaacttagtaatttcaagacggccgccgagtcgttcaaaggcaagatcctgttcattttcatcgatagcgatcatacagataaccagaggattctggaattttttgggctgaaaaaggaagaatgccctgccgtgcgcctaattactctagaagaggaaatgactaagtacaagcctgaaagcgaggaattaaccgccgaacggattacagagttttgccaccggttcctggaagggaaaataaaaccacatctgatgagccaagaactgccagaagactgggataaacagccagttaaggtcctagtgggcaagaatttcgaggacgtggctttcgatgaaaagaaaaatgtgttcgtggagttttatgccccctggtgcggccattgtaagcagctggcaccaatatgggataagctcggcgaaacatataaggatcacgagaatatcgtgatcgccaaaatggactccacagcaaacgaggtcgaggccgtgaaggtgcacagcttcccaacgctgaagttttttcccgcgtcagctgaccgtacagtcattgactacaatggcgagcgcaccttggatggattcaaaaaatttctggaaagcggtgggcaggacggagcgggcgatgacgacgacttggaggacctggaggaggccgaggaaccagatatggaagaggatgatgaccagaaagccgtaaaggatgagctgtag

SEQ ID NO: 17124 - DNA, 1479 bp, Artificial Sequence
  derived and/or modified sequence
atgctgcggcgggccctgctgtgcctggccgtggccgccctggtgcgtgccgatgccccggaggaggaagatcacaagtacctgttggttgagttctacgcaccatggtgtggccactgtaaggcgctggcccctgaatacgcaaaggccgcaggtaaactaaaagccgaaggttcagaaatccggcttgccaaggtcgatgctacagaggagagtgatctggcccagcagtacggagtgcgtgggtacccaacaatcaaattcttcagaaatggcgacactgctagccctaaggaatacaccgctggcagggaggctgatgacatcgtcaactggctgaagaagcgcaccggccctgcagccaccactctgccggacggggccgcagccgaatctctggttgagagctctgaggtggctgttatcggcttcttcaaggacgttgagtcggactctgctaagcagtttttgcaggcagctgaggctattgatgacattccattcggcatcaccagtaatagcgatgttttcagcaagtatcagctggataaagatggggttgtattgtttaagaaatttgacgagggtagaaataattttgagggagaagtgacaaaagagaacctgcttgattttattaaacacaatcagcttcccctcgtgatcgagtttactgagcaaactgcccctaagatctttggcggggagatcaaaacccacatcctgctcttcttgccaaagtccgtgagtgactacgatggcaagttgagtaatttcaagaccgctgccgaatctttcaaggggaagatcttatttatatttatagactccgatcataccgacaatcagaggatccttgagttttttgggctgaaaaaagaagaatgcccagccgtgagacttattaccctcgaagaggaaatgactaagtataagcctgaaagcgaggagcttaccgcggagcgtattaccgagttttgccacagattcctagaaggtaaaattaagcctcacctgatgtctcaggagctccccgaggactgggacaaacagccggtgaaagtcttggtgggcaaaaatttcgaggatgtggcttttgatgagaagaagaacgtgtttgtggagttttatgctccctggtgcggccactgtaaacagctagcaccaatatgggataaactcggtgaaacctacaaagatcacgaaaatatcgtcattgcaaagatggattcaactgctaatgaggtcgaggctgttaaggtgcactctttcccaactctgaaattctttcctgcgagtgccgatcggactgtcattgactacaatggggaaaggacactggatggcttcaagaaattcctggagtccggcggacaagacggcgcaggcgatgacgatgatctcgaagatcttgaggaggcagaagagcctgacatggaggaggacgatgaccagaaagctgttaaagatgaactgtag

SEQ ID NO: 17125 - DNA, 1356 bp, Artificial Sequence
  derived and/or modified sequence
atgctgcggcgggccctgctgtgcctggccgtggccgccctggtgagagccgatgctccggaggaagaagatcatgtcctcgtactacgaaagtcaaacttcgccgaggccttggcagcacacaagtatctgcttgtcgaattctatgccccatggtgcggacattgcaaggccctggcccctgagtatgctaaggcagctgggaagttgaaggcggaggggagcgagataaggctggccaaggtggacgccactgaggagtccgacttggcccagcagtatggggtgagaggctaccctacgattaagttcttcaggaatggcgacacggccagtcccaaggagtataccgcagggcgggaggctgacgacatcccgtttggcattacttcaaatagtgacgtgtttagcaagtaccaattggacaaagatggagtggtgcttttcaagaaattcgacgagggtcggaataattttgagggggaagttactaaagaaaacctattggactttatcaagcacaatcaactgccacttgtgatcgagtttaccgagcagaccgcacctaagatttttggcggcgaaattaagactcacatattgttgtttctgccaaagtctgtgagcgactatgatgggaagttgagtaattttaagaccgccgctgagtccttcaagggaaagattctgtttatcttcatcgactccgaccacaccgacaatcaacgaatcctggagttttttggacttaaaaaggaggaatgtcccgcggtgcgcctgatcacgctggaggaggaaatgaccaagtacaagccggaaagcgaggaacttacggcagaaagaatcactgaattttgtcatcggtttctggaagggaagatcaagccacacctcatgagccaggaactgcccgaagattgggataaacagcctgtgaaggttctcgtgggtaagaatttcgaggacgtcgcctttgatgaaaaaaagaacgtcttcgtagagttctatgcaccctggtgtggccactgcaagcagctcgcccctatctgggacaaactcggcgaaacctataaggaccatgagaatattgtgatcgcaaagatggattcaaccgcgaatgaggtggaagccgtcaaagttcacagcttccccacactgaagttcttccccgcatcagctgatcgcacagtcatcgattacaacggcgagcgcacacttgatgggttcaagaagttcctggagtccggcggccaggatggggctggagatgatgacgacctcgaagacttagaggaggccgaagagccagatatggaggaagatgatgaccagaaggccgtgaaagacgaattgtag

SEQ ID NO: 17126 - DNA, 1527 bp, Artificial Sequence
  derived and/or modified sequence
atgctgcgccgtgcactgttgtgtctcgccgtggctgctcttgtgcgcgcagatgctccagaggaggaagaccacgtgctggtgctgcgcaaaagcaacttcgcagaagcgttggccgctcataagtatcttctcgtcgaattttatgccccttggtgcggccactgcaaagctctggctccagagtacgcaaaggccgctggcaagctgaaggctgagggctccgagatccggctggcaaaggttgatgccacagaagagtctgatctggcacaacagtatggagtgagaggttacccgacgattaagtttttccgcaacggggacactgcctcacccaaagaatatacagccggtagagaagcagatgacattgtgaactggctaaagaaacggaccggtccagctgcaactacacttcctgacggggcagccgcagagagtctggtggagagttctgaggtggccgttattggattttttaaggacgtggaaagcgactccgctaagcagttcctgcaggcagcagaggcgatcgacgatattccatttggcattacttctaacagtgatgtattttctaagtaccaattagacaaagatggggtggtcctgttcaagaagttcgacgaaggacgcaacaactttgagggcgaggtgacaaaggagaatctactggattttatcaaacacaaccaactgcctctggtcattgaattcacagagcagaccgccccaaagatatttggcggtgagattaagacccacatactgctctttctgcccaaaagtgtttcagactatgacgggaagttgtcgaacttcaagacagccgcagaatcattcaaaggcaagatcctgtttatattcattgactcagatcataccgacaaccagcgtatcctcgagttttttggactcaaaaaagaagagtgccctgctgttaggctgattacattggaagaggagatgacaaagtacaaaccggagagcgaggagctgactgccgagcggattaccgaattctgccacagattcctcgaaggtaagatcaagccccaccttatgtcacaagagctaccagaggactgggacaaacagccggtgaaggtgctcgtcgggaagaacttcgaagatgtggcctttgatgagaagaagaacgtgtttgtggagttctacgctccatggtgtggacactgcaaacagttggcccctatttgggataaattgggcgaaacctataaggatcatgaaaatattgtgatagctaagatggacagcaccgcgaatgaagtagaggctgtaaaggtgcatagttttccaactctgaaattcttccccgcaagtgcagatcggacagtcattgattacaacggagagcggaccttggatggatttaagaaattccttgaaagcggtggtcaggatggcgcaggagacgacgacgatctggaggatctcgaagaagcagaggagcccgatatggaagaagatgatgaccagaaggcggtaaaggacgagctctag

SEQ ID NO: 17127 - DNA, 1479 bp, Artificial Sequence
  derived and/or modified sequence
atgctgaggcgggcactcctctgcctggcggtggctgcactggttcgagccgatgccccagaggaagaggaccacaaatatctgcttgtcgagttctatgccccttggtgcggccattgcaaggcactggctcctgaatatgcaaaggccgctggaaagctgaaggctgaaggcagtgaaattagactagccaaagtcgacgccactgaggagtctgatttagcacaacagtatggcgtcaggggctaccccacaatcaaattctttcggaacggagacactgctagccctaaagagtatacagccggaagagaggctgatgacattgttaactggctcaaaaaacgaaccggccctgcggctacaacgctgcccgatggagcggcagctgagtccctggtcgagagttctgaagtagccgtgataggttttttcaaagacgttgaatctgactcagcaaaacagttccttcaggctgctgaggcgatcgatgatatcccatttggaataacttcaaactcggacgttttttccaaataccaactggacaaggatggagtcgtcctctttaagaagttcgacgagggcagaaataatttcgagggggaggtaaccaaggaaaatctcctcgacttcattaaacacaaccaactgcctctggtgattgaatttaccgaacagacagctccaaaaatctttggtggagagattaagacccacattctactgttcctgccgaagtcagtcagtgactatgatgggaagctgtcaaactttaagaccgctgccgagagcttcaagggaaaaatattgttcatcttcatcgattctgatcacacagataaccagcgaatcttggagttctttggcctgaaaaaggaggaatgccctgcagtgcggttgatcacgttggaggaagagatgactaaatataaacctgaaagcgaagagctgacagccgaacgcattactgagttttgccaccgctttcttgagggtaaaattaaacctcaccttatgtcgcaggagctgcccgaggattgggacaagcagcccgtgaaggtcctcgtcggcaagaacttcgaagatgtggcttttgacgagaagaaaaacgtgttcgtcgagttctacgctccgtggtgtggacactgcaaacaactggccccaatatgggacaagctgggagagacttataaggatcacgagaacatcgtgattgcaaaaatggattctaccgcaaatgaagtggaggcggtaaaagtgcacagtttccctaccctcaaattctttccagcctcagccgaccgtacggtcattgactacaatggggaacgaacgctcgacgggttcaagaagtttctagaaagcggcggacaagatggcgcaggggatgatgatgacctggaggatctggaagaagctgaggaacctgatatggaggaggacgacgaccagaaggctgtgaaagatgagctgtag

SEQ ID NO: 17128 - DNA, 1356 bp, Artificial Sequence
  derived and/or modified sequence
atgttacgccgagccctgttgtgcctcgcagtggctgccctggtgcgcgcagatgctccggaagaagaggaccacgtgctggtgctccgcaaatcgaatttcgctgaggccctcgccgcacacaagtacctgcttgttgagttttatgccccatggtgtggtcattgtaaagcgctggctccagagtatgcgaaggccgctgggaagttgaaagcagagggctctgaaattcgcctggctaaagtcgacgccacagaagagtcagacctggctcagcaatacggggtaaggggctatcctacaatcaaattcttccgcaacggcgacacagcttcccccaaggaatataccgctggaagggaagccgacgatatcccatttggtatcaccagcaacagcgatgtcttctcaaagtaccaactggataaagatggtgtggtgctatttaagaagtttgacgagggcaggaacaactttgaaggcgaagtaactaaggaaaacctgctggatttcattaaacataatcagctacccctggtgatagaatttaccgagcagaccgccccaaagatcttcggtggggagatcaagacccatatacttctgttcctgcctaagtctgtctctgactacgacgggaaacttagtaactttaagactgccgctgagtcctttaagggcaagatcttgtttatattcatagacagcgatcacaccgataatcagcggatactggagttcttcgggttaaaaaaagaggaatgtcctgccgtcagattaattacgcttgaagaggagatgaccaaatacaagcctgagagtgaggaattaaccgctgaaaggatcacagagttctgtcatcggtttcttgaagggaaaatcaaaccacatctgatgagtcaggaacttcccgaggattgggacaagcaaccagtgaaggttctggtcggtaaaaatttcgaggacgtggctttcgatgagaaaaagaatgttttcgtagaattctacgccccatggtgcggacactgcaaacaacttgctcccatctgggacaagctgggggaaacttacaaggaccatgagaacattgtcattgcgaagatggactccaccgccaacgaggtggaagctgtcaaggttcacagttttcctactctgaagttcttcccagcctcagccgacaggactgttattgactacaatggcgaaagaaccctcgatgggttcaaaaagtttttagagtcaggagggcaggatggcgcaggggacgatgacgacttggaggatctcgaagaggctgaggagccagatatggaggaagatgatgatcagaaagccgtgaaggatgagctctag

SEQ ID NO: 17129 - DNA, 2576 bp, Artificial Sequence
  derived and/or modified sequence
cgagcctcgaagtccgccggccaatcgaaggcgggccccagcggcgcgtgcgcgccgcggccagcgcgcgcgggcgggggggcaggcgcgccccggacccaggatttataaaggcgaggccgggaccggcgcgcgctctcgtcgcccccgctgtcccggcggcgccaaccgaagcgccccgcctgatccgtgtccgacatgctgcgccgcgctctgctgtgcctggccgtggccgccctggtgcgcgccgacgcccccgaggaggaggaccacgtcctggtgctgcggaaaagcaacttcgcggaggcgctggcggcccacaagtacctgctggtggagttctatgccccttggtgtggccactgcaaggctctggcccctgagtatgccaaagccgctgggaagctgaaggcagaaggttccgagatcaggttggccaaggtggacgccacggaggagtctgacctggcccagcagtacggcgtgcgcggctatcccaccatcaagttcttcaggaatggagacacggcttcccccaaggaatatacagctggcagagaggctgatgacatcgtgaactggctgaagaagcgcacgggcccggctgccaccaccctgcctgacggcgcagctgcagagtccttggtggagtccagcgaggtggctgtcatcggcttcttcaaggacgtggagtcggactctgccaagcagtttttgcaggcagcagaggccatcgatgacataccatttgggatcacttccaacagtgacgtgttctccaaataccagctcgacaaagatggggttgtcctctttaagaagtttgatgaaggccggaacaactttgaaggggaggtcaccaaggagaacctgctggactttatcaaacacaaccagctgccccttgtcatcgagttcaccgagcagacagccccgaagatttttggaggtgaaatcaagactcacatcctgctgttcttgcccaagagtgtgtctgactatgacggcaaactgagcaacttcaaaacagcagccgagagcttcaagggcaagatcctgttcatcttcatcgacagcgaccacaccgacaaccagcgcatcctcgagttctttggcctgaagaaggaagagtgcccggccgtgcgcctcatcaccctggaggaggagatgaccaagtacaagcccgaatcggaggagctgacggcagagaggatcacagagttctgccaccgcttcctggagggcaaaatcaagccccacctgatgagccaggagctgccggaggactgggacaagcagcctgtcaaggtgcttgttgggaagaactttgaagacgtggcttttgatgagaaaaaaaacgtctttgtggagttctatgccccatggtgtggtcactgcaaacagttggctcccatttgggataaactgggagagacgtacaaggaccatgagaacatcgtcatcgccaagatggactcgactgccaacgaggtggaggccgtcaaagtgcacagcttccccacactcaagttctttcctgccagtgccgacaggacggtcattgattacaacggggaacgcacgctggatggttttaagaaattcctggagagcggtggccaggatggggcaggggatgatgacgatctcgaggacctggaagaagcagaggagccagacatggaggaagacgatgatcagaaagctgtgaaagatgaactgtaatacgcaaagccagacccgggcgctgccgagacccctcgggggctgcacacccagcagcagcgcacgcctccgaagcctgcggcctcgcttgaaggagggcgtcgccggaaacccagggaacctctctgaagtgacacctcacccctacacaccgtccgttcacccccgtctcttccttctgcttttcggtttttggaaagggatccatctccaggcagcccaccctggtggggcttgtttcctgaaaccatgatgtactttttcatacatgagtctgtccagagtgcttgctaccgtgttcggagtctcgctgcctccctcccgcgggaggtttctcctctttttgaaaattccgtctgtgggatttttagacatttttcgacatcagggtatttgttccaccttggccaggcctcctcggagaagcttgtcccccgtgtgggagggacggagccggactggacatggtcactcagtaccgcctgcagtgtcgccatgactgatcatggctcttgcatttttgggtaaatggagacttccggatcctgtcagggtgtcccccatgcctggaagaggagctggtggctgccagccctggggcccggcacaggcctgggccttccccttccctcaagccagggctcctcctcctgtcgtgggctcattgtgaccactggcctctctacagcacggcctgtggcctgttcaaggcagaaccacgacccttgactcccgggtggggaggtggccaaggatgctggagctgaatcagacgctgacagttcttcaggcatttctatttcacaatcgaattgaacacattggccaaataaagttgaaattttaccacc

SEQ ID NO: 17130 - DNA, 2022 bp, Artificial Sequence
  derived and/or modified sequence
cgctctcgtcgcccccgctgtcccggcggcgccaaccgaagcgccccgcctgatccgtgtccgacatgctgcgccgcgctctgctgtgcctggccgtggccgccctggtgcgcgccgacgcccccgaggaggaggaccacaagtacctgctggtggagttctatgccccttggtgtggccactgcaaggctctggcccctgagtatgccaaagccgctgggaagctgaaggcagaaggttccgagatcaggttggccaaggtggacgccacggaggagtctgacctggcccagcagtacggcgtgcgcggctatcccaccatcaagttcttcaggaatggagacacggcttcccccaaggaatatacagctggcagagaggctgatgacatcgtgaactggctgaagaagcgcacgggcccggctgccaccaccctgcctgacggcgcagctgcagagtccttggtggagtccagcgaggtggctgtcatcggcttcttcaaggacgtggagtcggactctgccaagcagtttttgcaggcagcagaggccatcgatgacataccatttgggatcacttccaacagtgacgtgttctccaaataccagctcgacaaagatggggttgtcctctttaagaagtttgatgaaggccggaacaactttgaaggggaggtcaccaaggagaacctgctggactttatcaaacacaaccagctgccccttgtcatcgagttcaccgagcagacagccccgaagatttttggaggtgaaatcaagactcacatcctgctgttcttgcccaagagtgtgtctgactatgacggcaaactgagcaacttcaaaacagcagccgagagcttcaagggcaagatcctgttcatcttcatcgacagcgaccacaccgacaaccagcgcatcctcgagttctttggcctgaagaaggaagagtgcccggccgtgcgcctcatcaccctggaggaggagatgaccaagtacaagcccgaatcggaggagctgacggcagagaggatcacagagttctgccaccgcttcctggagggcaaaatcaagccccacctgatgagccaggagctgccggaggactgggacaagcagcctgtcaaggtgcttgttgggaagaactttgaagacgtggcttttgatgagaaaaaaaacgtctttgtggagttctatgccccatggtgtggtcactgcaaacagttggctcccatttgggataaactgggagagacgtacaaggaccatgagaacatcgtcatcgccaagatggactcgactgccaacgaggtggaggccgtcaaagtgcacagcttccccacactcaagttctttcctgccagtgccgacaggacggtcattgattacaacggggaacgcacgctggatggttttaagaaattcctggagagcggtggccaggatggggcaggggatgatgacgatctcgaggacctggaagaagcagaggagccagacatggaggaagacgatgatcagaaagctgtgaaagatgaactgtaatacgcaaagccagacccgggcgctgccgagacccctcgggggctgcacacccagcagcagcgcacgcctccgaagcctgcggcctcgcttgaaggagggcgtcgccggaaacccagggaacctctctgaagtgacacctcacccctacacaccgtccgttcacccccgtctcttccttctgcttttcggtttttggaaagggatccatctccaggcagcccaccctggtggggcttgtttcctgaaaccatgatgtactttttcatacatgagtctgtccagagtgcttgctaccgtgttcggagtctcgctgcctccctcccgcgggaggtttctcctctttttgaaaattccgtctgtgggatttttagacatttttcgacatcagggtatttgttccaccttggccaggcctcctcggagaagcttgtcccccgtgtgggagggacggagccggactggacatggtcactcagta

SEQ ID NO: 17131 - DNA, 1737 bp, Artificial Sequence
  derived and/or modified sequence
tttataaaggcgaggccgggaccggcgcgcgctctcgtcgcccccgctgtcccggcggcgccaaccgaagcgccccgcctgatccgtgtccgacatgctgcgccgcgctctgctgtgcctggccgtggccgccctggtgcgcgccgacgcccccgaggaggaggaccacgtcctggtgctgcggaaaagcaacttcgcggaggcgctggcggcccacaagtacctgctggtggagttctatgccccttggtgtggccactgcaaggctctggcccctgagtatgccaaagccgctgggaagctgaaggcagaaggttccgagatcaggttggccaaggtggacgccacggaggagtctgacctggcccagcagtacggcgtgcgcggctatcccaccatcaagttcttcaggaatggagacacggcttcccccaaggaatatacagctggcagagaggctgatgacataccatttgggatcacttccaacagtgacgtgttctccaaataccagctcgacaaagatggggttgtcctctttaagaagtttgatgaaggccggaacaactttgaaggggaggtcaccaaggagaacctgctggactttatcaaacacaaccagctgccccttgtcatcgagttcaccgagcagacagccccgaagatttttggaggtgaaatcaagactcacatcctgctgttcttgcccaagagtgtgtctgactatgacggcaaactgagcaacttcaaaacagcagccgagagcttcaagggcaagatcctgttcatcttcatcgacagcgaccacaccgacaaccagcgcatcctcgagttctttggcctgaagaaggaagagtgcccggccgtgcgcctcatcaccctggaggaggagatgaccaagtacaagcccgaatcggaggagctgacggcagagaggatcacagagttctgccaccgcttcctggagggcaaaatcaagccccacctgatgagccaggagctgccggaggactgggacaagcagcctgtcaaggtgcttgttgggaagaactttgaagacgtggcttttgatgagaaaaaaaacgtctttgtggagttctatgccccatggtgtggtcactgcaaacagttggctcccatttgggataaactgggagagacgtacaaggaccatgagaacatcgtcatcgccaagatggactcgactgccaacgaggtggaggccgtcaaagtgcacagcttccccacactcaagttctttcctgccagtgccgacaggacggtcattgattacaacggggaacgcacgctggatggttttaagaaattcctggagagcggtggccaggatggggcaggggatgatgacgatctcgaggacctggaagaagcagaggagccagacatggaggaagacgatgatcagaaagctgtgaaagatgaactgtaatacgcaaagccagacccgggcgctgccgagacccctcgggggctgcacacccagcagcagcgcacgcctccgaagcctgcggcctcgctttttgaaaattccgtctgtgggatttttagacatttttcgacatcagggtatttgttccaccttggccaggcctcctcggagaagcttgtcccccgtgtgggagggacggagccggactggacatggtcactcagtaccgcctgcagtgtcgccatgactgatcatggctcttgcatttttgggtaaatggagacttc

SEQ ID NO: 17132 - DNA, 1527 bp, Artificial Sequence
  derived and/or modified sequence
atgctgagaagagccctgctgtgcctggccgtggccgccctggtgagagccgacgcccccgaggaggaggaccacgtgctggtgctgagaaagagcaacttcgccgaggccctggccgcccacaagtacctgctggtggagttctacgccccctggtgcggccactgcaaggccctggcccccgagtacgccaaggccgccggcaagctgaaggccgagggcagcgagatcagactggccaaggtggacgccaccgaggagagcgacctggcccagcagtacggcgtgagaggctaccccaccatcaagttcttcagaaacggcgacaccgccagccccaaggagtacaccgccggcagagaggccgacgacatcgtgaactggctgaagaagagaaccggccccgccgccaccaccctgcccgacggcgccgccgccgagagcctggtggagagcagcgaggtggccgtgatcggcttcttcaaggacgtggagagcgacagcgccaagcagttcctgcaggccgccgaggccatcgacgacatccccttcggcatcaccagcaacagcgacgtgttcagcaagtaccagctggacaaggacggcgtggtgctgttcaagaagttcgacgagggcagaaacaacttcgagggcgaggtgaccaaggagaacctgctggacttcatcaagcacaaccagctgcccctggtgatcgagttcaccgagcagaccgcccccaagatcttcggcggcgagatcaagacccacatcctgctgttcctgcccaagagcgtgagcgactacgacggcaagctgagcaacttcaagaccgccgccgagagcttcaagggcaagatcctgttcatcttcatcgacagcgaccacaccgacaaccagagaatcctggagttcttcggcctgaagaaggaggagtgccccgccgtgagactgatcaccctggaggaggagatgaccaagtacaagcccgagagcgaggagctgaccgccgagagaatcaccgagttctgccacagattcctggagggcaagatcaagccccacctgatgagccaggagctgcccgaggactgggacaagcagcccgtgaaggtgctggtgggcaagaacttcgaggacgtggccttcgacgagaagaagaacgtgttcgtggagttctacgccccctggtgcggccactgcaagcagctggcccccatctgggacaagctgggcgagacctacaaggaccacgagaacatcgtgatcgccaagatggacagcaccgccaacgaggtggaggccgtgaaggtgcacagcttccccaccctgaagttcttccccgccagcgccgacagaaccgtgatcgactacaacggcgagagaaccctggacggcttcaagaagttcctggagagcggcggccaggacggcgccggcgacgacgacgacctggaggacctggaggaggccgaggagcccgacatggaggaggacgacgaccagaaggccgtgaaggacgagctgtag

SEQ ID NO: 17133 - DNA, 1479 bp, Artificial Sequence
  derived and/or modified sequence
atgctgagaagagccctgctgtgcctggccgtggccgccctggtgagagccgacgcccccgaggaggaggaccacaagtacctgctggtggagttctacgccccctggtgcggccactgcaaggccctggcccccgagtacgccaaggccgccggcaagctgaaggccgagggcagcgagatcagactggccaaggtggacgccaccgaggagagcgacctggcccagcagtacggcgtgagaggctaccccaccatcaagttcttcagaaacggcgacaccgccagccccaaggagtacaccgccggcagagaggccgacgacatcgtgaactggctgaagaagagaaccggccccgccgccaccaccctgcccgacggcgccgccgccgagagcctggtggagagcagcgaggtggccgtgatcggcttcttcaaggacgtggagagcgacagcgccaagcagttcctgcaggccgccgaggccatcgacgacatccccttcggcatcaccagcaacagcgacgtgttcagcaagtaccagctggacaaggacggcgtggtgctgttcaagaagttcgacgagggcagaaacaacttcgagggcgaggtgaccaaggagaacctgctggacttcatcaagcacaaccagctgcccctggtgatcgagttcaccgagcagaccgcccccaagatcttcggcggcgagatcaagacccacatcctgctgttcctgcccaagagcgtgagcgactacgacggcaagctgagcaacttcaagaccgccgccgagagcttcaagggcaagatcctgttcatcttcatcgacagcgaccacaccgacaaccagagaatcctggagttcttcggcctgaagaaggaggagtgccccgccgtgagactgatcaccctggaggaggagatgaccaagtacaagcccgagagcgaggagctgaccgccgagagaatcaccgagttctgccacagattcctggagggcaagatcaagccccacctgatgagccaggagctgcccgaggactgggacaagcagcccgtgaaggtgctggtgggcaagaacttcgaggacgtggccttcgacgagaagaagaacgtgttcgtggagttctacgccccctggtgcggccactgcaagcagctggcccccatctgggacaagctgggcgagacctacaaggaccacgagaacatcgtgatcgccaagatggacagcaccgccaacgaggtggaggccgtgaaggtgcacagcttccccaccctgaagttcttccccgccagcgccgacagaaccgtgatcgactacaacggcgagagaaccctggacggcttcaagaagttcctggagagcggcggccaggacggcgccggcgacgacgacgacctggaggacctggaggaggccgaggagcccgacatggaggaggacgacgaccagaaggccgtgaaggacgagctgtag

SEQ ID NO: 17134 - DNA, 1356 bp, Artificial Sequence
  derived and/or modified sequence
atgctgagaagagccctgctgtgcctggccgtggccgccctggtgagagccgacgcccccgaggaggaggaccacgtgctggtgctgagaaagagcaacttcgccgaggccctggccgcccacaagtacctgctggtggagttctacgccccctggtgcggccactgcaaggccctggcccccgagtacgccaaggccgccggcaagctgaaggccgagggcagcgagatcagactggccaaggtggacgccaccgaggagagcgacctggcccagcagtacggcgtgagaggctaccccaccatcaagttcttcagaaacggcgacaccgccagccccaaggagtacaccgccggcagagaggccgacgacatccccttcggcatcaccagcaacagcgacgtgttcagcaagtaccagctggacaaggacggcgtggtgctgttcaagaagttcgacgagggcagaaacaacttcgagggcgaggtgaccaaggagaacctgctggacttcatcaagcacaaccagctgcccctggtgatcgagttcaccgagcagaccgcccccaagatcttcggcggcgagatcaagacccacatcctgctgttcctgcccaagagcgtgagcgactacgacggcaagctgagcaacttcaagaccgccgccgagagcttcaagggcaagatcctgttcatcttcatcgacagcgaccacaccgacaaccagagaatcctggagttcttcggcctgaagaaggaggagtgccccgccgtgagactgatcaccctggaggaggagatgaccaagtacaagcccgagagcgaggagctgaccgccgagagaatcaccgagttctgccacagattcctggagggcaagatcaagccccacctgatgagccaggagctgcccgaggactgggacaagcagcccgtgaaggtgctggtgggcaagaacttcgaggacgtggccttcgacgagaagaagaacgtgttcgtggagttctacgccccctggtgcggccactgcaagcagctggcccccatctgggacaagctgggcgagacctacaaggaccacgagaacatcgtgatcgccaagatggacagcaccgccaacgaggtggaggccgtgaaggtgcacagcttccccaccctgaagttcttccccgccagcgccgacagaaccgtgatcgactacaacggcgagagaaccctggacggcttcaagaagttcctggagagcggcggccaggacggcgccggcgacgacgacgacctggaggacctggaggaggccgaggagcccgacatggaggaggacgacgaccagaaggccgtgaaggacgagctgtag

SEQ ID NO: 17135 - protein, 1141 aa, Artificial Sequence
  derived and/or modified sequence
MAVPGDAARVRDKPVHSGVSQAPTAGRDCHHRADPASPRDSGCRGCWGDLVLQPLRSSRKLSSALCAGSLSFLLALLVRLVRGEVGCDLEQCKEAAAAEEEEAAPGAEGGVFPGPRGGAPGGGARLSPWLQPSALLFSLLCAFFWMGLYLLRAGVRLPLAVALLAACCGGEALVQIGLGVGEDHLLSLPAAGVVLSCLAAATWLVLRLRLGVLMIALTSAVRTVSLISLERFKVAWRPYLAYLAGVLGILLARYVEQILPQSAEAAPREHLGSQLIAGTKEDIPVFKRRRRSSSVVSAEMSGCSSKSHRRTSLPCIPREQLMGHSEWDHKRGPRGSQSSGTSITVDIAVMGEAHGLITDLLADPSLPPNVCTSLRAVSNLLSTQLTFQAIHKPRVNPVTSLSENYTCSDSEESSEKDKLAIPKRLRRSLPPGLLRRVSSTWTTTTSATGLPTLEPAPVRRDRSTSIKLQEAPSSSPDSWNNPVMMTLTKSRSFTSSYAISAANHVKAKKQSRPGALAKISPLSSPCSSPLQGTPASSLVSKISAVQFPESADTTAKQSLGSHRALTYTQSAPDLSPQILTPPVICSSCGRPYSQGNPADEPLERSGVATRTPSRTDDTAQVTSDYETNNNSDSSDIVQNEDETECLREPLRKASACSTYAPETMMFLDKPILAPEPLVMDNLDSIMEQLNTWNFPIFDLVENIGRKCGRILSQVSYRLFEDMGLFEAFKIPIREFMNYFHALEIGYRDIPYHNRIHATDVLHAVWYLTTQPIPGLSTVINDHGSTSDSDSDSGFTHGHMGYVFSKTYNVTDDKYGCLSGNIPALELMALYVAAAMHDYDHPGRTNAFLVATSAPQAVLYNDRSVLENHHAAAAWNLFMSRPEYNFLINLDHVEFKHFRFLVIEAILATDLKKHFDFVAKFNGKVNDDVGIDWTNENDRLLVCQMCIKLADINGPAKCKELHLQWTDGIVNEFYEQGDEEASLGLPISPFMDRSAPQLANLQESFISHIVGPLCNSYDSAGLMPGKWVEDSDESGDTDDPEEEEEEAPAPNEEETCENNESPKKKTFKRRKIYCQITQHLLQNHKMWKKVIEEEQRLAGIENQSLDQTPQSHSSEQIQAIKEEEEEKGKPRGEEIPTQKPDQ

SEQ ID NO: 17136 - DNA, 3426 bp, Artificial Sequence
  derived and/or modified sequence
atggccgtgcccggcgacgccgccagagtgagagacaagcccgtgcacagcggcgtgagccaggcccccaccgccggcagagactgccaccacagagccgaccccgccagccccagagacagcggctgcagaggctgctggggcgacctggtgctgcagcccctgagaagcagcagaaagctgagcagcgccctgtgcgccggcagcctgagcttcctgctggccctgctggtgagactggtgagaggcgaggtgggctgcgacctggagcagtgcaaggaggccgccgccgccgaggaggaggaggccgcccccggcgccgagggcggcgtgttccccggccccagaggcggcgcccccggcggcggcgccagactgagcccctggctgcagcccagcgccctgctgttcagcctgctgtgcgccttcttctggatgggcctgtacctgctgagagccggcgtgagactgcccctggccgtggccctgctggccgcctgctgcggcggcgaggccctggtgcagatcggcctgggcgtgggcgaggaccacctgctgagcctgcccgccgccggcgtggtgctgagctgcctggccgccgccacctggctggtgctgagactgagactgggcgtgctgatgatcgccctgaccagcgccgtgagaaccgtgagcctgatcagcctggagagattcaaggtggcctggagaccctacctggcctacctggccggcgtgctgggcatcctgctggccagatacgtggagcagatcctgccccagagcgccgaggccgcccccagagagcacctgggcagccagctgatcgccggcaccaaggaggacatccccgtgttcaagagaagaagaagaagcagcagcgtggtgagcgccgagatgagcggctgcagcagcaagagccacagaagaaccagcctgccctgcatccccagagagcagctgatgggccacagcgagtgggaccacaagagaggccccagaggcagccagagcagcggcaccagcatcaccgtggacatcgccgtgatgggcgaggcccacggcctgatcaccgacctgctggccgaccccagcctgccccccaacgtgtgcaccagcctgagagccgtgagcaacctgctgagcacccagctgaccttccaggccatccacaagcccagagtgaaccccgtgaccagcctgagcgagaactacacctgcagcgacagcgaggagagcagcgagaaggacaagctggccatccccaagagactgagaagaagcctgccccccggcctgctgagaagagtgagcagcacctggaccaccaccaccagcgccaccggcctgcccaccctggagcccgcccccgtgagaagagacagaagcaccagcatcaagctgcaggaggcccccagcagcagccccgacagctggaacaaccccgtgatgatgaccctgaccaagagcagaagcttcaccagcagctacgccatcagcgccgccaaccacgtgaaggccaagaagcagagcagacccggcgccctggccaagatcagccccctgagcagcccctgcagcagccccctgcagggcacccccgccagcagcctggtgagcaagatcagcgccgtgcagttccccgagagcgccgacaccaccgccaagcagagcctgggcagccacagagccctgacctacacccagagcgcccccgacctgagcccccagatcctgaccccccccgtgatctgcagcagctgcggcagaccctacagccagggcaaccccgccgacgagcccctggagagaagcggcgtggccaccagaacccccagcagaaccgacgacaccgcccaggtgaccagcgactacgagaccaacaacaacagcgacagcagcgacatcgtgcagaacgaggacgagaccgagtgcctgagagagcccctgagaaaggccagcgcctgcagcacctacgcccccgagaccatgatgttcctggacaagcccatcctggcccccgagcccctggtgatggacaacctggacagcatcatggagcagctgaacacctggaacttccccatcttcgacctggtggagaacatcggcagaaagtgcggcagaatcctgagccaggtgagctacagactgttcgaggacatgggcctgttcgaggccttcaagatccccatcagagagttcatgaactacttccacgccctggagatcggctacagagacatcccctaccacaacagaatccacgccaccgacgtgctgcacgccgtgtggtacctgaccacccagcccatccccggcctgagcaccgtgatcaacgaccacggcagcaccagcgacagcgacagcgacagcggcttcacccacggccacatgggctacgtgttcagcaagacctacaacgtgaccgacgacaagtacggctgcctgagcggcaacatccccgccctggagctgatggccctgtacgtggccgccgccatgcacgactacgaccaccccggcagaaccaacgccttcctggtggccaccagcgccccccaggccgtgctgtacaacgacagaagcgtgctggagaaccaccacgccgccgccgcctggaacctgttcatgagcagacccgagtacaacttcctgatcaacctggaccacgtggagttcaagcacttcagattcctggtgatcgaggccatcctggccaccgacctgaagaagcacttcgacttcgtggccaagttcaacggcaaggtgaacgacgacgtgggcatcgactggaccaacgagaacgacagactgctggtgtgccagatgtgcatcaagctggccgacatcaacggccccgccaagtgcaaggagctgcacctgcagtggaccgacggcatcgtgaacgagttctacgagcagggcgacgaggaggccagcctgggcctgcccatcagccccttcatggacagaagcgccccccagctggccaacctgcaggagagcttcatcagccacatcgtgggccccctgtgcaacagctacgacagcgccggcctgatgcccggcaagtgggtggaggacagcgacgagagcggcgacaccgacgaccccgaggaggaggaggaggaggcccccgcccccaacgaggaggagacctgcgagaacaacgagagccccaagaagaagaccttcaagagaagaaagatctactgccagatcacccagcacctgctgcagaaccacaagatgtggaagaaggtgatcgaggaggagcagagactggccggcatcgagaaccagagcctggaccagaccccccagagccacagcagcgagcagatccaggccatcaaggaggaggaggaggagaagggcaagcccagaggcgaggagatccccacccagaagcccgaccagtag

SEQ ID NO: 17137 - DNA, 3426 bp, Artificial Sequence
  derived and/or modified sequence
atggcagtcccaggcgatgctgcacgagtgagggataagcctgtgcattcgggggtctcacaggctccaacagcagggcgggattgtcaccaccgggctgacccagcatcccctcgggactcgggttgcaggggctgttggggagatctcgtactccagcctttacgtagcagtagaaagctgtcaagcgcgctgtgcgcagggtcactttcatttctcttggcgcttcttgtccggttagttagaggggaggtggggtgcgatttagagcagtgcaaggaggctgccgccgcagaggaagaagaagccgctccaggggccgagggaggagtgttcccaggcccaaggggaggtgctcccggaggaggagccaggctctcaccctggctgcaacccagtgccctgctcttctcgcttctctgcgcctttttctggatgggcctctatcttctgagggcaggcgtgaggcttcctctggctgtggccttgcttgctgcatgttgcggcggagaagccctggtccagattgggttgggtgtgggagaggatcacttgctaagcctccccgcagctggagtggttctctcttgcttagcagcggccacatggctggtcctacggctcagactgggtgtcctcatgatcgcacttaccagcgccgtccgaacggtctctttaatcagcctggagagatttaaggtggcgtggcgcccatacctggcttacctcgcgggcgtgctggggattctgcttgctcggtatgttgagcagattctgccccagagtgctgaggcagcccctcgtgagcacttaggctctcaactgattgccggcacaaaagaagacattccagtgttcaagagaaggcggaggtcttctagtgttgttagcgctgaaatgtccggatgctcaagcaagtcccacagacgcacatcattgccctgtattcctcgggagcagctgatgggacattcggaatgggatcacaagagaggaccgcgtggcagtcagtcgtcaggcacgtccataaccgtggatattgccgtgatgggtgaggcacacggactcataaccgacctgctggccgaccccagcctcccacccaacgtgtgcacctccctcagggctgtatccaatctgctgtccacccagcttactttccaggctatccataaaccaagggtaaatccagtcacgtccctgagtgaaaactacacctgctcggattccgaggagagcagcgagaaggataaactagcaatcccaaaaagacttcggcgcagcttacccccgggactgttgaggagggtgagcagtacctggaccaccacaacttctgcaacagggctccccaccctcgagcctgcccctgtcagacgcgatcggtctacatcaattaaactccaagaagctcccagctcttcacctgattcttggaacaatcctgttatgatgacattgacaaaaagccggtccttcacatcgtcctacgcaatctcagcagcaaaccatgttaaagccaaaaagcaatcccgccccggggctttagcaaaaatctcacctctctcatccccctgctccagcccgttgcaagggacgccagcctcatccctggtcagtaagataagcgccgtgcaatttccagagtctgccgacaccacggcgaaacaatccctgggcagccatcgagccttaacctatacgcagtcggcacctgatctgtccccacagattttgacgcctccggtgatctgcagttcctgcggcagaccgtatagccaggggaatcctgcagacgagccgcttgaacgcagcggcgtggccacccgcacgccttcacggaccgatgacacagcccaggtgactagtgattatgaaacaaacaacaactcggactcttcagacatagtacagaatgaggatgagacagaatgtcttagggaaccactcaggaaggcaagcgcatgctctacttacgcgcctgaaacaatgatgtttttggacaaacctatcctggcccccgagcctcttgtaatggataatctggacagcataatggagcaactgaatacctggaatttcccgatctttgatctggttgagaatatcggcaggaagtgcgggagaatactgagccaagtgtcttaccgactctttgaagacatgggcctttttgaggcatttaagatcccgataagagagtttatgaattactttcacgcgcttgaaatcggatacagagacataccttatcacaataggattcacgccaccgatgttcttcacgccgtatggtacctaacaacacaacccattccagggctgtccaccgtgatcaacgaccacggttccacatcagactctgattccgacagcgggttcacacacggccacatgggatatgtgttctcaaagacttataatgtgacggacgataaatacggctgcctgagtggaaatattcccgcgctagaactgatggccttgtacgtcgcagctgcaatgcacgattatgaccacccagggagaaccaatgcgttcctggtggcaacatcagctccccaagctgtgctatacaatgacaggtcggtgttagaaaaccatcatgctgccgccgcgtggaatctattcatgagcaggcctgagtacaatttcctcataaatctagaccatgtcgagttcaagcacttccggtttcttgtaattgaggcaattttggctacagatctgaaaaagcactttgatttcgtggctaaatttaatgggaaagttaatgatgacgtgggtatcgactggactaacgaaaatgataggctcttggtttgtcagatgtgtatcaaactggctgatatcaacggccctgccaagtgtaaagagttgcatctccagtggaccgatgggatcgtgaacgaattctatgaacagggtgatgaagaggcctccctaggactgccaatatccccctttatggaccgcagcgctccccaattagcaaatttgcaggagtcctttatctctcacatcgtgggccctctgtgcaactcatacgactccgcagggttaatgcccggcaagtgggtggaggactcagatgaaagcggagacacagacgatcctgaggaagaggaggaggaagctccagcccccaacgaggaagagacttgtgaaaataacgaatctccaaaaaaaaagactttcaagcgccggaaaatttactgccagatcacacagcacctgctgcagaaccacaagatgtggaaaaaggtgattgaggaggagcagcgactcgcaggaattgagaaccagtccctggaccagacaccgcaaagtcacagctccgagcaaatacaggcaatcaaagaagaggaggaagagaagggcaaaccccgcggagaggaaatccctacgcagaagcctgatcagtag

SEQ ID NO: 17138 - DNA, 3426 bp, Artificial Sequence
  derived and/or modified sequence
atggctgtgcctggagatgctgcccgggtgcgggacaagcctgtgcacagcggcgtgtcccaggcccccacagctggccgggactgccaccacagagctgaccctgccagcccccgggacagcggctgccggggctgctggggagacctggtgctgcagcccctgcggagcagcaggaagctgagcagcgccctgtgtgccggcagcctgtccttcctgctggccctgctggtgcggctggtgcggggggaggtgggctgtgacctggagcagtgcaaggaggccgctgctgctgaggaggaggaggccgcccctggagctgagggcggcgtcttccctggcccccggggcggggcccctgggggcggggcccggctgagcccctggctgcagcccagcgccctgctcttcagcctgctgtgtgccttcttctggatgggcctgtacctgctgcgggccggcgtgcggctgcccctggccgtggccctgctggccgcctgctgcggcggggaggccctggtgcagatcggcctgggcgtgggggaggaccacctgctgagcctgcctgctgctggggtggtgctgagctgcctggccgccgccacctggctggtgctgcggctgcggctgggcgtgctgatgattgccctgaccagcgctgtgaggacagtgtccctcatcagcctggagcgcttcaaggtggcctggaggccctacctggcctacctggccggcgtgctgggcatcctgctggcccgctacgtggagcagatcctgccccagagcgctgaggccgccccccgggagcacctgggcagccagctgattgctggcaccaaggaggacatccctgtgttcaagagaagaagaagaagcagctctgtggtgtctgctgagatgagcggctgcagcagcaagagccacaggaggaccagcctgccctgcatcccccgggagcagctgatgggccacagcgagtgggaccacaagaggggcccccggggcagccagagcagcggcaccagcatcaccgtggacattgctgtgatgggagaggcccacggcctcatcacagacctgctggccgaccccagcctgcccccaaatgtgtgcaccagcctgcgggctgtgagcaacctgctgagcacccagctgaccttccaggccatccacaagccccgggtgaaccctgtgaccagcctgtctgagaactacacctgcagcgacagcgaggagagcagcgagaaggacaagctggccatccccaagaggctgcggcgcagcctgcccccaggcctgctgcggcgggtgagcagcacctggaccaccaccaccagcgccaccggcctgcccaccctggagcccgcccctgtgagaagagacaggagcaccagcatcaagctgcaggaggcccccagcagcagcccagacagctggaacaaccctgtgatgatgaccctgaccaagagccgctccttcaccagcagctatgccatctctgctgccaaccacgtgaaggccaagaagcagagcaggcctggggccctggccaagatcagccccctgagcagcccctgcagcagccccctgcagggcaccccagccagcagcctggtgtccaagatctctgctgtgcagtttcctgagagcgctgacaccacagccaagcagagcctgggcagccaccgggccctgacctacacccagagcgccccagacctgagcccccagatcctgaccccacctgtgatctgcagcagctgtggccggccctacagccagggcaacccagcagatgagcccctggagaggtctggagtggccaccaggacccccagcaggacagatgacacagcccaggtgaccagtgactatgagaccaacaacaacagcgacagcagtgacatcgtgcagaatgaagatgaaacagagtgcctgcgggagcccctgaggaaggccagcgcctgcagcacctacgcccctgagaccatgatgttcctggacaagcccatcctggcccctgagcccctggtgatggacaacctggacagcatcatggagcagctgaacacctggaacttccccatctttgacctggtggagaacattggaagaaaatgtggccgcatcctgagccaggtgtcctaccgcctgtttgaggacatgggcctgtttgaggccttcaagatccccatccgggagttcatgaactacttccacgccctggagatcggctacagagacatcccctaccacaaccgcatccacgccacagatgtgctgcatgctgtgtggtacctgaccacccagcccatccctggcctgagcaccgtcatcaatgaccacggcagcaccagtgacagcgacagcgacagcggcttcacccacggccacatgggctacgtgttcagcaagacctacaacgtgacagatgacaagtatggctgcctgagcggcaacatcccagccctggagctgatggccctgtatgtggccgccgccatgcatgactatgaccaccctggccgcaccaatgccttcctggtggccaccagcgccccccaggccgtgctgtacaatgacagatctgtgctggagaaccaccacgccgccgccgcctggaacctcttcatgagcaggcctgagtacaacttcctgatcaacctggaccacgtggagttcaagcacttccgcttcctggtgattgaggccatcctggccacagacctgaagaagcactttgattttgtggccaagttcaacgggaaggtgaatgatgatgtgggcatcgactggaccaatgaaaatgaccggctgctggtgtgccagatgtgcatcaagctggccgacatcaatggacctgccaagtgcaaggagctgcacctgcagtggacagatggcatcgtgaatgagttctatgagcagggagatgaggaggccagcctgggcctgcccatcagccccttcatggacagaagtgccccccagctggccaacctgcaggagagcttcatcagccacatcgtgggccccctgtgcaacagctatgacagcgctggcctgatgcctgggaagtgggtggaggacagtgatgaaagtggggacacagatgatcctgaggaggaggaggaggaggccccagccccaaatgaggaggagacctgtgagaacaatgaaagccccaagaagaagaccttcaagaggaggaagatctactgccagatcacccagcacctgctgcagaaccacaagatgtggaagaaggtgattgaggaggagcagaggctggccggcatcgagaaccagagcctggaccagaccccccagagccacagcagcgagcagatccaggccatcaaggaggaggaggaggagaagggcaagcccagaggagaggagatccccacccagaagccagaccagtag

SEQ ID NO: 17139 - DNA, 3426 bp, Artificial Sequence
  derived and/or modified sequence
atggccgtgcccggcgacgccgcccgggtgcgggacaagcccgtgcacagcggggtgtctcaggccccaacggctggccgcgactgtcatcaccgcgccgaccccgcgtccccaagagatagtgggtgcagaggctgttggggggatctggtactgcaacccctgagatcctctaggaagttgtctagcgccctgtgcgcaggcagcctctcgttcttattggctctcctggtgcgcctcgtcaggggggaagtgggctgtgacctcgagcaatgtaaagaggcagccgctgcagaagaagaagaggcagcacccggggccgagggtggagtgtttccggggccccgagggggggcccccggtggcggcgcacggttaagtccttggctccagccctcagctttgttgtttagcctcctgtgtgctttcttttggatggggctctatctgcttcgggcaggagtccgattacccctggcagtcgcactgttggcagcttgttgtggcggagaggcacttgtccaaatcgggcttggtgtcggcgaggatcatctgctgtccttgcccgctgcaggagtggtgttgagctgtctggcagctgcaacctggctggtcctgagattgcgcctgggagtcctgatgattgcactcaccagcgccgtccgcaccgtgtctctcatatcgctagagaggtttaaggttgcctggagaccatacttagcatacctggccggggtgctgggtattcttctcgcccggtacgtagaacagatcctgccccagagcgcggaagctgccccccgggagcatctcggctcacagctcatcgccgggacaaaggaagacatccccgtctttaagcgaaggcggcggtctagttctgttgtgtctgctgagatgtccggatgcagtagcaagtcacacaggaggacatcactcccatgtattcccagggaacagctgatgggacactctgaatgggaccacaaaaggggcccccgcggctcacagagctcaggcacttctatcaccgttgacatcgcagtaatgggagaggctcatggccttattacagacttactcgcagatccctcactgccacctaacgtgtgtaccagcctgagggcagtctctaatctgttgtccacacagctaactttccaggctattcacaaacccagggtcaatccggttaccagcctcagtgaaaattacacttgctctgacagcgaagagagtagtgagaaagacaagctcgctatcccaaaacgtctccgcagatccctaccaccgggactactgcgcagggtgtcgagtacatggactacgactacatctgccaccggactgccaaccctggaaccagcccctgtgcgccgggatcgttccacctccattaagttgcaggaggcccctagctcgagccctgatagctggaacaatccagtgatgatgacgttaaccaagagccggtcatttacatctagctatgccatttccgccgccaaccacgtcaaggccaagaagcaaagccgccctggggccctggctaagatctcgcccctatccagtccgtgttcttctccactgcaggggacccctgcgtcctccctggtcagtaagattagcgcggtgcagtttcccgaaagtgccgatactactgctaagcagagcctcgggagccaccgcgctctcacatatactcaaagcgcacctgacctctctccacaaatcctgaccccacccgtcatttgttcctcttgcggccggccatactcacaaggcaaccctgcagatgagccgctggaaagatccggggtggccacaagaactccctcccggaccgatgacactgctcaggtgactagcgactacgagaccaacaacaactcagatagtagtgacatcgtgcagaacgaagacgagacagagtgccttcgcgagcctctcaggaaagcatctgcatgtagtacatacgcgccagagacgatgatgttcttggataaacctatcctggccccagagcctctggttatggacaatcttgattcaattatggagcagctcaatacatggaattttcccatctttgatctggtcgaaaacatcggaagaaaatgcggacgaattctgtcacaggtttcctatcgactttttgaagacatgggtttgttcgaggctttcaaaattcccattcgcgaattcatgaactacttccatgcactggaaataggatatagagatattccttaccacaatcgcatacacgctaccgatgttttgcatgcagtttggtacctaactacacaacccatacctggcttgtctacggttattaatgatcatggaagcacttctgatagtgactccgattccgggtttactcatggacacatgggctacgtgttctcaaagacctacaacgtgaccgatgataagtacggctgcctgagcggcaatattccagcccttgaattgatggctctgtatgtagcagcagcgatgcacgactatgatcacccagggagaactaacgcctttctcgtggccaccagtgcaccccaggcggtgctgtacaatgacagaagtgtcctggagaaccatcacgccgccgcagcgtggaatcttttcatgagccgtccagagtataacttcctcataaatttggaccatgtggaatttaagcacttccggtttcttgttattgaggcaatcctggctacagatctgaaaaaacatttcgatttcgtggccaagttcaatggcaaggtgaacgatgacgttggaatcgactggactaacgagaatgaccgcttgcttgtgtgccagatgtgcattaaactggctgatattaacgggccggctaaatgtaaagagctgcacctccagtggacggacggcatcgtcaacgaattttacgaacaaggagacgaagaggccagtctgggactgcctatctcaccgtttatggaccgatctgcacctcagctagccaacctgcaagagtctttcatctcacacatcgtcggaccgttgtgtaactcctatgactcagctggcctcatgcccgggaagtgggtggaggactctgatgaatccggagacactgacgacccagaagaggaagaagaagaagcacctgctcctaatgaagaggagacttgcgaaaacaacgagtcccccaagaaaaaaaccttcaagaggcggaagatctactgccagataacacagcaccttttgcagaaccataagatgtggaagaaagttatagaagaagagcagagactggcaggaatcgagaatcaatcactggaccagaccccccagtcgcacagcagcgagcagattcaggccattaaggaggaggaggaggaaaaaggtaaaccaaggggtgaggagatacctacgcaaaaacctgatcagtag

SEQ ID NO: 17140 - DNA, 7576 bp, Artificial Sequence
  derived and/or modified sequence
gggggccactgggaattcagtgaagagggcaccctataccatggcagtgcccggcgacgctgcacgagtcagggacaagcccgtccacagtggggtgagtcaagcccccacggcgggccgggactgccaccatcgtgcggaccccgcatcgccgcgggactcgggctgccgtggctgctggggagacctggtgctgcagccgctccggagctctcggaaactttcctccgcgctgtgcgcgggctccctgtcctttctgctggcgctgctggtgaggctggtccgcggggaggtcggctgtgacctggagcagtgtaaggaggcggcggcggcggaggaggaggaagcagccccgggagcagaagggggcgtcttcccggggcctcggggaggtgctcccgggggcggtgcgcggctcagcccctggctgcagccctcggcgctgctcttcagtctcctgtgtgccttcttctggatgggcttgtacctcctgcgcgccggggtgcgcctgcctctggctgtcgcgctgctggccgcctgctgcgggggggaagcgctcgtccagattgggctgggcgtcggggaggatcacttactctcactccccgccgcgggggtggtgctcagctgcttggccgccgcgacatggctggtgctgaggctgaggctgggcgtcctcatgatcgccttgactagcgcggtcaggaccgtgtccctcatttccttagagaggttcaaggtcgcctggagaccttacctggcgtacctggccggcgtgctggggatcctcttggccaggtacgtggaacaaatcttgccgcagtccgcggaggcggctccaagggagcatttggggtcccagctgattgctgggaccaaggaagatatcccggtgtttaagaggaggaggcggtccagctccgtcgtgtccgccgagatgtccggctgcagcagcaagtcccatcggaggacctccctgccctgtataccgagggaacagctcatggggcattcagaatgggaccacaaacgagggccaagaggatcacagtcttcaggaaccagtattactgtggacatcgccgtcatgggcgaggcccacggcctcattaccgacctcctggcagacccttctcttccaccaaacgtgtgcacatccttgagagccgtgagcaacttgctcagcacacagctcaccttccaggccattcacaagcccagagtgaatcccgtcacttcgctcagtgaaaactatacctgttctgactctgaagagagctctgaaaaagacaagcttgctattccaaagcgcctgagaaggagtttgcctcctggcttgttgagacgagtttcttccacttggaccaccaccacctcggccacaggtctacccaccttggagcctgcaccagtacggagagaccgcagcaccagcatcaaactgcaggaagcaccttcatccagtcctgattcttggaataatccagtgatgatgaccctcaccaaaagcagatcctttacttcatcctatgctatttctgcagctaaccatgtaaaggctaaaaagcaaagtcgaccaggtgccctcgctaaaatttcacctctttcatcgccctgctcctcacctctccaagggactcctgccagcagcctggtcagcaaaatttctgcagtgcagtttccagaatctgctgacacaactgccaaacaaagcctaggttctcacagggccttaacttacactcagagtgccccagacctatcccctcaaatcctgactccacctgttatatgtagcagctgtggcagaccatattcccaagggaatcctgctgatgagcccctggagagaagtggggtagccactcggacaccaagtagaacagatgacactgctcaagttacctctgattatgaaaccaataacaacagtgacagcagtgacattgtacagaatgaagatgaaacagagtgcctgagagagcctctgaggaaagcatcggcttgcagcacctatgctcctgagaccatgatgtttctggacaaaccaattcttgctcccgaacctcttgtcatggataacctggactcaattatggagcagctaaatacttggaattttccaatttttgatttagtggaaaatataggaagaaaatgtggccgtattcttagtcaggtatcttacagactttttgaagacatgggcctctttgaagcttttaaaattccaattagggaatttatgaattattttcatgctttggagattggatatagggatattccttatcataacagaatccatgccactgatgttttacatgctgtttggtatcttactacacagcctattccaggcctctcaactgtgattaatgatcatggttcaaccagtgattcagattctgacagtggatttacacatggacatatgggatatgtattctcaaaaacgtataatgtgacagatgataaatacggatgtctgtctgggaatatccctgccttggagttgatggcgctgtatgtggctgcagccatgcacgattatgatcatccaggaaggactaatgctttcctggttgcaactagtgctcctcaggcggtgctatataacgatcgttcagttttggagaatcatcacgcagctgctgcatggaatcttttcatgtcccggccagagtataacttcttaattaaccttgaccatgtggaatttaagcatttccgtttccttgtcattgaagcaattttggccactgacctgaagaaacactttgacttcgtagccaaatttaatggcaaggtaaatgatgatgttggaatagattggaccaatgaaaatgatcgtctactggtttgtcaaatgtgtataaagttggctgatatcaatggtccagctaaatgtaaagaactccatcttcagtggacagatggtattgtcaatgaattttatgaacagggtgatgaagaggccagccttggattacccataagccccttcatggatcgttctgctcctcagctggccaaccttcaggaatccttcatctctcacattgtggggcctctgtgcaactcctatgattcagcaggactaatgcctggaaaatgggtggaagacagcgatgagtcaggagatactgatgacccagaagaagaggaggaagaagcaccagcaccaaatgaagaggaaacctgtgaaaataatgaatctccaaaaaagaagactttcaaaaggagaaaaatctactgccaaataactcagcacctcttacagaaccacaagatgtggaagaaagtcattgaagaggagcaacggttggcaggcatagaaaatcaatccctggaccagacccctcagtcgcactcttcagaacagatccaggctatcaaggaagaagaagaagagaaagggaaaccaagaggcgaggagataccaacccaaaagccagaccagtgacaatggatagaatgggctgtgtttccaaacagattgacttgtcaaagactctcttcaagccagcacaacatttagacacaacactgtagaaatttgagatgggcaaatggctattgcattttgggattcttcgcattttgtgtgtatatttttacagtgaggtacattgttaaaaactttttgctcaaagaagctttcacattgcaacaccagcttctaaggattttttaaggagggaatatatatgtgtgtgtgtatataagctcccacatagatacatgtaaaacatattcacacccatgcacgcacacacatacacactgaaggccacgattgctggctccacaatttagtaacatttatattaagatatatatatagtggtcactgtgatataataaatcataaaggaaaccaaatcacaaaggagatggtgtggcttagcaaggaaacagtgcaggaaatgtaggttaccaactaagcagcttttgctcttagtactgagggatgaaagttccagagcattatttgaattctgatacatcctgccaacactgtgtgtgtgtgtgtgtgtgtgtgtgtgtgtgtgtgtgtgtgtgaaagagagacagaagggaatggtttgagagggtgcttgtgtgcatgtgtgtgcatatgtaaagagatttttgtggtttaagtaactcagaatagctgtagcaaatgactgaatacatgtgaacaaacagaaggaagttcactctggagtgtctttgggaggcagccattccaaatgccctcctccatttagcttcaataaagggccttttgctgatggagggcactcaagggctgggtgagagggccacgtgtttggtattacattactgctatgcaccacttgaaggagctctatcaccagcctcaaacccgaaagactgaggcattttccagtctacttgcctaatgaatgtataggaactgtctatgagtatggatgtcactcaactaagatcaaatcaccatttaaggggatggcattctttatacctaaacacctaagagctgaagtcaggtcttttaatcaggttagaattctaaatgatgccagagaaggcttgggaaattgtacttcagcgtgatagcctgtgtcttcttaatttgctgcaaaatatgtggtagagaaagaaaaggaaacagaaaaatcactctgggttatatagcaagagatgaaggagaatatttcaacacagggtttttgtgttgacataggaaaagcctgattcttggcaactgttgtagtttgtctttcaggggtgaaggtcccactgacaacccctgttgtggtgttccacacgctgtttgttggggtagcttccatcggcagtctggcccattgtcagtcatgcttcttctggccggggagattatagagagattgtttgaagattgggttattattgaaagtctttttttttgtttgttttgttttggtttgtttgtttatctacacttgtttatgctgtgagccaaacctctatttaaaaagttgatactcactttcaatattttatttcatattattatatatgtcatgatagttatcttgatgtaaatatgaagatttttttgtttctgtagatagtaaactctttttttaaaaaaggaaaagggaaacatttttataaagttatattttaatcaccatttttatacattgtagttctctccaagcccagtaagagaatgatgattcatttgcatggaggtcgatggacaaccaatcatctaccttttctaatttaaatgataatctgatatagttttattgccagttaaatgaggatgctgcaaagcatgttttttcactagtaacttttgctaactgaatgaattctgggtccatatctcccagatgaaaaactgttaaccaataccatattttatagttggtgtccatttctttccaacactgtttgttatgattcttccttgagtacttatatacagacctgctcattatctaaacaatcttaccttctaagtaaaccttgattgtgatttccagtttttattttctctgacgtagtagaaaggaatgtttacattaaaaatacttttgtttctcataaatggatattgtactcccccctttcaaagcattattttacaataattcatggcattttaaaaaataaggcaaagataatacgacaaaaaatatacatggtttcaaggcaaattctccaataagttggaaaatgtaaaaaggatcaagtggatgcagcctctacctaaataattaaaatatatttcagtatatttctgaattaacaccaggtcttcattatttagaacttactaaattgttttcattttcttagttttacctgtgtatctccatgtttgcaaaaattactataagtcaaattttgccagtgaatttaactatttttctttccttgcaattaaggggaaaaaagcatttatcttatcttctcataccccttgcatctaagtacttagcaaagtcaatattttcccattttccaaatgcgtccatctctaacataaatattaattgaacatagagctatgtttggagtgagtggactggcaggacagttggaagtccatcacagtctattgacagtttcatcaaagctgtatagtccaactagtggggcagcttggctactatggtggaagtctcagcaaactgcctggttttgtttgtttgttttgttttaaggtacaggaaataagaggaataatagtggccaaagcaattagaacatcttcattccagaactgtgttcagcaatccaggcagattgatacatttttctttaaaaataaattgctattacagctagacgtcaattgggataaataaagggatgaagatccactaagtttgtgactttcatacacacccagtacatctcaaaggatgctaagggacattttctgccagtagagttctccccctttttggtgacagcaatattattatgttcacatctaactccagagcttacttcctgtggtgccaatgtatttgttgcaatttactacatttttatatgagcctatttataggtgccattaaactcaggtctttcaaatgaaagagtttctagcccacttagggaaaaagataattgtttagaaaaccataaaatcaatggtaggaaaagttggaactggttacctggatgccatggttctctgttaaataaagtaagagaccaggtgtattctgagtgtcatcagtgttattttcagcatgctaataaatgtctttccggttatatatctatctaaattaacctttaaaatattggtttccttgataaaagcaccacttttgcttttgttagctgtaatattttttgtcatttagataagacctggtttggctctcaataaaagatgaagacagtagctctgtacagggatatatctatattagtcttcatctgatgaatgaagaaattttctcatattatgttcaagaaagtatttacttcctaaaaatagaattcccgattctgtctattttggttgaataccagaacaaatctttccgttgcaatcccagtaaaacgaaagaaaaggaatatcttacagactgttcatattagatgtatgtagactgttaatttgcaatttccccatatttcctgcctatcttacccagataactttctttgaaggtaaaagctgtgcaaaaggcatgagactcaggcctactctttgtttaaatgatggaaaaatataaattattttctaagtaataaaagtataaaaattatcattataaataaagtctaaagtttgaaattattaatttataaaagtgaactaattgtgtgattatcaaatcctgattaatgagaagtgaataatctaaaaatcatttatattctactgtgggaggtattcttggtgcttccatgtcagtatcgggctctccattgtcctcatcatttatagtacttctaaaataataatggaaacctcaataagggtcttgtcctcttctgtcatcctaaccctgattctagtttaatgcctttcctgacttatatgccatttgtaaataaacttcctttcaaactgttagaa

SEQ ID NO: 17141 - DNA, 3426 bp, Artificial Sequence
  derived and/or modified sequence
atggcagtaccgggagatgcagctcgggttagagacaaacccgtccattctggagtatctcaggcccctaccgctgggagggactgccaccatagagcagaccccgctagccctagagatagcggttgtaggggctgttggggggaccttgtgcttcagcccctacggtcttcccggaagctgagttcagcattatgcgccggatcgctgtcattcttgctggcactgctagttaggcttgtcaggggggaagtgggatgtgacctggagcagtgcaaagaggctgccgcagccgaagaggaagaagccgcacctggagccgagggtggtgtgttccctgggcctcggggaggggctccagggggaggcgcaagactaagcccatggctgcagcccagcgcgctgcttttttccctcctctgcgcttttttctggatgggattgtatttactgcgtgctggagtgagattgcccttagctgttgccctgctcgcagcctgctgcggcggagaggcactagtacagataggcttgggtgtgggggaggaccacctgcttagcctgcccgcagccggagtcgtgctttcttgcctggccgcagcaacttggctagtacttaggctacgtcttggggtgctgatgattgccctcacgagcgccgtgaggaccgtgtccctcatctctttggaacggttcaaggtcgcttggcgaccctatctggcgtatctagctggtgtgcttggaattctgcttgcccgttatgtggaacagatactcccccagtcagcggaggccgctccaagagaacatctgggctcccagctgattgccggaaccaaagaggatatccccgttttcaagcggagaaggagatcaagcagtgtcgtaagcgccgagatgagcggttgttcctcaaaatcccacaggcgcacatctctcccttgcatcccacgcgagcaacttatgggccactctgagtgggaccacaaaagggggcctcgcggaagccaatcctctggaacgtcaatcacagtggacatcgcagtgatgggtgaggctcacggcctcatcaccgacctcctcgctgacccttctctcccgcctaacgtttgcaccagtctgcgcgctgttagcaacctgctgtccacccaactgacattccaggcaatacacaaacctcgtgtgaatccagtcaccagtctatcagaaaattatacgtgcagtgactctgaagagagttccgaaaaagacaagttggctatcccaaagcggttaaggcgatctctacctcccggtctgctgaggcgagtgtcctctacctggacaacaaccacttccgcgaccggtctacctacattagagccagcacctgtacggagggaccgatccacaagcatcaaattgcaggaggctccatcctccagtccggattcctggaacaatcctgtgatgatgacactgactaaatcccgctcgtttacctcttcatacgccatctccgcagcgaaccatgtgaaagctaagaagcagtcaagaccaggagccctggcaaagatcagtccattgtcctctccttgctcatccccactgcaggggactcccgcttcctccctcgtgtctaaaatttcagcggtgcagttcccggaatcagccgacactactgcgaagcagagcctagggagtcatcgagccctaacctatacccagtctgcccctgatctttccccccagatcttgacacctcccgtcatctgttcttcctgtggccgtccctacagtcaaggaaaccccgctgacgaaccattggaacgcagcggcgtggcaacgaggacgccttcccggaccgacgatacggcgcaggtcaccagcgactacgaaaccaataataactccgatagttcagacatcgtgcagaacgaagacgagacggagtgcctgcgtgagccactgcgaaaggctagcgcctgcagtacatatgccccagagacaatgatgtttctggacaaacccatcctggcaccagagcccttagtgatggacaatctggactcaattatggaacagctgaatacatggaatttcccaatttttgacctggttgagaacattggcagaaagtgtggcaggatcttaagccaagtctcttacaggctgtttgaggatatggggctgtttgaagccttcaaaatccccatacgcgagtttatgaactatttccatgcgttggagattggctaccgtgatattccttatcacaaccgaattcacgccacggacgttctacacgccgtatggtatctgacgactcagcccatcccaggcctttccaccgtgattaacgatcatggatctacgtcggattccgatagcgattccggtttcacacacggccacatggggtacgtgttttccaagacatacaacgtaactgacgataagtacgggtgcctcagtggaaacatcccagccctcgagctgatggcactgtatgtggccgcagcaatgcacgattatgatcatcccggtcgcaccaatgccttcttagtggccaccagtgccccacaggcggtactctacaacgatcggtctgtcttagagaatcaccatgctgccgctgcttggaacttatttatgtcccggccagagtacaattttctgataaacctcgatcacgtcgaattcaagcattttcgctttctcgtgattgaggccatcctggccaccgatctaaagaaacatttcgactttgtagctaagttcaatggcaaggtcaatgacgatgtgggcatcgactggactaacgagaatgatcgactgctggtttgccagatgtgcatcaaactggcagatattaatggacccgctaaatgcaaggagctgcacttacagtggaccgacggcattgtaaacgaattttacgagcagggcgatgaagaggcaagccttggcttacctataagcccatttatggaccgctcggctccgcagcttgcgaacctgcaagagtcattcattagccacatcgtgggccctctgtgtaactcttacgactccgcaggactcatgccaggcaagtgggtggaggactcagatgaatccggggacactgacgaccccgaagaggaggaagaggaggcccctgctcctaacgaagaagagacctgcgaaaataatgaatcgcctaagaagaagacctttaaacgccgaaaaatctactgtcagattacacagcacctgttgcagaaccacaagatgtggaagaaggtgatcgaggaggagcagagacttgccggaattgagaatcagagtttggaccagaccccacagagtcacagctcagaacagattcaggccataaaggaggaggaagaggaaaagggtaagcccagaggcgaagagatcccaactcagaagcctgatcaatag

SEQ ID NO: 17142 - protein, 1112 aa, Artificial Sequence
  derived and/or modified sequence
MRRDERDAKAMRSLQPPDGAGSPPESLRNGYVKSCVSPLRQDPPRGFFFHLCRFCNVELRPPPASPQQPRRCSPFCRARLSLGALAAFVLALLLGAEPESWAAGAAWLRTLLSVCSHSLSPLFSIACAFFFLTCFLTRTKRGPGPGRSCGSWWLLALPACCYLGDFLVWQWWSWPWGDGDAGSAAPHTPPEAAAGRLLLVLSCVGLLLTLAHPLRLRHCVLVLLLASFVWWVSFTSLGSLPSALRPLLSGLVGGAGCLLALGLDHFFQIREAPLHPRLSSAAEEKVPVIRPRRRSSCVSLGETAASYYGSCKIFRRPSLPCISREQMILWDWDLKQWYKPHYQNSGGGNGVDLSVLNEARNMVSDLLTDPSLPPQVISSLRSISSLMGAFSGSCRPKINPLTPFPGFYPCSEIEDPAEKGDRKLNKGLNRNSLPTPQLRRSSGTSGLLPVEQSSRWDRNNGKRPHQEFGISSQGCYLNGPFNSNLLTIPKQRSSSVSLTHHVGLRRAGVLSSLSPVNSSNHGPVSTGSLTNRSPIEFPDTADFLNKPSVILQRSLGNAPNTPDFYQQLRNSDSNLCNSCGHQMLKYVSTSESDGTDCCSGKSGEEENIFSKESFKLMETQQEEETEKKDSRKLFQEGDKWLTEEAQSEQQTNIEQEVSLDLILVEEYDSLIEKMSNWNFPIFELVEKMGEKSGRILSQVMYTLFQDTGLLEIFKIPTQQFMNYFRALENGYRDIPYHNRIHATDVLHAVWYLTTRPVPGLQQIHNGCGTGNETDSDGRINHGRIAYISSKSCSNPDESYGCLSSNIPALELMALYVAAAMHDYDHPGRTNAFLVATNAPQAVLYNDRSVLENHHAASAWNLYLSRPEYNFLLHLDHVEFKRFRFLVIEAILATDLKKHFDFLAEFNAKANDVNSNGIEWSNENDRLLVCQVCIKLADINGPAKVRDLHLKWTEGIVNEFYEQGDEEANLGLPISPFMDRSSPQLAKLQESFITHIVGPLCNSYDAAGLLPGQWLEAEEDNDTESGDDEDGEELDTEDEEMENNLNPKPPRRKSRRRIFCQLMHHLTENHKIWKEIVEEEEKCKADGNKLQVENSSLPQADEIQVIEEADEEE

SEQ ID NO: 17143 - protein, 1061 aa, Artificial Sequence
  derived and/or modified sequence
MRRDERDAKAMRSLQPPDGAGSPPESLRNGYVKSCVSPLRQDPPRGFFFHLCRFCNVELRPPPASPQQPRRCSPFCRARLSLGALAAFVLALLLGAEPESWAAGAAWLRTLLSVCSHSLSPLFSIACAFFFLTCFLTRTKRGPGPGRSCGSWWLLALPACCYLGDFLVWQWWSWPWGDGDAGSAAPHTPPEAAAGRLLLVLSCVGLLLTLAHPLRLRHCVLVLLLASFVWWVSFTSLGSLPSALRPLLSGLVGGAGCLLALGLDHFFQIREAPLHPRLSSAAEEKVPVIRPRRRSSCVSLGETAASYYGSCKIFRRPSLPCISREQMILWDWDLKQWYKPHYQNSGGGNGVDLSVLNEARNMVSDLLTDPSLPPQGLNRNSLPTPQLRRSSGTSGLLPVEQSSRWDRNNGKRPHQEFGISSQGCYLNGPFNSNLLTIPKQRSSSVSLTHHVGLRRAGVLSSLSPVNSSNHGPVSTGSLTNRSPIEFPDTADFLNKPSVILQRSLGNAPNTPDFYQQLRNSDSNLCNSCGHQMLKYVSTSESDGTDCCSGKSGEEENIFSKESFKLMETQQEEETEKKDSRKLFQEGDKWLTEEAQSEQQTNIEQEVSLDLILVEEYDSLIEKMSNWNFPIFELVEKMGEKSGRILSQVMYTLFQDTGLLEIFKIPTQQFMNYFRALENGYRDIPYHNRIHATDVLHAVWYLTTRPVPGLQQIHNGCGTGNETDSDGRINHGRIAYISSKSCSNPDESYGCLSSNIPALELMALYVAAAMHDYDHPGRTNAFLVATNAPQAVLYNDRSVLENHHAASAWNLYLSRPEYNFLLHLDHVEFKRFRFLVIEAILATDLKKHFDFLAEFNAKANDVNSNGIEWSNENDRLLVCQVCIKLADINGPAKVRDLHLKWTEGIVNEFYEQGDEEANLGLPISPFMDRSSPQLAKLQESFITHIVGPLCNSYDAAGLLPGQWLEAEEDNDTESGDDEDGEELDTEDEEMENNLNPKPPRRKSRRRIFCQLMHHLTENHKIWKEIVEEEEKCKADGNKLQVENSSLPQADEIQVIEEADEEE

SEQ ID NO: 17144 - DNA, 3339 bp, Artificial Sequence
  derived and/or modified sequence
atgcgccgggatgagagagacgcgaaggcaatgaggtccctgcaaccaccagacggcgcaggcagccctcccgagtctctgcgtaatgggtatgtgaaatcctgcgtgtcaccactgcgccaagatcctccaagaggcttcttcttccacctgtgcagattctgtaacgtcgaacttagaccacctccggcatctcctcaacaacctcgcaggtgctcgcccttctgtagggcccgcctgagcctcggtgcacttgctgccttcgtcctggctctgctcctgggggcagaaccagagagttgggcggccggtgccgcttggttacgcacactgttgagcgtttgttcacacagtctctctccactgtttagcattgcatgcgctttcttttttctaacatgctttctaacacgaacgaaaaggggacccggcccaggtcggtcctgtggaagttggtggttgctggcactccccgcttgctgttatctgggggacttcctggtctggcagtggtggagctggccttggggggacggagatgcaggcagcgctgctcctcacacaccgcctgaggcagcagcaggacgactgcttctagtgcttagctgtgtgggactgctgctgaccctggcccacccactgaggctgcggcactgcgtgctcgtgctgctgcttgcctctttcgtatggtgggtgagcttcaccagcctcggttcattgccctctgctttacggcccctcttaagcggtctggtcgggggcgcaggatgcctgttggccctaggactggatcatttcttccaaattcgcgaggcgccactgcacccgagactgtcatcagctgccgaagagaaagtgccagtgatccgaccgcgccgtcggtcatcatgtgttagtctcggagagacagccgcaagctactacggttcctgcaaaatattcagacgaccatccctgccttgcatcagcagagagcagatgatcttgtgggattgggacctaaaacaatggtataaacctcattaccaaaattccggtggtggtaacggcgtcgatctgagtgtacttaatgaggcccggaatatggtgtccgatctgctgacggatccatccctacctccacaggtgatcagctccctacggtccatctcctcacttatgggggctttcagcggctcatgtagacctaaaataaaccccctgacacccttccccggattctacccgtgcagcgagattgaagacccagcagagaaaggcgaccggaagcttaacaaggggctaaaccggaatagtctgccgacccctcagctcagacggtcctctggcacatccggactgctcccagtggaacaaagcagccgatgggaccggaacaatggcaagcgaccgcaccaagagtttggcatctctagccagggctgctacctgaatggtcccttcaattccaatctgctgacaatacccaaacagaggtcctcttccgtttccctgactcaccacgtcgggctgcgacgcgccggtgttctgtccagcctttcaccagtgaactcttctaaccatggccctgtcagcacggggagtctgaccaacagatctccaatcgaatttccggacacggccgactttctgaataagccttctgtcatcctgcagagaagcctgggaaatgcccccaacactcctgacttttaccagcaactgaggaattccgactcaaatctgtgtaactcttgtggacaccagatgctgaaatatgtgtccacctcagaaagtgacggtacagattgttgctcagggaagtcgggagaggaagaaaatatattcagcaaggaatcctttaagctgatggagacccagcaggaggaagaaaccgaaaagaaggacagtcggaagctttttcaggaaggcgacaagtggctgactgaagaagctcagtccgaacagcagaccaacattgagcaggaggtcagccttgatctgatcctggtggaagaatacgattctctgatcgaaaagatgagcaattggaactttcctatcttcgaactggtcgagaagatgggtgagaagtccggacgcattctttctcaggtgatgtacacactcttccaggacactgggcttttggagatcttcaagattcccacgcagcagtttatgaattactttcgagccctggaaaacggctacagggatataccttatcacaatagaatccatgctacggacgtactgcatgccgtctggtacctcacgacccgccccgtgccaggcctccagcagatccacaatgggtgcggaacggggaacgagaccgatagcgatggcaggataaaccacggacggatcgcgtacatctccagcaagagttgctccaaccctgatgaaagctatggctgcctctcgagcaacattccggctctggagctgatggcattatatgttgcggccgctatgcacgattacgatcaccctgggcgcacgaacgcgttccttgtggccacaaacgctcctcaagccgtgctctataacgatcggagcgtgctggagaaccaccacgctgctagcgcctggaacttgtatctgagcaggcctgagtacaactttctcttgcacctggaccacgttgagttcaagagatttcggttcttggtaatagaagcaattttggccaccgacttaaagaagcattttgatttcctggccgaatttaatgcaaaggccaatgatgtcaactccaacgggatcgagtggtctaacgaaaacgatagactcctcgtctgtcaagtgtgcattaaactggctgatatcaatggacccgcaaaggtccgggatctgcacctcaagtggacagagggaatcgtgaacgagttctacgaacagggtgacgaagaagcaaacctcggcctgcctatctccccctttatggaccggtcatccccgcagcttgcaaagcttcaagaatcttttataacgcatattgtgggccccctgtgtaatagctatgatgctgcaggactgcttccagggcagtggctggaggcagaagaagacaacgacaccgaaagtggcgacgatgaggatggcgaagagttggatacagaggatgaggaaatggaaaacaatttgaatcccaaaccaccaaggagaaaaagcagaagaaggattttctgccagctcatgcatcacctgactgaaaatcataaaatctggaaggagatagtagaagaggaggaaaaatgtaaagctgatgggaacaaactgcaagtcgagaactcttcgctgccccaggctgacgaaatccaggtgatcgaggaagccgacgaagaagaatag

SEQ ID NO: 17145 - DNA, 3186 bp, Artificial Sequence
  derived and/or modified sequence
atgcgccgggacgagcgagatgcaaaagcaatgcgcagtctgcagccacctgatggagcaggaagcccacctgagtcccttcgcaacgggtatgtgaagtcctgtgtttcaccgctccgtcaagacccccctagaggatttttcttccacttgtgccgcttttgcaacgttgaactgcgtccccccccagcatcgccccagcagcctcggaggtgcagcccgttctgccgggccaggctgtctctaggggcacttgctgccttcgtcctagctctgctgctgggagcagagcccgaatcctgggctgcaggcgcggcctggctgcgaaccctgctgtccgtctgctcacactctttatcgcccttattcagcatcgcatgcgcttttttttttctgacgtgttttcttacaaggacgaagagaggccctggaccaggacggtcctgtggtagctggtggttgctggcactgcctgcctgctgttacctgggcgacttcttggtctggcagtggtggtcgtggccatggggtgatggagacgccggatccgcagctcctcatactccacccgaagcagctgcaggacgactgctgcttgtgctcagttgtgtggggttgctgttgactctagcccacccgctgcgcttgagacattgtgtcctggtgctgcttctggcctcttttgtgtggtgggtgtcttttaccagcctgggatcactgccaagcgccctgaggcccttgctctccggactggtaggaggcgccggctgtttactggccctgggtcttgatcacttcttccagatccgcgaggcaccactccatccccggctgtcttctgcagctgaagagaaagttcccgtgattagaccccgccgccggtcctcctgcgtgagcttaggagagaccgctgccagctattatggaagttgcaagatcttccggaggccctcccttccctgcatctcccgcgagcagatgattctgtgggattgggatctgaagcagtggtacaagccacactaccagaattccggcggaggtaatggtgtggatctttccgtgcttaatgaggccagaaacatggtgtccgacctgctgactgacccgtccctcccaccacagggcctgaataggaacagtctacctaccccgcagctgaggcggtcatctggcacttctggacttctgccagtcgaacagagcagccggtgggacagaaataacgggaaaaggccccaccaggaattcggcatatcctctcagggctgttaccttaacggcccttttaactcgaatctcctcacaatcccaaaacagcgcagcagtagcgtgtctctgactcaccatgtcgggctcagaagagccggtgtgctgagttcactaagtcctgtgaattcgtccaaccacggccctgtatctacaggatccctgacaaacaggagccctatcgaattccccgataccgctgattttctaaacaagccctcagttattcttcagaggtctctcgggaacgcacctaatactccagacttctaccagcagcttcggaattctgatagcaatctgtgtaacagctgcggtcatcagatgctgaaatacgtgagtacaagtgaaagcgatggcaccgactgctgctctggaaaatctggcgaagaggagaatatattttccaaggaatcgttcaagctgatggagactcagcaagaggaggaaaccgaaaaaaaagatagcaggaagcttttccaagagggcgataagtggctgaccgaggaggcccagtccgagcaacaaactaacatcgagcaggaagtcagcttggatctcatcttggttgaggagtatgattccctcatcgaaaaaatgagtaattggaactttcccatatttgaattggttgagaaaatgggagagaagagcggacgtattctgtcgcaggtcatgtacaccctgttccaggataccggcttattggaaatcttcaagatcccgactcagcaattcatgaattatttccgcgctctagaaaacggctatagagatataccatatcacaatcgcattcatgctacagatgtcctccatgcagtgtggtatttgacaacccgacctgtccccggtctgcagcagattcacaacgggtgtggtacaggtaacgagactgacagcgacggccggatcaatcacggtcgcatcgcttatatttcgtcaaagtcttgctcaaatcccgatgaatcgtacggctgtctgtctagcaacatcccagcactggagctcatggctctctacgtcgccgccgcgatgcatgactatgatcacccagggcgtacaaacgcttttctcgtagccacaaacgcgcctcaggcagtgctgtataatgaccgatccgtactcgaaaaccaccacgccgcgagcgcctggaacttgtacctcagccggcccgagtacaacttcctcctgcatctcgaccatgtcgaatttaaacgctttcggtttttggtgatcgaggcaatcctagccaccgacctgaagaaacacttcgactttctggcagaattcaacgcaaaggccaatgatgtgaactccaatggaatcgagtggagtaatgaaaatgaccgcttgttagtatgtcaggtctgcatcaaacttgccgatatcaatggtcctgctaaagttagggatttgcacctcaagtggactgaagggattgttaatgagttttatgagcagggagacgaagaggctaatctgggtctgccgatctcacccttcatggatcgcagctcacctcagttggcgaaattgcaagagtcattcatcacacatatcgtgggacccctgtgcaacagctatgatgcagccggcctgctaccgggtcagtggctggaggccgaggaggataacgacacggaaagcggggacgacgaagacggcgaagaacttgatacagaagatgaggagatggagaacaacctgaatccaaagcccccacggcgaaagtccaggcgccggatcttttgtcagcttatgcaccacctaactgagaaccacaagatctggaaggagattgttgaggaggaagagaaatgcaaggccgacggaaataagttgcaggtggagaactcttctctcccccaggcagatgagatccaagtaatcgaggaggcggacgaagaagagtag

SEQ ID NO: 17146 - DNA, 3339 bp, Artificial Sequence
  derived and/or modified sequence
atgagaagagatgaaagagatgccaaggccatgaggagcctgcagcccccagatggagctggcagccccccagagagcctgagaaatggctacgtgaagagctgtgtgagccccctgcggcaggaccccccccggggcttcttcttccacctgtgccgcttctgcaatgtggagctgcggcccccaccagccagcccccagcagccccggcgctgcagccccttctgccgggcccggctgagcctgggcgccctggccgcctttgtgctggccctgctgctgggcgctgagcctgagagctgggccgccggggccgcctggctgcggaccctgctgtctgtgtgcagccacagcctgagccccctcttcagcatcgcctgtgccttcttcttcctgacctgcttcctgaccaggaccaagaggggccctggccctggccgcagctgtggctcctggtggctgctggccctgcctgcctgctgctacctgggggacttcctggtgtggcagtggtggagctggccctggggagatggagatgctggcagcgctgccccccacaccccacctgaggccgccgccggccgcctgctgctggtgctgagctgtgtgggcctgctgctgaccctggcccaccccctgcggctgcggcactgtgtgctggtgctgctgctggccagctttgtgtggtgggtgtccttcaccagcctgggcagcctgcccagcgccctgcggcccctgctgagcggcctggtgggcggggccggctgcctgctggccctgggcctggaccacttcttccagatccgggaggcccccctgcacccccggctgagcagcgctgctgaggagaaggtgcctgtgatccggcccaggagaagaagcagctgtgtgtccctgggggagacagctgccagctactacggcagctgcaagatcttcagaagacccagcctgccctgcatcagccgggagcagatgatcctgtgggactgggacctgaagcagtggtacaagccccactaccagaacagcggcggcggcaatggagtggacctgtctgtgctgaatgaggccaggaacatggtgtctgacctgctgacagaccccagcctgcccccccaggtgatcagcagcctgcggagcatcagcagcctgatgggcgccttcagcggcagctgccggcccaagatcaaccccctgacccccttccctggcttctacccctgcagcgagattgaggaccctgctgagaagggggacaggaagctgaacaagggcctgaacagaaacagcctgcccaccccccagctgcggcgcagcagcggcaccagcggcctgctgcctgtggagcagagcagccgctgggacaggaacaacgggaagaggccccaccaggagtttggcatcagcagccagggctgctacctgaatggccccttcaacagcaacctgctgaccatccccaagcagaggagcagctctgtgtccctgacccaccacgtgggcctgcggcgggccggcgtgctgagcagcctgagccctgtgaacagcagcaaccacggccctgtgtccacaggcagcctgaccaacagaagccccatcgagttcccagacacagctgacttcctgaacaagcccagcgtcatcctgcagaggagcctgggcaatgcccccaacaccccagacttctaccagcagctgaggaacagcgacagcaacctgtgcaacagctgtggccaccagatgctgaagtatgtgtccaccagcgagagtgatggaacagactgctgcagcggcaagagcggggaggaggagaacatcttcagcaaggagagcttcaagctgatggagacccagcaggaggaggagacagagaagaaggacagcaggaagctgttccaggagggggacaagtggctgacagaggaggcccagagcgagcagcagaccaacatcgagcaggaggtgtccctggacctgatcctggtggaggagtatgacagcctgattgagaagatgagcaactggaacttccccatctttgagctggtggagaagatgggagagaagagcggccgcatcctgagccaggtgatgtacaccctcttccaggacaccggcctgctggagatcttcaagatccccacccagcagttcatgaactacttccgggccctggagaatggctacagagacatcccctaccacaaccgcatccacgccacagatgtgctgcatgctgtgtggtacctgaccaccaggcctgtgcccggcctgcagcagatccacaacggctgcggcactggaaatgaaacagacagtgatggccgcatcaaccacggccgcatcgcctacatcagcagcaagagctgcagcaacccagatgagagctatggctgcctgagcagcaacatcccagccctggagctgatggccctgtatgtggccgccgccatgcatgactatgaccaccctggccgcaccaatgccttcctggtggccaccaatgccccccaggccgtgctgtacaatgacagatctgtgctggagaaccaccacgccgccagcgcctggaacctgtacctgagcaggcctgagtacaacttcctgctgcacctggaccacgtggagttcaagcgcttccgcttcctggtgattgaggccatcctggccacagacctgaagaagcactttgacttcctggccgagttcaatgccaaggccaatgatgtgaacagcaatggaattgagtggagcaatgaaaatgaccggctgctggtgtgccaggtgtgcatcaagctggccgacatcaatggacctgccaaggtgcgggacctgcacctgaagtggacagagggcatcgtgaatgagttctatgagcagggagatgaggaggccaacctgggcctgcccatcagccccttcatggacaggagcagcccccagctggccaagctgcaggagagcttcatcacccacatcgtgggccccctgtgcaacagctatgatgctgctggcctgctgcccggccagtggctggaggccgaggaggacaatgacacagagagcggagatgatgaagatggagaggagctggacacagaagatgaggagatggagaacaacctgaaccccaagccacccaggaggaagagcagaagacgcatcttctgccagctgatgcaccacctgacagagaaccacaagatctggaaggagatcgtggaggaggaggagaagtgcaaggcagatggcaacaagctgcaggtggagaacagcagcctgccccaggctgatgagatccaggtgattgaggaggctgatgaggaggagtag

SEQ ID NO: 17147 - DNA, 3186 bp, Artificial Sequence
  derived and/or modified sequence
atgagaagagatgaaagagatgccaaggccatgaggagcctgcagcccccagatggagctggcagccccccagagagcctgagaaatggctacgtgaagagctgtgtgagccccctgcggcaggaccccccccggggcttcttcttccacctgtgccgcttctgcaatgtggagctgcggcccccaccagccagcccccagcagccccggcgctgcagccccttctgccgggcccggctgagcctgggcgccctggccgcctttgtgctggccctgctgctgggcgctgagcctgagagctgggccgccggggccgcctggctgcggaccctgctgtctgtgtgcagccacagcctgagccccctcttcagcatcgcctgtgccttcttcttcctgacctgcttcctgaccaggaccaagaggggccctggccctggccgcagctgtggctcctggtggctgctggccctgcctgcctgctgctacctgggggacttcctggtgtggcagtggtggagctggccctggggagatggagatgctggcagcgctgccccccacaccccacctgaggccgccgccggccgcctgctgctggtgctgagctgtgtgggcctgctgctgaccctggcccaccccctgcggctgcggcactgtgtgctggtgctgctgctggccagctttgtgtggtgggtgtccttcaccagcctgggcagcctgcccagcgccctgcggcccctgctgagcggcctggtgggcggggccggctgcctgctggccctgggcctggaccacttcttccagatccgggaggcccccctgcacccccggctgagcagcgctgctgaggagaaggtgcctgtgatccggcccaggagaagaagcagctgtgtgtccctgggggagacagctgccagctactacggcagctgcaagatcttcagaagacccagcctgccctgcatcagccgggagcagatgatcctgtgggactgggacctgaagcagtggtacaagccccactaccagaacagcggcggcggcaatggagtggacctgtctgtgctgaatgaggccaggaacatggtgtctgacctgctgacagaccccagcctgcccccccagggcctgaacagaaacagcctgcccaccccccagctgcggcgcagcagcggcaccagcggcctgctgcctgtggagcagagcagccgctgggacagaaataatggcaagaggccccaccaggagtttggcatcagcagccagggctgctacctgaatggccccttcaacagcaacctgctgaccatccccaagcagaggagcagctctgtgtccctgacccaccacgtgggcctgcggcgggccggcgtgctgagcagcctgagccctgtgaacagcagcaaccacggccctgtgtccacaggcagcctgaccaacagaagccccatcgagttcccagacacagctgacttcctgaacaagcccagcgtcatcctgcagaggagcctgggcaatgcccccaacaccccagacttctaccagcagctgaggaacagcgacagcaacctgtgcaacagctgtggccaccagatgctgaagtatgtgtccaccagcgagagtgatggaacagactgctgcagcggcaagtctggagaggaggagaacatcttcagcaaggagagcttcaagctgatggagacccagcaggaggaggagacagagaagaaggacagcaggaagctgttccaggagggggacaagtggctgacagaggaggcccagagcgagcagcagaccaacatcgagcaggaggtgtccctggacctgatcctggtggaggagtatgacagcctcatcgagaagatgagcaactggaacttccccatctttgagctggtggagaagatgggagagaagagcggccgcatcctgagccaggtgatgtacaccctcttccaggacaccggcctgctggagatcttcaagatccccacccagcagttcatgaactacttccgggccctggagaatggctacagagacatcccctaccacaaccgcatccacgccacagatgtgctgcatgctgtgtggtacctgaccaccaggcctgtgcccggcctgcagcagatccacaacggctgcggcactggaaatgaaacagacagtgatggccgcatcaaccacggcagaattgcctacatcagcagcaagagctgcagcaacccagatgagagctatggctgcctgagcagcaacatcccagccctggagctgatggccctgtatgtggccgccgccatgcatgactatgaccaccctggccgcaccaatgccttcctggtggccaccaatgccccccaggccgtgctgtacaatgacagatctgtgctggagaaccaccacgccgccagcgcctggaacctgtacctgagcaggcctgagtacaacttcctgctgcacctggaccacgtggagttcaagcgcttccgcttcctggtgattgaggccatcctggccacagacctgaagaagcactttgacttcctggccgagttcaatgccaaggccaatgatgtgaacagcaatggcatcgagtggagcaatgaaaatgaccggctgctggtgtgccaggtgtgcatcaagctggccgacatcaatggacctgccaaggtgcgggacctgcacctgaagtggacagagggcatcgtgaatgagttctatgagcagggagatgaggaggccaacctgggcctgcccatcagccccttcatggacaggagcagcccccagctggccaagctgcaggagagcttcatcacccacatcgtgggccccctgtgcaacagctatgatgctgctggcctgctgcccggccagtggctggaggccgaggaggacaatgacacagaaagtggagatgatgaagatggagaggagctggacacagaagatgaggagatggagaacaacctgaaccccaagccacccaggaggaagagcagaagacgcatcttctgccagctgatgcaccacctgacagagaaccacaagatctggaaggagatcgtggaggaggaggagaagtgcaaggcagatggcaacaagctgcaggtggagaacagcagcctgccccaggctgatgagatccaggtgattgaggaggctgatgaggaggagtag

SEQ ID NO: 17148 - DNA, 3339 bp, Artificial Sequence
  derived and/or modified sequence
atgcggcgggacgagcgggacgccaaggccatgcggagcctgcagccccccgatggcgccggttcaccccctgagtcccttcggaatgggtacgtcaagagttgcgtgtctcccctacgccaggatccccctaggggctttttttttcatctgtgccggttctgcaatgtggaactgcgccctccccccgcgagtccccaacagccaagaaggtgttcacccttctgtagggcgagactctcattgggagccctcgccgccttcgtgctagcactgctgctgggagcagagcctgaatcctgggctgccggcgctgcatggctccgcacactgctatctgtgtgctcccactctttgtcaccacttttctcaatagcctgcgccttcttctttctgacttgtttcctcactagaactaaaagggggccaggtcccggcagatcctgcggatcctggtggcttttggcactgcccgcttgctgctacttaggagatttcctcgtgtggcagtggtggtcctggccatggggagatggtgatgctgggagcgctgctccacatacccccccagaagcagcagccggtcggctgctgctggtgctctcttgcgttggacttttattgactctcgcacatcctctgagattaaggcactgcgttcttgtgttgctgttagcctctttcgtatggtgggtcagcttcaccagcctcgggtccttgccatccgcccttcggccattgctctcaggtctggtaggcggagccggttgcctgctagcactgggtctcgaccactttttccagatacgcgaagctccgctgcatcccaggctgtcaagcgccgctgaagagaaagtgccggtaattagaccccggcgccgaagctcatgtgtcagcctaggggagacagcggcctcatactacggcagctgcaagatcttcagaaggccctccctcccatgcatctcaagagaacagatgatcttgtgggattgggacctgaagcaatggtacaagccacactatcagaactctggcggtggcaacggagttgatctttcggtgttaaacgaagccagaaacatggtttcagacctgttaactgacccctcactccccccacaggtgatttcatccctgaggtcgatttcatccttgatgggagcgttctcaggctcctgtcgaccaaagatcaatcccctgaccccatttcctggcttttatccctgtagtgaaatcgaagaccctgcagaaaaaggcgacagaaaattaaacaaggggttgaacaggaattcgcttcctacaccacagctgaggcgtagttcaggcacgtccgggctgctgcccgttgagcagtcttctcggtgggatcgtaacaacggcaagcggcctcaccaggaattcggaatctcctcccagggctgctacctgaacggacctttcaactctaacctcctgaccattcctaaacagagatcttcatctgtctctctgactcaccatgtgggcctccgtcgcgctggtgttctgagctccttaagccctgtgaactcatccaatcacggaccagtatctaccgggagcctgactaatcggtcacctatagaattccccgacaccgcagatttccttaacaaacccagtgttatactacaacggtcactgggtaacgcccctaacacaccagacttctaccagcaactgcgaaacagtgactcaaacctatgcaatagctgcggtcaccagatgctgaagtacgtgagcacctcggaaagtgatggaaccgactgctgctcgggcaagagcggggaagaggaaaacattttttcgaaagagtctttcaagctgatggaaactcagcaggaggaggagaccgaaaagaaagattcaaggaaacttttccaggaaggggacaagtggcttactgaggaggcccagagtgaacagcaaaccaatatcgagcaagaagtgtcattagacttaatcttggtggaagaatatgactctcttatcgaaaaaatgagtaattggaatttccccatcttcgagctggtagagaaaatgggcgaaaagtcgggcagaatcctaagtcaggtgatgtacaccctgtttcaggacacgggcctgttagaaattttcaagattccaacacaacagtttatgaattactttcgggcactagagaacggctacagagacatcccttaccataataggattcatgcaaccgacgtgttacatgcagtttggtacctaaccacacgcccggttccaggcctacaacagattcacaatggttgcgggactgggaatgaaactgacagcgatgggcgaatcaatcacggccgcatcgcctatatctcgtcaaaatcttgctctaacccagacgagagctacggctgtctgtcctccaacatcccagctttggagcttatggctttgtacgtcgctgctgccatgcacgactatgatcacccaggccggacaaacgctttccttgttgctaccaatgctcctcaggctgttctatacaacgacagatctgtgcttgagaaccaccatgctgcctcggcctggaacctgtacctgtccagacccgagtacaacttcctgttacatctggaccacgtcgagttcaagagatttaggttccttgtgatcgaggctatcctggccacagatttaaaaaagcacttcgattttctggccgaatttaatgcgaaagccaacgatgtaaattctaatgggatagagtggtcgaacgagaatgatagactcctggtctgccaggtttgcatcaagctcgcagatataaacggacccgcaaaggtgcgggacctccatctcaagtggactgagggcatagtcaacgagttttacgaacagggggacgaggaggccaacttagggctgcccatctccccttttatggaccgctcttcgccacaactcgcaaaattacaggagagctttatcacacacatcgttggccccctatgtaactcctacgatgcagctggtttattacctgggcagtggctagaggcggaggaggataatgacacggagtcgggcgatgacgaggatggtgaggagttggacaccgaggatgaggagatggaaaataacctgaatccaaagcccccgagaagaaagagccggaggcggatcttttgtcagctgatgcaccatctcaccgagaatcataaaatctggaaggaaatcgtcgaggaggaggagaagtgtaaggccgatggcaacaagttgcaagtcgagaatagctctttgcctcaggctgatgaaattcaggtaatagaggaggccgacgaggaagagtag

SEQ ID NO: 17149 - DNA, 3186 bp, Artificial Sequence
  derived and/or modified sequence
atgcggcgggacgagcgggacgccaaggccatgcggagcctgcagccaccggatggagccggctcaccccccgaatccctcaggaacggttacgtgaagagctgtgtgagtcctctgagacaggaccctccaagagggttcttcttccatctttgtagattctgcaacgtcgagcttcgaccacccccagcatctccacagcaacctcggcggtgcagtccgttttgtcgtgcccggctatcactcggcgcgctggccgcctttgtccttgctctgctgttgggtgccgaacccgagtcttgggctgccggtgccgcctggctcaggacactactatccgtatgttcccacagcttgtctccactctttagtatcgcttgcgcctttttcttcttaacttgctttctgacccgaaccaaacgagggcctggcccaggcaggtcctgtggttcatggtggttactggccctaccagcgtgctgctatttgggagatttcctggtatggcagtggtggtcctggccatggggggacggtgacgctggtagcgcagcccctcacacaccaccagaggccgccgctgggaggcttttgcttgttctgtcttgcgtgggactgctgcttacgttagcacatcccctccgcttacggcattgtgtgcttgtgctcctgcttgcctctttcgtctggtgggtgtcgttcactagtctgggcagcttgccctctgccctgcgtccactgctgtccgggctcgtcgggggtgcaggatgcctgctggctctgggactggaccacttttttcagattagggaggctccactacaccccaggctgagcagtgctgcagaagaaaaagtgcccgtcattcgtcctcggagacggagttcttgtgtcagcctaggtgaaactgcagcctcctactatggcagctgcaagatcttccggcgacccagtctgccatgcatttcccgggagcagatgatcctttgggactgggatctcaagcaatggtacaaacctcattatcagaatagcggaggaggtaacggcgtcgatctgagtgtgctcaacgaggctcgtaacatggtctccgacctcttgaccgacccatccctcccacctcaaggactcaaccgcaactccctgcccacacctcaactgaggcgcagttcaggaacctccggtctccttccggtggagcagtccagccggtgggacaggaacaacgggaagcggccgcaccaggagttcgggattagctcccagggttgttaccttaatggaccatttaactccaacctcctgactatccccaaacagaggtcctccagcgtgtcgctgactcatcacgtcggtttgcgccgagctggagttctgtcctctttatcccccgtgaactcatccaatcacggaccagtgtctacggggagcctcactaatcgctcaccaatagagtttccagataccgccgactttttgaataagcccagcgtgatactccagagaagcttaggcaacgccccaaacacccccgacttttaccagcaacttcggaactccgattcaaacctatgcaatagttgcgggcatcagatgctgaaatatgtgtccacttcagaatccgacggtaccgactgttgcagtggaaaaagtggagaagaggaaaatatcttttcaaaagagtcctttaaactgatggagacccagcaggaagaggaaaccgagaagaaggacagcaggaagctgtttcaggaaggcgacaagtggttaacagaggaggctcagagcgaacagcagacgaatatcgaacaagaagtcagtctggatttgatactggtcgaagaatacgactccctgattgagaagatgtccaactggaactttccaatcttcgaactcgtagaaaaaatgggggaaaaatcaggccgcatactctcccaagtcatgtacacgttatttcaggataccggattactagagatctttaaaattcccactcagcagtttatgaattactttagagccctcgaaaacggctaccgggacataccttatcataataggatccatgctacagatgttttacacgccgtgtggtacttgaccaccaggccagtgcctgggttacagcaaatccacaatggatgcggtactggtaacgagacagactcagacgggaggatcaatcatggaaggattgcctacatcagctctaagtcgtgctccaacccagacgaatcttacggttgcctgagttccaacataccagcactcgaattgatggccttgtacgtcgccgccgcaatgcacgattacgatcatcctggcaggacaaatgctttcctggttgccacaaacgcccctcaggccgttctgtacaatgatcggtccgtgctggaaaatcaccatgctgcctcagcgtggaacctctatttaagcaggcccgagtacaacttcttgctccacttagaccatgttgaatttaaaaggttccggttcctggtgatcgaggccatcttggctaccgacctgaagaagcactttgatttcctagccgaattcaatgcgaaagcaaacgatgtgaactcgaacggtatcgaatggtctaatgagaacgacaggctactggtgtgtcaggtgtgcattaaattggccgatattaacgggcccgccaaggttagagacctgcacctgaaatggaccgaaggaattgttaatgagttctacgagcagggggacgaggaagccaatttgggattgcctatctcacccttcatggataggagcagcccccagttggcaaagcttcaggagtcctttattacccacattgtcggtccactatgtaatagttatgatgcagccgggctgctgcccggtcagtggctagaagcagaggaggacaatgatactgagtctggagacgacgaggatggcgaggaacttgacactgaggatgaggaaatggaaaataatctcaaccctaagccaccccggaggaaatcccgaaggcgcattttttgtcaactaatgcaccacctgacagaaaaccacaaaatctggaaggagatcgtggaggaggaggagaaatgcaaagccgatggaaacaaactgcaggtcgaaaactcaagtctgccccaagcggacgaaattcaggtgatagaggaagccgatgaggaggaatag

SEQ ID NO: 17150 - DNA, 4836 bp, Artificial Sequence
  derived and/or modified sequence
gctcgcgcgcccaacggaccaggctggggccgtgaggtaactgttgcagccagcggaggtgggaggcgacactgagtctccagtcccgagaggtgcccgagggaaaaggaggcggcagctaaactggtcctggagagaagccccttccgcccctctcctcagccagcatgtcccggactccgccgctcctcagtccgcgcggtggggaccccgggccgtggcggccggcgcagccctgacgggttgcgaaccagggggcgccccgaacgcgggggttggggtctgggagcgcgagcggccgctacggtacgagcggggtgtgctgagtcccgtggccacccccggccccagccatgaggagggacgagcgagacgccaaagccatgcggtccctgcagccgccggatggggccggctcgccccccgagagtctgaggaacggctacgtgaagagctgcgtgagccccttgcggcaggaccctccgcgcggcttcttcttccacctctgccgcttctgcaacgtggagctgcggccgccgccggcctctccccagcagccgcggcgctgctcccccttctgccgggcgcgcctctcgctgggcgccctggctgcctttgtcctcgccctgctgctgggcgcggaacccgagagctgggctgccggggccgcctggctgcggacgctgctgagcgtgtgttcgcacagcttgagccccctcttcagcatcgcctgtgccttcttcttcctcacctgcttcctcacccggaccaagcggggacccggcccgggccggagctgcggctcctggtggctgctggcgctgcccgcctgctgttacctgggggacttcttggtgtggcagtggtggtcttggccttggggggatggcgacgcagggtccgcggccccgcacacgcccccggaggcggcagcgggcaggttgctgctggtgctgagctgcgtagggctgctgctgacgctcgcgcacccgctgcggctccggcactgcgttctggtgctgctcctggccagcttcgtctggtgggtctccttcaccagcctcgggtcgctgccctccgccctcaggccgctgctctccggcctggtggggggcgctggctgcctgctggccctggggttggatcacttctttcaaatcagggaagcgcctcttcatcctcgactgtccagtgccgccgaagaaaaagtgcctgtgatccgaccccggaggaggtccagctgcgtgtcgttaggagaaactgcagccagttactatggcagttgcaaaatattcaggagaccgtcgttgccttgtatttccagagaacagatgattctttgggattgggacttaaaacaatggtataagcctcattatcaaaattctggaggtggaaatggagttgatctttcagtgctaaatgaggctcgcaatatggtgtcagatcttctgactgatccaagccttccaccacaagtcatttcctctctacggagtattagtagcttaatgggtgctttctcaggttcctgtaggccaaagattaatcctctcacaccatttcctggattttacccctgttctgaaatagaggacccagctgagaaaggggatagaaaacttaacaagggactaaataggaatagtttgccaactccacagctgaggagaagctcaggaacttcaggattgctacctgttgaacagtcttcaaggtgggatcgtaataatggcaaaagacctcaccaagaatttggcatttcaagtcaaggatgctatctaaatgggccttttaattcaaatctactgactatcccgaagcaaaggtcatcttctgtatcactgactcaccatgtaggtctcagaagagctggtgttttgtccagtctgagtcctgtgaattcttccaaccatggaccagtgtctactggctctctaactaatcgatcacccatagaatttcctgatactgctgattttcttaataagccaagcgttatcttgcagagatctctgggcaatgcacctaatactccagatttttatcagcaacttagaaattctgatagcaatctgtgtaacagctgtggacatcaaatgctgaaatatgtttcaacatctgaatcagatggtacagattgctgcagtggaaaatcaggtgaagaagaaaacattttctcgaaagaatcattcaaacttatggaaactcaacaagaagaggaaacagagaagaaagacagcagaaaattatttcaggaaggtgataagtggctaacagaagaggcacagagtgaacagcaaacaaatattgaacaggaagtatcactggacctgattttagtagaagagtatgactcattaatagaaaagatgagcaactggaattttccaatttttgaacttgtagaaaagatgggagagaaatcaggaaggattctcagtcaggttatgtataccttatttcaagacactggtttattggaaatatttaaaattcccactcaacaatttatgaactattttcgtgcattagaaaatggctatcgagacattccttatcacaatcgtatacatgccacagatgtgctacatgcagtttggtatctgacaacacggccagttcctggcttacagcagatccacaatggttgtggaacaggaaatgaaacagattctgatggtagaattaaccatgggcgaattgcttatatttcttcgaagagctgctctaatcctgatgagagttatggctgcctgtcttcaaacattcctgcattagaattgatggctctatacgtggcagctgccatgcatgattatgatcacccagggaggacaaatgcatttctagtggctacaaatgcccctcaggcagttttatacaatgacagatctgttctggaaaatcatcatgctgcgtcagcttggaatctatatctttctcgcccagaatacaacttccttcttcatcttgatcatgtggaattcaagcgctttcgttttttagtcattgaagcaatccttgctacggatcttaaaaagcattttgattttctcgcagaattcaatgccaaggcaaatgatgtaaatagtaatggcatagaatggagtaatgaaaatgatcgcctcttggtatgccaggtgtgcatcaaactggcagatataaatggcccagcaaaagttcgagacttgcatttgaaatggacagaaggcattgtcaatgaattttatgagcagggagatgaagaagcaaatcttggtctgcccatcagtccattcatggatcgttcttctcctcaactagcaaaactccaagaatcttttatcacccacatagtgggtcccctgtgtaactcctatgatgctgctggtttgctaccaggtcagtggttagaagcagaagaggataatgatactgaaagtggtgatgatgaagacggtgaagaattagatacagaagatgaagaaatggaaaacaatctaaatccaaaaccaccaagaaggaaaagcagacggcgaatattttgtcagctaatgcaccacctcactgaaaaccacaagatatggaaggaaatcgtagaggaagaagaaaaatgtaaagctgatgggaataaactgcaggtggagaattcctccttacctcaagcagatgagattcaggtaattgaagaggcagatgaagaggaatagcgacagtttgagtaaaagaaaagtcatattgaagaagcccagagggttgtgcccaggggcagaaatcattgcctagtgttcaccggctgactctcaactgaccattcccatgtggacaggccttaatactgtgagaggatccttgctctgctggcagtttcccactcctatgcactttcacaggaactagaaaactattcttaaaccaaaaataccatccgtgttgacccatgttgcagagcccttacttaaatccttcactggtgtatgaatactttgtcataatgctgctttgctgggtagtgagctcttatttttcactgggggtcagctataactaaaaactcaagtgacatatttcagttaccaaagtggccaggaactttttgcttttatgaaaatagattcatattgtatttcccagtgtgtcttttatgtctttgaatgttttggagaaaagtctatgcctgtctaaaaatgaatccagtgttgcctttctgagggatttctgctcaatgcaatacactgttcagtgctattctcccagctaggtttatccatgaaggactgagtgacctttgttgtatttaacaaaatccaggtgcatcaatttctgatgctttttactattgtgtattatctactatgtgtgttttatttctgctgagagtattcaggtttgccatggacatcagaagtttgaattccagtcttatcttatgttccatggctgaattttaaagctgtttaggtttaacaatgaagggatttattctttagtcaaaattgttgtttttactctagctcaggattcgtatttttaaagatttagttaatatgaacacagcacagatttgttagaagaaaaaaaatttgctgtaataccaaaactaacctcatcaaagatacagaaaaaaagaaatatagtgagccctaaaggacacatacattgaataaataattggaacatgtggttatctttagatccacatcttagctgtcatttgttcactctaaaactgatgttcatctttctgttaatttccctctgcctaaagactacatgacagaaatgacctatcactacttattatttctgaagcctaactgcaagactgatttctgagaacaagtaaagaactgg

SEQ ID NO: 17151 - DNA, 3665 bp, Artificial Sequence
  derived and/or modified sequence
gaggcggcagctaaactggtcctggagagaagccccttccgcccctctcctcagccagcatgtcccggactccgccgctcctcagtccgcgcggtggggaccccgggccgtggcggccggcgcagccctgacgggttgcgaaccagggggcgccccgaacgcgggggttggggtctgggagcgcgagcggccgctacggtacgagcggggtgtgctgagtcccgtggccacccccggccccagccatgaggagggacgagcgagacgccaaagccatgcggtccctgcagccgccggatggggccggctcgccccccgagagtctgaggaacggctacgtgaagagctgcgtgagccccttgcggcaggaccctccgcgcggcttcttcttccacctctgccgcttctgcaacgtggagctgcggccgccgccggcctctccccagcagccgcggcgctgctcccccttctgccgggcgcgcctctcgctgggcgccctggctgcctttgtcctcgccctgctgctgggcgcggaacccgagagctgggctgccggggccgcctggctgcggacgctgctgagcgtgtgttcgcacagcttgagccccctcttcagcatcgcctgtgccttcttcttcctcacctgcttcctcacccggaccaagcggggacccggcccgggccggagctgcggctcctggtggctgctggcgctgcccgcctgctgttacctgggggacttcttggtgtggcagtggtggtcttggccttggggggatggcgacgcagggtccgcggccccgcacacgcccccggaggcggcagcgggcaggttgctgctggtgctgagctgcgtagggctgctgctgacgctcgcgcacccgctgcggctccggcactgcgttctggtgctgctcctggccagcttcgtctggtgggtctccttcaccagcctcgggtcgctgccctccgccctcaggccgctgctctccggcctggtggggggcgctggctgcctgctggccctggggttggatcacttctttcaaatcagggaagcgcctcttcatcctcgactgtccagtgccgccgaagaaaaagtgcctgtgatccgaccccggaggaggtccagctgcgtgtcgttaggagaaactgcagccagttactatggcagttgcaaaatattcaggagaccgtcgttgccttgtatttccagagaacagatgattctttgggattgggacttaaaacaatggtataagcctcattatcaaaattctggaggtggaaatggagttgatctttcagtgctaaatgaggctcgcaatatggtgtcagatcttctgactgatccaagccttccaccacaaggactaaataggaatagtttgccaactccacagctgaggagaagctcaggaacttcaggattgctacctgttgaacagtcttcaaggtgggatcgtaataatggcaaaagacctcaccaagaatttggcatttcaagtcaaggatgctatctaaatgggccttttaattcaaatctactgactatcccgaagcaaaggtcatcttctgtatcactgactcaccatgtaggtctcagaagagctggtgttttgtccagtctgagtcctgtgaattcttccaaccatggaccagtgtctactggctctctaactaatcgatcacccatagaatttcctgatactgctgattttcttaataagccaagcgttatcttgcagagatctctgggcaatgcacctaatactccagatttttatcagcaacttagaaattctgatagcaatctgtgtaacagctgtggacatcaaatgctgaaatatgtttcaacatctgaatcagatggtacagattgctgcagtggaaaatcaggtgaagaagaaaacattttctcgaaagaatcattcaaacttatggaaactcaacaagaagaggaaacagagaagaaagacagcagaaaattatttcaggaaggtgataagtggctaacagaagaggcacagagtgaacagcaaacaaatattgaacaggaagtatcactggacctgattttagtagaagagtatgactcattaatagaaaagatgagcaactggaattttccaatttttgaacttgtagaaaagatgggagagaaatcaggaaggattctcagtcaggttatgtataccttatttcaagacactggtttattggaaatatttaaaattcccactcaacaatttatgaactattttcgtgcattagaaaatggctatcgagacattccttatcacaatcgtatacatgccacagatgtgctacatgcagtttggtatctgacaacacggccagttcctggcttacagcagatccacaatggttgtggaacaggaaatgaaacagattctgatggtagaattaaccatgggcgaattgcttatatttcttcgaagagctgctctaatcctgatgagagttatggctgcctgtcttcaaacattcctgcattagaattgatggctctatacgtggcagctgccatgcatgattatgatcacccagggaggacaaatgcatttctagtggctacaaatgcccctcaggcagttttatacaatgacagatctgttctggaaaatcatcatgctgcgtcagcttggaatctatatctttctcgcccagaatacaacttccttcttcatcttgatcatgtggaattcaagcgctttcgttttttagtcattgaagcaatccttgctacggatcttaaaaagcattttgattttctcgcagaattcaatgccaaggcaaatgatgtaaatagtaatggcatagaatggagtaatgaaaatgatcgcctcttggtatgccaggtgtgcatcaaactggcagatataaatggcccagcaaaagttcgagacttgcatttgaaatggacagaaggcattgtcaatgaattttatgagcagggagatgaagaagcaaatcttggtctgcccatcagtccattcatggatcgttcttctcctcaactagcaaaactccaagaatcttttatcacccacatagtgggtcccctgtgtaactcctatgatgctgctggtttgctaccaggtcagtggttagaagcagaagaggataatgatactgaaagtggtgatgatgaagacggtgaagaattagatacagaagatgaagaaatggaaaacaatctaaatccaaaaccaccaagaaggaaaagcagacggcgaatattttgtcagctaatgcaccacctcactgaaaaccacaagatatggaaggaaatcgtagaggaagaagaaaaatgtaaagctgatgggaataaactgcaggtggagaattcctccttacctcaagcagatgagattcaggtaattgaagaggcagatgaagaggaatagcgacagtttgagtaaaagaaaagtcatattgaagaagcccagagggttgtgcccaggggcagaaatcattgcctagtgttcaccggctgactctcaactgaccattcccatgtggacaggccttaatactgtgagaggatccttgctctgctggcagtttcccactcctatgcactttcacaggaactagaaaactattcttaaaccaaaaataccatccgtgttgacccatgt

SEQ ID NO: 17152 - DNA, 3339 bp, Artificial Sequence
  derived and/or modified sequence
atgcgtcgggacgagagggatgctaaagcgatgaggtccctgcaaccacctgacggcgctggatctccgccagagtcactgcgtaacgggtatgtgaaaagctgcgtctctcccctccgccaggacccccctcgaggatttttttttcacctgtgcagattttgtaatgtcgagctaaggccgcctccagcaagtccccaacagcctcgcaggtgttccccgttttgccgggcacggctctcacttggcgcattggctgctttcgtgttggccctgctgttaggggcagaaccagaaagttgggcggctggagccgcatggctgagaacccttctaagtgtgtgttcccacagcttgagccccctattttctattgcctgcgccttcttttttctcacatgcttcctcactaggaccaagcgcggacctggcccaggtcggtcctgcggctcttggtggctgctcgcacttccggcttgctgctatctgggcgacttcttggtgtggcagtggtggagttggccatggggggatggggatgcagggtctgcagcgccacatacaccaccggaagcggctgcgggtcgtctgctgcttgtgttgagttgcgttggactcttgctgaccctggctcaccctttgaggctccggcactgtgttttagttcttttgctggcctcattcgtgtggtgggtatctttcacaagtctgggtagtctgccaagcgccctcaggcctctcctttctggcctagtgggaggcgctgggtgtctgcttgcccttggcctggatcactttttccagatcagagaagccccacttcacccacgtctgtcctcagccgcagaagagaaggtgcccgtgatccggccaaggcggaggtctagttgcgtgtctctaggggagactgcggcaagctactacgggtcctgtaaaatcttccgaaggccttcattgccttgcatcagtcgggagcagatgattttgtgggattgggacctcaaacagtggtacaagccccactatcagaacagcggtgggggaaatggcgtcgatctgtctgtactcaatgaggcgcgtaatatggtttccgatctattgaccgatcctagcctgccaccacaggtgatttcttctctccgctccatatcgtcgcttatgggagcgttcagtggttcctgcaggcccaagatcaaccccctcacccccttccccggattctacccatgcagcgaaattgaggaccctgccgagaagggcgacagaaagctgaacaagggactgaataggaactccctccctacaccccagttgcggaggagttcaggcacctccgggctgctccctgtggaacagagtagtaggtgggataggaacaatggcaagagacctcatcaggaatttggcatttcaagtcaaggttgttatttgaatgggcctttcaactcaaaccttcttacaattcctaaacagcgaagcagctctgtgagcctgacccatcacgtgggactgcggagagcgggtgtgctttcaagtctgagccccgtcaatagcagcaaccacggccctgtttcaactggctcattgaccaaccgaagcccaatagaatttccagacaccgccgactttctgaataagcccagtgtgatcctccagaggagtctgggcaatgcacctaatacacctgatttctaccagcagttgcgcaactcggacagcaacctgtgtaatagttgcgggcaccagatgctgaaatacgtaagtacctcggaatctgacggcacggattgttgcagcggaaaatcaggggaggaagagaatattttcagcaaagagagctttaaactgatggaaacacagcaggaagaggagactgagaagaaagactcgagaaaactgttccaagaaggcgacaaatggctcactgaggaggcccagtccgagcaacaaacgaacattgaacaggaagtcagcctcgatctcatcctggtcgaggagtacgactccctcatcgagaagatgtctaattggaatttcccaatcttcgagctcgttgaaaagatgggggaaaagagcggacgaatcctgtcccaggtgatgtataccctcttccaggacaccggcctgctggagatcttcaagattcctacgcagcagtttatgaactattttcgcgcacttgaaaatggctatcgcgatattccttatcataatcgtatccatgccactgacgtgctgcacgcggtctggtaccttacaacacgcccagtgcccggtttgcagcagattcacaacggctgtggtaccgggaatgagactgactcagacggcaggattaatcacggaaggattgcctacatctcatctaagtcatgttcaaaccctgacgaaagctacgggtgcctgtccagcaacatccctgcactggagttgatggcgctctatgtagccgctgctatgcacgattacgatcaccctggccgaacgaacgcatttctcgtggcaaccaatgcacctcaggcagtgttgtacaacgaccgcagcgtacttgaaaaccaccatgccgcttcggcctggaatctgtatctcagccgccctgaatacaatttcctccttcacctcgaccacgtcgagttcaagaggttccggtttctagtgatcgaggccattcttgccactgacttgaaaaaacactttgattttctcgcagagttcaacgccaaggcaaatgatgtcaatagcaacggaatcgagtggtccaacgaaaacgacagactgttggtgtgccaggtgtgtatcaaactggcagacatcaacggacctgctaaggtgcgcgacctccacttgaagtggaccgaggggatagtgaacgaattttatgaacaaggcgacgaagaggctaacctcggtctgcctatctccccttttatggaccgctcctcccctcaactggctaagctgcaggagagttttatcacacacatcgtcggccctttatgcaacagctatgacgccgctggtttgctcccgggacagtggctggaagcagaggaagataatgacaccgagagcggcgacgatgaggatggcgaggaattagacacagaggatgaggagatggaaaacaacctgaacccgaagccacccaggagaaagtccagaaggcgtattttctgtcagctcatgcaccatctcacagaaaatcataagatatggaaagagattgtcgaagaagaggaaaagtgtaaagccgacgggaacaagcttcaggtcgaaaactcatcgctgccacaggctgatgagattcaggtgatcgaagaagccgacgaggaggaatag

SEQ ID NO: 17153 - DNA, 3186 bp, Artificial Sequence
  derived and/or modified sequence
atgaggagggacgagcgcgatgcaaaagccatgaggagcctgcagcctccagatggagctggtagccccccagaaagcctgcggaacggatatgtcaaatcctgtgtgagccctttgcgacaggatcccccacgcggttttttctttcatctttgtcggttttgtaatgtcgagctgcgcccaccacccgcttcccctcagcagcccaggagatgctccccgttctgcagggccaggttgtcactaggcgctcttgcagcctttgtgctcgcactcctactgggcgctgaaccggagagctgggctgcaggcgctgcctggctaaggacgctgctctctgtgtgttctcactctctctcacctctgttcagtatagcctgcgcctttttttttcttacctgttttttgactcggaccaaaagaggtcccggaccagggagatcttgcggttcttggtggctgctagcactgcctgcgtgttgctatttgggcgacttcctggtttggcaatggtggtcctggccctggggcgacggggatgccggatccgcggcaccccacacaccccctgaagccgcagccggaaggttgttactcgtactcagttgcgtaggtcttctcctcaccttggcccaccccctccggttacgccactgtgtgctagttctgctgctcgcgagcttcgtctggtgggtaagctttacctcactgggatcccttccttcagctttgcgtccactgctgtcaggccttgtcgggggagccggatgcctgcttgccctgggcttagatcatttctttcagatccgagaggccccacttcatcctaggctctccagcgcggctgaggagaaggtgccagtgattcggccaagaaggagatcaagctgcgtatcacttggggagactgccgctagctactacggatcttgcaaaattttccgcaggccaagcttgccctgcatcagtagggagcagatgattttgtgggactgggacttaaagcagtggtacaaaccacattaccagaactctgggggtggtaatggcgtggacctgagcgtcttgaatgaagcgcgaaatatggtctccgacctactgacagatcctagtctcccaccgcagggcctgaatcgtaattcactgcccacacctcaactgcgcagaagcagcggaaccagcggcctgctccccgtggaacaaagctctcggtgggatcggaataatggcaagcgccctcaccaggagtttggaatcagtagccagggctgctacttgaatggacctttcaatagtaacctcttgacaatccccaagcagcggtctagttctgtgtcgctcacacaccacgtggggctgagacgggctggcgtactcagctcattgagccccgtgaactcttcaaatcacggaccagtgtccacaggatctctcaccaatagatcaccaattgagttccctgatacagccgactttctgaataaacctagcgttattctgcaacgaagcctgggtaacgcacctaataccccagatttctaccaacaactgagaaacagtgacagcaacctgtgcaactcctgcgggcatcagatgctgaagtacgtgagcacgagtgaaagcgatggaacagattgctgtagcggtaaatcaggtgaggaggagaacatattcagcaaagagagctttaaattaatggaaacgcagcaggaagaggagacggaaaaaaaggactccaggaagttgtttcaggaaggggacaagtggttaaccgaggaggcacagagtgagcaacaaaccaatatcgagcaggaagtctctttagacctaatacttgtggaagagtacgattcacttatcgagaaaatgagcaattggaacttccccattttcgaactagtagaaaaaatgggcgaaaaaagcggcagaattcttagtcaggtaatgtacacgctgttccaggatacagggctattggaaatttttaagatacccacccagcagttcatgaattactttagagccctggagaatggttaccgagacatcccttaccataatcgaattcacgccacagatgtcctgcacgcagtgtggtacttaacaaccagacctgtgcctggtctccaacagatccataacgggtgcggcactgggaatgagactgacagcgacggaagaattaatcacggtaggattgcttacatttcctccaagtcctgctctaatccagacgagtcctacggatgtctcagcagtaacattcccgctctggagctgatggctctatacgtcgctgctgctatgcacgactatgaccatccagggaggactaacgcctttctggttgctacgaacgcacctcaggccgtcctttataatgatcgctctgtcctggagaatcaccacgctgccagtgcatggaatctgtacttgtcgcgcccagaatataatttcctcctgcacttagaccatgttgagttcaagcgcttccgatttctcgtcattgaggctattcttgccacagacttgaagaaacattttgatttccttgcagagttcaatgccaaggcgaatgacgtaaatagtaacggaattgagtggagcaacgaaaacgacagactcctagtttgccaggtgtgtatcaaattggccgacataaacggacccgctaaggttcgcgacctacatctcaagtggactgaagggattgtcaacgaattctatgagcagggagatgaggaagcgaatcttgggcttccgatttccccgttcatggatagaagctcccctcagctggccaagttacaggagagttttatcacgcacatcgtcggaccgctatgcaacagctacgatgctgccggtctcctgcctggacagtggcttgaggccgaggaggataacgatacagagagcggcgatgacgaggacggggaagaactggatacagaggacgaggaaatggaaaacaacctcaacccaaaaccgccacgacgtaagtcccggagaaggatcttttgccagctgatgcatcatcttaccgagaatcacaagatctggaaggaaatcgtggaagaggaggagaagtgtaaagcggacggcaacaagctgcaggtggaaaactcctccctgcctcaggccgacgaaatccaggtgattgaagaggctgacgaggaggagtag

SEQ ID NO: 17154 - DNA, 3339 bp, Artificial Sequence
  derived and/or modified sequence
atgagaagagacgagagagacgccaaggccatgagaagcctgcagccccccgacggcgccggcagcccccccgagagcctgagaaacggctacgtgaagagctgcgtgagccccctgagacaggacccccccagaggcttcttcttccacctgtgcagattctgcaacgtggagctgagacccccccccgccagcccccagcagcccagaagatgcagccccttctgcagagccagactgagcctgggcgccctggccgccttcgtgctggccctgctgctgggcgccgagcccgagagctgggccgccggcgccgcctggctgagaaccctgctgagcgtgtgcagccacagcctgagccccctgttcagcatcgcctgcgccttcttcttcctgacctgcttcctgaccagaaccaagagaggccccggccccggcagaagctgcggcagctggtggctgctggccctgcccgcctgctgctacctgggcgacttcctggtgtggcagtggtggagctggccctggggcgacggcgacgccggcagcgccgccccccacaccccccccgaggccgccgccggcagactgctgctggtgctgagctgcgtgggcctgctgctgaccctggcccaccccctgagactgagacactgcgtgctggtgctgctgctggccagcttcgtgtggtgggtgagcttcaccagcctgggcagcctgcccagcgccctgagacccctgctgagcggcctggtgggcggcgccggctgcctgctggccctgggcctggaccacttcttccagatcagagaggcccccctgcaccccagactgagcagcgccgccgaggagaaggtgcccgtgatcagacccagaagaagaagcagctgcgtgagcctgggcgagaccgccgccagctactacggcagctgcaagatcttcagaagacccagcctgccctgcatcagcagagagcagatgatcctgtgggactgggacctgaagcagtggtacaagccccactaccagaacagcggcggcggcaacggcgtggacctgagcgtgctgaacgaggccagaaacatggtgagcgacctgctgaccgaccccagcctgcccccccaggtgatcagcagcctgagaagcatcagcagcctgatgggcgccttcagcggcagctgcagacccaagatcaaccccctgacccccttccccggcttctacccctgcagcgagatcgaggaccccgccgagaagggcgacagaaagctgaacaagggcctgaacagaaacagcctgcccaccccccagctgagaagaagcagcggcaccagcggcctgctgcccgtggagcagagcagcagatgggacagaaacaacggcaagagaccccaccaggagttcggcatcagcagccagggctgctacctgaacggccccttcaacagcaacctgctgaccatccccaagcagagaagcagcagcgtgagcctgacccaccacgtgggcctgagaagagccggcgtgctgagcagcctgagccccgtgaacagcagcaaccacggccccgtgagcaccggcagcctgaccaacagaagccccatcgagttccccgacaccgccgacttcctgaacaagcccagcgtgatcctgcagagaagcctgggcaacgcccccaacacccccgacttctaccagcagctgagaaacagcgacagcaacctgtgcaacagctgcggccaccagatgctgaagtacgtgagcaccagcgagagcgacggcaccgactgctgcagcggcaagagcggcgaggaggagaacatcttcagcaaggagagcttcaagctgatggagacccagcaggaggaggagaccgagaagaaggacagcagaaagctgttccaggagggcgacaagtggctgaccgaggaggcccagagcgagcagcagaccaacatcgagcaggaggtgagcctggacctgatcctggtggaggagtacgacagcctgatcgagaagatgagcaactggaacttccccatcttcgagctggtggagaagatgggcgagaagagcggcagaatcctgagccaggtgatgtacaccctgttccaggacaccggcctgctggagatcttcaagatccccacccagcagttcatgaactacttcagagccctggagaacggctacagagacatcccctaccacaacagaatccacgccaccgacgtgctgcacgccgtgtggtacctgaccaccagacccgtgcccggcctgcagcagatccacaacggctgcggcaccggcaacgagaccgacagcgacggcagaatcaaccacggcagaatcgcctacatcagcagcaagagctgcagcaaccccgacgagagctacggctgcctgagcagcaacatccccgccctggagctgatggccctgtacgtggccgccgccatgcacgactacgaccaccccggcagaaccaacgccttcctggtggccaccaacgccccccaggccgtgctgtacaacgacagaagcgtgctggagaaccaccacgccgccagcgcctggaacctgtacctgagcagacccgagtacaacttcctgctgcacctggaccacgtggagttcaagagattcagattcctggtgatcgaggccatcctggccaccgacctgaagaagcacttcgacttcctggccgagttcaacgccaaggccaacgacgtgaacagcaacggcatcgagtggagcaacgagaacgacagactgctggtgtgccaggtgtgcatcaagctggccgacatcaacggccccgccaaggtgagagacctgcacctgaagtggaccgagggcatcgtgaacgagttctacgagcagggcgacgaggaggccaacctgggcctgcccatcagccccttcatggacagaagcagcccccagctggccaagctgcaggagagcttcatcacccacatcgtgggccccctgtgcaacagctacgacgccgccggcctgctgcccggccagtggctggaggccgaggaggacaacgacaccgagagcggcgacgacgaggacggcgaggagctggacaccgaggacgaggagatggagaacaacctgaaccccaagccccccagaagaaagagcagaagaagaatcttctgccagctgatgcaccacctgaccgagaaccacaagatctggaaggagatcgtggaggaggaggagaagtgcaaggccgacggcaacaagctgcaggtggagaacagcagcctgccccaggccgacgagatccaggtgatcgaggaggccgacgaggaggagtag

SEQ ID NO: 17155 - DNA, 3186 bp, Artificial Sequence
  derived and/or modified sequence
atgagaagagacgagagagacgccaaggccatgagaagcctgcagccccccgacggcgccggcagcccccccgagagcctgagaaacggctacgtgaagagctgcgtgagccccctgagacaggacccccccagaggcttcttcttccacctgtgcagattctgcaacgtggagctgagacccccccccgccagcccccagcagcccagaagatgcagccccttctgcagagccagactgagcctgggcgccctggccgccttcgtgctggccctgctgctgggcgccgagcccgagagctgggccgccggcgccgcctggctgagaaccctgctgagcgtgtgcagccacagcctgagccccctgttcagcatcgcctgcgccttcttcttcctgacctgcttcctgaccagaaccaagagaggccccggccccggcagaagctgcggcagctggtggctgctggccctgcccgcctgctgctacctgggcgacttcctggtgtggcagtggtggagctggccctggggcgacggcgacgccggcagcgccgccccccacaccccccccgaggccgccgccggcagactgctgctggtgctgagctgcgtgggcctgctgctgaccctggcccaccccctgagactgagacactgcgtgctggtgctgctgctggccagcttcgtgtggtgggtgagcttcaccagcctgggcagcctgcccagcgccctgagacccctgctgagcggcctggtgggcggcgccggctgcctgctggccctgggcctggaccacttcttccagatcagagaggcccccctgcaccccagactgagcagcgccgccgaggagaaggtgcccgtgatcagacccagaagaagaagcagctgcgtgagcctgggcgagaccgccgccagctactacggcagctgcaagatcttcagaagacccagcctgccctgcatcagcagagagcagatgatcctgtgggactgggacctgaagcagtggtacaagccccactaccagaacagcggcggcggcaacggcgtggacctgagcgtgctgaacgaggccagaaacatggtgagcgacctgctgaccgaccccagcctgcccccccagggcctgaacagaaacagcctgcccaccccccagctgagaagaagcagcggcaccagcggcctgctgcccgtggagcagagcagcagatgggacagaaacaacggcaagagaccccaccaggagttcggcatcagcagccagggctgctacctgaacggccccttcaacagcaacctgctgaccatccccaagcagagaagcagcagcgtgagcctgacccaccacgtgggcctgagaagagccggcgtgctgagcagcctgagccccgtgaacagcagcaaccacggccccgtgagcaccggcagcctgaccaacagaagccccatcgagttccccgacaccgccgacttcctgaacaagcccagcgtgatcctgcagagaagcctgggcaacgcccccaacacccccgacttctaccagcagctgagaaacagcgacagcaacctgtgcaacagctgcggccaccagatgctgaagtacgtgagcaccagcgagagcgacggcaccgactgctgcagcggcaagagcggcgaggaggagaacatcttcagcaaggagagcttcaagctgatggagacccagcaggaggaggagaccgagaagaaggacagcagaaagctgttccaggagggcgacaagtggctgaccgaggaggcccagagcgagcagcagaccaacatcgagcaggaggtgagcctggacctgatcctggtggaggagtacgacagcctgatcgagaagatgagcaactggaacttccccatcttcgagctggtggagaagatgggcgagaagagcggcagaatcctgagccaggtgatgtacaccctgttccaggacaccggcctgctggagatcttcaagatccccacccagcagttcatgaactacttcagagccctggagaacggctacagagacatcccctaccacaacagaatccacgccaccgacgtgctgcacgccgtgtggtacctgaccaccagacccgtgcccggcctgcagcagatccacaacggctgcggcaccggcaacgagaccgacagcgacggcagaatcaaccacggcagaatcgcctacatcagcagcaagagctgcagcaaccccgacgagagctacggctgcctgagcagcaacatccccgccctggagctgatggccctgtacgtggccgccgccatgcacgactacgaccaccccggcagaaccaacgccttcctggtggccaccaacgccccccaggccgtgctgtacaacgacagaagcgtgctggagaaccaccacgccgccagcgcctggaacctgtacctgagcagacccgagtacaacttcctgctgcacctggaccacgtggagttcaagagattcagattcctggtgatcgaggccatcctggccaccgacctgaagaagcacttcgacttcctggccgagttcaacgccaaggccaacgacgtgaacagcaacggcatcgagtggagcaacgagaacgacagactgctggtgtgccaggtgtgcatcaagctggccgacatcaacggccccgccaaggtgagagacctgcacctgaagtggaccgagggcatcgtgaacgagttctacgagcagggcgacgaggaggccaacctgggcctgcccatcagccccttcatggacagaagcagcccccagctggccaagctgcaggagagcttcatcacccacatcgtgggccccctgtgcaacagctacgacgccgccggcctgctgcccggccagtggctggaggccgaggaggacaacgacaccgagagcggcgacgacgaggacggcgaggagctggacaccgaggacgaggagatggagaacaacctgaaccccaagccccccagaagaaagagcagaagaagaatcttctgccagctgatgcaccacctgaccgagaaccacaagatctggaaggagatcgtggaggaggaggagaagtgcaaggccgacggcaacaagctgcaggtggagaacagcagcctgccccaggccgacgagatccaggtgatcgaggaggccgacgaggaggagtag

SEQ ID NO: 17156 - protein, 536 aa, Artificial Sequence
  derived and/or modified sequence
MELSPRSPPEMLEESDCPSPLELKSAPSKKMWIKLRSLLRYMVKQLENGEINIEELKKNLEYTASLLEAVYIDETRQILDTEDELQELRSDAVPSEVRDWLASTFTQQARAKGRRAEEKPKFRSIVHAVQAGIFVERMFRRTYTSVGPTYSTAVLNCLKNLDLWCFDVFSLNQAADDHALRTIVFELLTRHNLISRFKIPTVFLMSFLDALETGYGKYKNPYHNQIHAADVTQTVHCFLLRTGMVHCLSEIELLAIIFAAAIHDYEHTGTTNSFHIQTKSECAIVYNDRSVLENHHISSVFRLMQDDEMNIFINLTKDEFVELRALVIEMVLATDMSCHFQQVKTMKTALQQLERIDKPKALSLLLHAADISHPTKQWLVHSRWTKALMEEFFRQGDKEAELGLPFSPLCDRTSTLVAQSQIGFIDFIVEPTFSVLTDVAEKSVQPLADEDSKSKNQPSFQWRQPSLDVEVGDPNPDVVSFRSTWVKRIQENKQKWKERAASGITNQMSIDELSPCEEEAPPSPAEDEHNQNGNLD

SEQ ID NO: 17157 - DNA, 1611 bp, Artificial Sequence
  derived and/or modified sequence
atggaactcagtccgcggagccccccagagatgttagaagaaagtgactgccccagtcctctagagctgaagtcggcgccctctaagaaaatgtggatcaaactgagatcccttctgcgctatatggtgaagcagctggaaaacggcgaaattaacatcgaggagctgaaaaagaacctcgagtacaccgcctcacttctcgaagcagtgtacattgacgaaacgcgacaaattctggatactgaggatgagttacaggaacttaggtcagatgctgtgccaagcgaggtgcgtgattggctcgcttctaccttcactcagcaggcccgggcaaagggacggcgggcagaggagaagcctaaatttcggagcattgtgcacgcagtacaagcaggcattttcgtagagcgcatgttcaggcggacctacacttctgtgggcccaacctactctactgccgtgcttaactgcctcaagaatctggatctctggtgttttgacgtcttctccctgaatcaggctgcggacgaccatgctctcaggaccatagtgtttgaactgctcactcggcataatctaatctctcggtttaaaatccctactgtcttcttgatgtcttttttggacgccctggagaccggctatggcaagtataaaaatccgtaccacaaccaaatccatgccgcagatgtgactcagaccgtgcactgctttttgttgcgaaccggaatggtgcattgcctgtcagagatagaactgctggctatcattttcgcggctgcaatacacgattacgagcatactggcacaaccaattctttccacattcagacaaaatcagagtgcgccatcgtgtacaacgataggagtgttcttgagaaccaccacatttcctctgtgttccgattgatgcaagatgacgagatgaacatctttataaatctcacaaaagatgagttcgtggaactcagagcacttgtgatcgagatggtactagcgacagatatgtcttgtcatttccagcaggtgaaaaccatgaagactgccctgcagcagctggagaggattgataagcccaaggcactgagcctgctgctccatgccgcggatatcagccatcctaccaagcagtggttggtccatagtaggtggaccaaggccctgatggaagagttcttccgacagggggacaaagaagccgagctgggcctgccattcagcccgctctgtgaccggacctccaccctggtggcccagagccagatcggctttatcgattttatcgtcgaaccaaccttctcagtgttgacagacgtggctgaaaagtccgttcagcccctcgctgatgaagacagtaaatccaagaatcagccgtcattccaatggagacagccgtcgctggacgtcgaagtcggagacccgaacccagacgtcgtgtcattccgtagtacttgggtcaagcggatccaagagaataaacaaaagtggaaagagagagccgcctccggcatcacaaatcagatgagtattgatgagctgtcaccttgcgaggaagaagcccctccttcacccgcggaggacgagcataatcaaaatggaaacttagactag

SEQ ID NO: 17158 - DNA, 1611 bp, Artificial Sequence
  derived and/or modified sequence
atggagctgagccccaggagccccccagagatgctggaggagagtgactgccccagccccctggagctgaagagcgcccccagcaagaagatgtggatcaagctgcggagcctgctgcgctacatggtgaagcagctggagaatggagagatcaacatcgaggagctgaagaagaacctggagtacacagccagcctgctggaggccgtgtacattgatgagacccggcagatcctggacacagaagatgagctgcaggagctgcggagtgatgctgtgcccagcgaggtgcgggactggctggccagcaccttcacccagcaggcccgggccaagggccggcgggcagaggagaagcccaagttccgcagcatcgtgcatgctgtgcaggccggcatctttgtggagaggatgttccggaggacctacacctctgtgggccccacctacagcacagctgtgctgaactgcctgaagaacctggacctgtggtgctttgatgtgttcagcctgaaccaggccgcagatgaccacgccctgcggaccatcgtgtttgagctgctgaccaggcacaacctgatcagccgcttcaagatccccaccgtcttcctgatgtccttcctggatgccctggagaccggctacggcaagtacaagaacccctaccacaaccagatccacgccgcagatgtgacccagacagtgcactgcttcctgctgaggacaggcatggtgcactgcctgtctgaaattgagctgctggccatcatctttgctgctgccatccatgactatgagcacacaggcaccaccaacagcttccacatccagaccaagtcagaatgtgccatcgtgtacaatgacagatctgtgctggagaaccaccacatcagctctgtgttccggctgatgcaggatgatgagatgaacatcttcatcaacctgaccaaggatgaatttgtggagctgcgggccctggtgattgagatggtgctggccacagacatgagctgccacttccagcaggtgaagaccatgaagacagccctgcagcagctggagagaattgacaagcccaaggccctgagcctgctgctgcacgccgctgacatcagccaccccaccaagcagtggctggtgcacagccgctggaccaaggccctgatggaggagttcttccggcagggcgacaaggaggccgagctgggcctgcccttcagccccctgtgtgacaggaccagcaccctggtggcccagagccagatcggcttcatcgacttcatcgtggagcccaccttctctgtgctgacagatgtggccgagaagtctgtgcagcccctggctgatgaggacagcaagagcaagaaccagcccagcttccagtggaggcagcccagcctggatgtggaggtgggggaccccaacccagatgtggtgtccttccgcagcacctgggtgaagaggatccaggagaacaagcagaagtggaaggagcgggccgccagcggcatcaccaaccagatgagcattgatgagctgagcccctgtgaggaggaggccccacccagccctgcagaagatgagcacaaccagaatggaaacctggactag

SEQ ID NO: 17159 - DNA, 1611 bp, Artificial Sequence
  derived and/or modified sequence
atggagctgagcccccggagcccccccgagatgctggaggagagcgactgtccaagccccttggagctcaaatctgccccaagcaagaaaatgtggattaagctgagaagcttgttgcgatatatggtaaagcagctggagaacggggagatcaatatcgaagaattgaaaaagaatcttgaatacacagcctccctactggaagctgtgtatatcgatgagacacgacaaattctggacaccgaggatgagctccaagaattgcggtcagacgccgtgccatctgaagtccgggattggctcgcttccacatttacacagcaagcacgagccaaggggcggagggctgaagaaaaacctaagtttcgctcaattgtgcacgctgtccaagcaggaatcttcgtggaaaggatgtttagacgcacctacactagtgtgggccctacgtactcaacagctgtccttaactgccttaagaaccttgacttatggtgttttgacgtgttttccctgaatcaggcagccgacgatcatgccctacgcaccatcgtctttgagctgctgaccagacacaacctgatatcaaggtttaaaattcctaccgtctttctgatgtcttttttagatgccctggaaacaggatatgggaagtacaagaatccatatcataaccaaatccacgcagccgatgtgacacagaccgtccactgcttcctcctgcgcacgggaatggtgcattgcttgtccgaaatcgagctcctggccatcatcttcgcggccgctatccacgactacgagcacacaggcacaaccaactccttccacatacagactaaaagcgagtgtgctatcgtctataatgatcgcagcgttcttgagaatcaccacatctcctcagtcttcaggctgatgcaagatgacgagatgaatatcttcataaatctgaccaaagacgagtttgtcgagcttcgcgctctcgtcattgaaatggtcctggccacggacatgtcatgccattttcaacaggtaaagactatgaagacagcccttcagcaactcgaacgcatcgacaagcctaaggctctctcacttctactgcacgcggccgacatttcacatcccacaaagcaatggctggtccacagccgctggacgaaggccctgatggaggaatttttccgacagggcgataaggaagccgagctgggcctgcccttcagtcctttgtgtgacagaaccagcactctcgtagcacagagtcagatcggttttatcgattttatagtggagcctaccttttccgttctgaccgacgtagctgagaagagtgtgcagcctcttgctgatgaggattctaaatctaagaaccaacccagcttccaatggcggcagccctccctggatgtcgaggttggcgatcctaatcctgatgtggtctcgttcagaagcacttgggtgaagcgaatccaagagaataaacagaagtggaaagaacgagcggcttcaggcatcacaaaccagatgtccatcgacgaactctctccctgcgaagaagaagcacctccgtctcctgcggaagatgagcacaaccaaaacggcaacctggactag

SEQ ID NO: 17160 - DNA, 3444 bp, Artificial Sequence
  derived and/or modified sequence
gtaaacacgcactcacatccgccagtacagggcacacgcagccactcgtccccggcgcctgtgtgcgtgcgctcgcccttgggcgcttctgtctgtgtgtgcccccggcttccaatcgttcctttgggagggggaggagtggctgtgaggagtgagagactggcgggcaggctgaggagaagggagggagagcagagggaggggggaacccggccgggggaggaggagagaggcgaggaggcggctctggcagcgcgcggcggcggcggcggtagcggcagcagcagcggcggtgcggagagcttggactgggagcccaaagctcggctgggcagcgggagaggaggagccgcaggagctgcagctctgccagcttgggccgagcctagagacaccggcctggctggtccacgccagccgcagaccgtggctgagcatggagctgtccccccgcagtcctccggagatgctggaggagtcggattgcccgtcacccctggagctgaagtcagcccccagcaagaagatgtggattaagcttcggtctctgctgcgctacatggtgaagcagttggagaatggggagataaacattgaggagctgaagaaaaatctggagtacacagcttctctgctggaagccgtctacatagatgagacacggcaaatcttggacacggaggacgagctgcaggagctgcggtcagatgccgtgccttcggaggtgcgggactggctggcctccaccttcacccagcaggcccgggccaaaggccgccgagcagaggagaagcccaagttccgaagcattgtgcacgctgtgcaggctgggatcttcgtggaacggatgttccggagaacatacacctctgtgggccccacttactctactgcggttctcaactgtctcaagaacctggatctctggtgctttgatgtcttttccttgaaccaggcagcagatgaccatgccctgaggaccattgtttttgagttgctgactcggcataacctcatcagccgcttcaagattcccactgtgtttttgatgagtttcctggatgccttggagacaggctatgggaagtacaagaatccttaccacaaccagatccacgcagccgatgttacccagacagtccattgcttcttgctccgcacagggatggtgcactgcctgtcggagattgagctcctggccatcatctttgctgcagctatccatgattatgagcacacgggcactaccaacagcttccacatccagaccaagtcagaatgtgccatcgtgtacaatgatcgttcagtgctggagaatcaccacatcagctctgttttccgattgatgcaggatgatgagatgaacattttcatcaacctcaccaaggatgagtttgtagaactccgagccctggtcattgagatggtgttggccacagacatgtcctgccatttccagcaagtgaagaccatgaagacagccttgcaacagctggagaggattgacaagcccaaggccctgtctctactgctccatgctgctgacatcagccacccaaccaagcagtggttggtccacagccgttggaccaaggccctcatggaggaattcttccgtcagggtgacaaggaggcagagttgggcctgcccttttctccactctgtgaccgcacttccactctagtggcacagtctcagatagggttcatcgacttcattgtggagcccacattctctgtgctgactgacgtggcagagaagagtgttcagcccctggcggatgaggactccaagtctaaaaaccagcccagctttcagtggcgccagccctctctggatgtggaagtgggagaccccaaccctgatgtggtcagctttcgttccacctgggtcaagcgcattcaggagaataagcagaaatggaaggaacgggcagcaagtggcatcaccaaccagatgtccattgacgagctgtccccctgtgaagaagaggcccccccatcccctgccgaagatgaacacaaccagaatgggaatctggattagccctggggctggcccaggtcttcattgagtccaaagtgtttgatgtcatcagcaccatccatcaggactggctcccccatctgctccaagggagcgtggtcgtggaagaaacaacccacctgaaggccaaatgccagagatttggggttggggaaagggcccctccccacctgacacccactggggtgcactttaatgttccggcagcaagactggggaacttcaggctcccagtggtcactgtgcccatccctcagcctctggattctcttcatggccaggtggctgccagggagcggggagcttcctggaggcttcccagggccttggggaagggtcagagatgccagccccctgggacctcccccatcctttttgcctccaagtttctaagcaatacattttgggggttccctcagccccccaccccagatcttagctggcaggtctgggtgccccttttcctcccctgggaagggctggaataggatagaaagctgggggttttcagagccctatgtgtggggaggggagtggattccttcagggcatggtacctttctaggacctgggaatggggtggagaggacatcctcttcaccccagaattgcgctgcttcagccccatctccagcctgatcctctgaatcttccttccctccctttctgatacagtgactggggcaaaaggagccattgtgaccaggggctgcgggaggcctttcctgggaccttccttgggactggtctgggcccctggggcttgtcgcctgccctgagtccggagccctttgcctccttcctctcccctggggctgggaggctccatccgaccaatgtctgtaaagtgctttgaggatctccccagcaaagcaccttcagaatgtatcgacaccagctgggttagggtcaagggtgcctggggagggtgagtaatcctgcattgctaaaagagagggtctgtcccctcctctccacgtcccagaactggcccagctgcaggcactaagaagctcctcccctgagacaagtgaggggtagtcggtgaaaggcagatggacaaggggctcagggctgctgccttcctgtcctctggagagaacccagccaggcgcggtgccccttcctctcctcaggctcctccttgcccccaccttgccccaggaaaggccaaagtccaggtgactgccctccttctttcttgtaaataccaaccatgcatttgtacagtgggccctgttcatgcgaaatccacatccatggtctcctagacctgctaccctggtacttccaccctaccccaccccgagaagggcagagacgcatgtgactcacccctgcccttggtttcccagacccctgctatagccagagaacaataaagaagggagaccagg

SEQ ID NO: 17161 - DNA, 1611 bp, Artificial Sequence
  derived and/or modified sequence
atggagctgagtccacgatcacctccggaaatgctcgaggagagtgactgcccatctcccctcgagctgaagagtgctcctagcaaaaagatgtggatcaaactgagatcattacttcgttatatggtgaaacagctcgagaatggagaaattaacatagaggagcttaaaaagaaccttgaatataccgcttcattactcgaagccgtgtatattgacgaaacccgccagatcctggacactgaggacgaactacaggaactgagatctgacgccgttcccagtgaagtgagggattggttagcctctacatttacgcagcaggctagagccaaaggcagaagggcagaagaaaagcctaaatttcggagcattgtccacgctgtccaagccggaatatttgtggaaagaatgttcaggaggacttacacgtccgtgggacctacttattctacggccgtcctgaattgcctgaagaaccttgacttatggtgttttgatgtcttctcattgaatcaggccgcagatgaccacgccctgagaaccatagtgttcgagctgctcactcgccataacctcatctctcgctttaagatcccaaccgtctttttaatgtctttcctcgatgcccttgagaccggatatgggaaatacaagaatccataccacaatcagatacacgccgcagatgtcacccagactgtgcactgcttccttctcaggacggggatggtgcattgccttagcgaaatcgaattgctggcaataatctttgcggctgccattcatgattacgaacatacagggacaacaaactcctttcacatccaaaccaagtctgagtgcgctatagtgtataacgatcggtccgttctggagaaccatcacatttcctctgtctttcggctgatgcaggatgacgagatgaacatttttataaacttaaccaaggacgaatttgtcgagctccgggctctggtgatcgagatggtcctggcaacggatatgtcatgtcatttccagcaggtgaaaacgatgaaaacagcccttcagcagttggaacgcattgacaaacccaaagctttgtccctgctgctgcatgctgctgatatcagtcacccaactaaacagtggctggtgcattccaggtggacaaaagcactcatggaagagttctttcgacagggcgacaaggaagctgaattaggactgccattttctccgctatgcgaccgcactagtacacttgttgcacagtcccagatcggttttatcgattttatcgtggaaccaacattttccgtgctgaccgacgtggccgaaaaatctgtacagcctcttgccgacgaagacagtaagtctaaaaatcagccatctttccagtggcgccagccatctctcgacgtggaggtcggagaccccaatccagatgtcgttagttttaggagcacttgggtgaaaaggatccaggagaataagcagaagtggaaagagagagccgcttccggtataactaaccagatgtcgattgacgaactgtccccctgcgaggaagaagcccctccatcccccgcagaggatgagcacaatcagaacgggaacctcgactag

SEQ ID NO: 17162 - DNA, 1611 bp, Artificial Sequence
  derived and/or modified sequence
atggagctgagccccagaagcccccccgagatgctggaggagagcgactgccccagccccctggagctgaagagcgcccccagcaagaagatgtggatcaagctgagaagcctgctgagatacatggtgaagcagctggagaacggcgagatcaacatcgaggagctgaagaagaacctggagtacaccgccagcctgctggaggccgtgtacatcgacgagaccagacagatcctggacaccgaggacgagctgcaggagctgagaagcgacgccgtgcccagcgaggtgagagactggctggccagcaccttcacccagcaggccagagccaagggcagaagagccgaggagaagcccaagttcagaagcatcgtgcacgccgtgcaggccggcatcttcgtggagagaatgttcagaagaacctacaccagcgtgggccccacctacagcaccgccgtgctgaactgcctgaagaacctggacctgtggtgcttcgacgtgttcagcctgaaccaggccgccgacgaccacgccctgagaaccatcgtgttcgagctgctgaccagacacaacctgatcagcagattcaagatccccaccgtgttcctgatgagcttcctggacgccctggagaccggctacggcaagtacaagaacccctaccacaaccagatccacgccgccgacgtgacccagaccgtgcactgcttcctgctgagaaccggcatggtgcactgcctgagcgagatcgagctgctggccatcatcttcgccgccgccatccacgactacgagcacaccggcaccaccaacagcttccacatccagaccaagagcgagtgcgccatcgtgtacaacgacagaagcgtgctggagaaccaccacatcagcagcgtgttcagactgatgcaggacgacgagatgaacatcttcatcaacctgaccaaggacgagttcgtggagctgagagccctggtgatcgagatggtgctggccaccgacatgagctgccacttccagcaggtgaagaccatgaagaccgccctgcagcagctggagagaatcgacaagcccaaggccctgagcctgctgctgcacgccgccgacatcagccaccccaccaagcagtggctggtgcacagcagatggaccaaggccctgatggaggagttcttcagacagggcgacaaggaggccgagctgggcctgcccttcagccccctgtgcgacagaaccagcaccctggtggcccagagccagatcggcttcatcgacttcatcgtggagcccaccttcagcgtgctgaccgacgtggccgagaagagcgtgcagcccctggccgacgaggacagcaagagcaagaaccagcccagcttccagtggagacagcccagcctggacgtggaggtgggcgaccccaaccccgacgtggtgagcttcagaagcacctgggtgaagagaatccaggagaacaagcagaagtggaaggagagagccgccagcggcatcaccaaccagatgagcatcgacgagctgagcccctgcgaggaggaggccccccccagccccgccgaggacgagcacaaccagaacggcaacctggactag

SEQ ID NO: 17163 - protein, 359 aa, Artificial Sequence
  derived and/or modified sequence
MAAVSGLVRRPLREVSGLLKRRFHWTAPAALQVTVRDAINQGMDEELERDEKVFLLGEEVAQYDGAYKVSRGLWKKYGDKRIIDTPISEMGFAGIAVGAAMAGLRPICEFMTFNFSMQAIDQVINSAAKTYYMSGGLQPVPIVFRGPNGASAGVAAQHSQCFAAWYGHCPGLKVVSPWNSEDAKGLIKSAIRDNNPVVVLENELMYGVPFEFPPEAQSKDFLIPIGKAKIERQGTHITVVSHSRPVGHCLEAAAVLSKEGVECEVINMRTIRPMDMETIEASVMKTNHLVTVEGGWPQFGVGAEICARIMEGPAFNFLDAPAVRVTGADVPMPYAKILEDNSIPQVKDIIFAIKKTLNI

SEQ ID NO: 17164 - DNA, 1080 bp, Artificial Sequence
  derived and/or modified sequence
atggctgcagtttccgggctcgttcgccgaccactgcgtgaggtgtcaggattgttgaagcgaagatttcactggaccgctcccgccgcacttcaggtgaccgtccgcgacgccatcaaccagggaatggacgaagaactggaacgcgacgaaaaagtgttcctgctcggtgaagaggtcgctcagtacgacggagcctacaaagtgtcgaggggcttatggaaaaaatacggcgacaaaaggatcatcgacacacccatttctgaaatggggtttgctgggatcgccgtgggggccgcaatggctggtctgagacccatttgcgaattcatgactttcaacttttccatgcaggccatcgatcaagtgatcaatagtgccgctaagacatattacatgtccggaggcctccagccagtccccatagtgtttagggggcccaacggagcctccgccggggtggctgcccaacactcgcaatgtttcgcagcatggtacggacactgccccggcctaaaggtggtgtctccatggaattctgaggacgcaaaaggattgataaaaagcgccatcagagataacaatccagtggtggtgctggagaacgaattgatgtatggcgtgccattcgaattccctcccgaggcccaaagtaaggatttcttgatcccaattgggaaagcaaagattgagaggcagggaacccacataaccgtggtgagccattcaaggccagttggtcactgtttagaggccgccgccgtgctcagtaaggagggcgtagaatgcgaggtgattaatatgcgaaccatcagacctatggacatggagacaatagaagcctccgtgatgaagactaatcacctggtcacagttgagggcggttggccacagtttggtgtgggggcagagatatgtgcacggatcatggagggccctgctttcaacttcctggatgctccagcggtccgcgttaccggggccgatgttcccatgccctacgccaagattctggaggacaactcaatcccccaggtaaaggatattatattcgcaatcaagaaaacgctgaacatttag

SEQ ID NO: 17165 - DNA, 1080 bp, Artificial Sequence
  derived and/or modified sequence
atggctgctgtgtctggcctggtgagaagacccctgcgggaggtgtctggcctgctgaagaggcgcttccactggacagccccagctgccctgcaggtgacagtgagagatgccatcaaccagggcatggatgaggagctggagagagatgagaaggtgttcctgctgggggaggaggtggcccagtatgatggagcctacaaggtgtcccggggcctgtggaagaagtatggagacaagaggatcatcgacacccccatcagcgagatgggctttgctggcattgctgtgggcgccgccatggccggcctgcggcccatctgtgagttcatgaccttcaacttctccatgcaggccatcgaccaggtgatcaacagcgctgccaagacctactacatgtctgggggcctgcagcctgtgcccatcgtgttccggggccccaacggggccagcgctggggtggccgcccagcacagccagtgctttgctgcctggtacggccactgccccggcctgaaggtggtgagcccctggaacagtgaagatgccaagggcctcatcaagagcgccatccgggacaacaaccctgtggtggtgctggagaatgagctgatgtatggagtgccctttgagttccccccagaggcccagagcaaggacttcctgatccccatcggcaaggccaagattgaaaggcagggcacccacatcaccgtggtgagccacagcaggcctgtgggccactgcctggaggccgctgctgtgctgagcaaggagggcgtggagtgtgaggtgatcaacatgaggaccatccggcccatggacatggagaccatcgaggcctctgtgatgaagaccaaccacctggtgacagtggagggcggctggccccagtttggagtgggcgctgagatctgtgcccgcatcatggagggccctgccttcaacttcctggatgccccagctgtgcgggtgactggagcagatgtgcccatgccctatgccaagatcctggaggacaacagcatcccccaggtgaaggacatcatctttgccatcaagaagaccctgaacatctag

SEQ ID NO: 17166 - DNA, 1080 bp, Artificial Sequence
  derived and/or modified sequence
atggccgccgtgagcggcctggtgcggcggcccctgcgggaggtgtctgggctgctcaaacgaagatttcactggaccgcaccagctgctctgcaggtgacagtccgcgatgcaatcaaccaaggcatggatgaagagttagaaagggacgaaaaggtattcctcctgggagaggaggtggctcagtacgacggtgcttacaaggtctccagaggcttgtggaagaagtatggtgacaagagaataatcgacacgcctatctcagagatgggtttcgccggcattgccgttggggctgctatggccgggctccgacccatttgtgagtttatgacctttaacttcagcatgcaagctattgatcaggtgatcaattcagccgcgaaaacttactacatgtccgggggcctgcaacctgtgccaattgtgttccgtggccctaacggagcatctgcgggcgtggctgcacagcattctcagtgctttgcagcttggtacggacactgccctggactgaaggtggtgagcccttggaacagtgaagacgccaagggcctgattaaaagtgccatacgagacaacaaccctgtggttgtgttagagaacgagttaatgtacggcgtgccatttgaatttcccccggaagctcagagtaaggacttcctgattccaattggaaaggccaaaattgagcggcagggaactcacattaccgtggtgagccacagcaggccagtaggacactgcttggaagctgctgctgtgctgtcgaaagaaggcgtggagtgcgaggtaataaatatgagaactatccgtcctatggacatggagacaatcgaagctagcgtaatgaagacaaatcaccttgtgactgtcgaggggggctggccccagtttggcgttggggcggagatctgcgcccgaataatggaggggccagcctttaactttttggacgctccggccgtgcgcgtgactggagcagacgttcccatgccttacgcaaaaatcctcgaggacaactctatcccacaagtcaaggatataattttcgctattaagaagacgctcaacatttag

SEQ ID NO: 17167 - DNA, 1080 bp, Artificial Sequence
  derived and/or modified sequence
atggcggctgtgagtggattagtacgccgacctctccgagaggtttccggcttgctgaagcgcaggttccattggaccgccccagctgcgcttcaagtgacagtccgcgacgctatcaaccaagggatggatgaggagctcgaacgcgacgagaaggtgtttctgcttggcgaagaagtagctcagtatgatggtgcctacaaggtgtcccgcggtctctggaagaaatacggggataaacgcattatcgacacacccatcagcgagatgggattcgctgggatagcagtgggggcagccatggccggtctgcggcctatttgcgagttcatgacttttaactttagcatgcaggccatcgatcaggtcatcaatagtgcagccaagacctattatatgtccggtggcttacagccagttcccattgtgtttcggggtcccaatggcgcaagcgctggagtcgctgcccagcactctcagtgtttcgccgcatggtatggccattgtcccggactaaaggtggtgtctccgtggaactccgaggatgctaagggactcatcaagtccgctatacgggacaacaatcccgttgttgtactggagaacgagcttatgtacggcgtgccatttgagttccccccagaggcccaatctaaagactttctcatcccgataggcaaggcaaagatagagcgccaaggaacgcatataacggtagtatcacactccagacctgtcggacactgtctagaggcagctgccgtgctctccaaggagggcgtggagtgtgaggtgatcaatatgcgcacgatcagacccatggatatggaaacgatcgaggcttccgtcatgaagacaaatcacctcgtcaccgtggagggcggatggccccagttcggagttggggcagaaatatgcgcacggattatggaaggacctgcattcaatttcctcgatgccccagcggtgagggtaacgggcgcagatgttcccatgccttacgctaagattctagaagacaacagtattccacaagttaaggatattatttttgctatcaaaaagacactcaacatctag

SEQ ID NO: 17168 - DNA, 1527 bp, Artificial Sequence
  derived and/or modified sequence
cccctctgttgtcgtttggcagcggatagaggacacgaccaagatggcggcggtgtctggcttggtgcggagaccccttcgggaggtctccgggctgctgaagaggcgctttcactggaccgcgccggctgcgctgcaggtgacagttcgtgatgctataaatcagggtatggatgaggagctggaaagagatgagaaggtatttctgcttggagaagaagttgcccagtatgatggggcatacaaggttagtcgagggctgtggaagaaatatggagacaagaggattattgacactcccatatcagagatgggctttgctggaattgctgtaggtgcagctatggctgggttgcggcccatttgtgaatttatgaccttcaatttctccatgcaagccattgaccaggttataaactcagctgccaagacctactacatgtctggtggccttcagcctgtgcctatagtcttcagagggcccaatggtgcctcagcaggtgtagctgcccagcactcacagtgctttgctgcctggtatgggcactgcccaggcttaaaggtggtcagtccctggaattcagaggatgctaaaggacttattaaatcagccattcgggataacaatccagtggtggtgctagagaatgaattgatgtatggggttccttttgaatttcctccggaagctcagtcaaaagattttctgattcctattggaaaagccaaaatagaaaggcaaggaacacatataactgtggtttcccattcaagacctgtgggccactgcttagaagctgcagcagtgctatctaaagaaggagttgaatgtgaggtgataaatatgcgtaccattagaccaatggacatggaaaccatagaagccagtgtcatgaagacaaatcatcttgtaactgtggaaggaggctggccacagtttggagtaggagctgaaatctgtgccaggatcatggaaggtcctgcgttcaatttcctggatgctcctgctgttcgtgtcactggtgctgatgtccctatgccttatgcaaagattctagaggacaactctatacctcaggtcaaagacatcatatttgcaataaagaaaacattaaatatttagtttggacttgaatatcaagtcgttgaaatttatttgaaatacttgctggcactgcacctggatttgtactgcaagacctgactattcataacggaaaacgatttctaaagcaacagcaggtatttttgtacagggaagtttaaatgtgtttgtgtatggaaaactctccactctcctcccctagatgccatgcttccttttgtctgttacggttgccatgttctttgaataacaaattatataacattttatcctctctcaccacaaggacaaagtatggatgtggcagagtcctcatgaaagatgtatccaaacaagataacttatatgtataaaattaaagcatataatatacatttactgttagtttgttttgataaggaataaaggaatttctaacatga

SEQ ID NO: 17169 - DNA, 1080 bp, Artificial Sequence
  derived and/or modified sequence
atggccgccgtgagcggcctggtgagaagacccctgagagaggtgagcggcctgctgaagagaagattccactggaccgcccccgccgccctgcaggtgaccgtgagagacgccatcaaccagggcatggacgaggagctggagagagacgagaaggtgttcctgctgggcgaggaggtggcccagtacgacggcgcctacaaggtgagcagaggcctgtggaagaagtacggcgacaagagaatcatcgacacccccatcagcgagatgggcttcgccggcatcgccgtgggcgccgccatggccggcctgagacccatctgcgagttcatgaccttcaacttcagcatgcaggccatcgaccaggtgatcaacagcgccgccaagacctactacatgagcggcggcctgcagcccgtgcccatcgtgttcagaggccccaacggcgccagcgccggcgtggccgcccagcacagccagtgcttcgccgcctggtacggccactgccccggcctgaaggtggtgagcccctggaacagcgaggacgccaagggcctgatcaagagcgccatcagagacaacaaccccgtggtggtgctggagaacgagctgatgtacggcgtgcccttcgagttcccccccgaggcccagagcaaggacttcctgatccccatcggcaaggccaagatcgagagacagggcacccacatcaccgtggtgagccacagcagacccgtgggccactgcctggaggccgccgccgtgctgagcaaggagggcgtggagtgcgaggtgatcaacatgagaaccatcagacccatggacatggagaccatcgaggccagcgtgatgaagaccaaccacctggtgaccgtggagggcggctggccccagttcggcgtgggcgccgagatctgcgccagaatcatggagggccccgccttcaacttcctggacgcccccgccgtgagagtgaccggcgccgacgtgcccatgccctacgccaagatcctggaggacaacagcatcccccaggtgaaggacatcatcttcgccatcaagaagaccctgaacatctag

SEQ ID NO: 17170 - protein, 933 aa, Artificial Sequence
  derived and/or modified sequence
MTELKAKGPRAPHVAGGPPSPEVGSPLLCRPAAGPFPGSQTSDTLPEVSAIPISLDGLLFPRPCQGQDPSDEKTQDQQSLSDVEGAYSRAEATRGAGGSSSSPPEKDSGLLDSVLDTLLAPSGPGQSQPSPPACEVTSSWCLFGPELPEDPPAAPATQRVLSPLMSRSGCKVGDSSGTAAAHKVLPRGLSPARQLLLPASESPHWSGAPVKPSPQAAAVEVEEEDGSESEESAGPLLKGKPRALGGAAAGGGAAAVPPGAAAGGVALVPKEDSRFSAPRVALVEQDAPMAPGRSPLATTVMDFIHVPILPLNHALLAARTRQLLEDESYDGGAGAASAFAPPRSSPCASSTPVAVGDFPDCAYPPDAEPKDDAYPLYSDFQPPALKIKEEEEGAEASARSPRSYLVAGANPAAFPDFPLGPPPPLPPRATPSRPGEAAVTAAPASASVSSASSSGSTLECILYKAEGAPPQQGPFAPPPCKAPGASGCLLPRDGLPSTSASAAAAGAAPALYPALGLNGLPQLGYQAAVLKEGLPQVYPPYLNYLRPDSEASQSPQYSFESLPQKICLICGDEASGCHYGVLTCGSCKVFFKRAMEGQHNYLCAGRNDCIVDKIRRKNCPACRLRKCCQAGMVLGGRKFKKFNKVRVVRALDAVALPQPVGVPNESQALSQRFTFSPGQDIQLIPPLINLLMSIEPDVIYAGHDNTKPDTSSSLLTSLNQLGERQLLSVVKWSKSLPGFRNLHIDDQITLIQYSWMSLMVFGLGWRSYKHVSGQMLYFAPDLILNEQRMKESSFYSLCLTMWQIPQEFVKLQVSQEEFLCMKVLLLLNTIPLEGLRSQTQFEEMRSSYIRELIKAIGLRQKGVVSSSQRFYQLTKLLDNLHDLVKQLHLYCLNTFIQSRALSVEFPEMMSEVIAAQLPKILAGMVKPLLFHKK

SEQ ID NO: 17171 - protein, 764 aa, Artificial Sequence
  derived and/or modified sequence
MTELKAKGPRAPHVAGGPPSPEVGSPLLCRPAAGPFPGSQTSDTLPEVSAIPISLDGLLFPRPCQGQDPSDEKTQDQQSLSDVEGAYSRAEATRGAGGSSSSPPEKDSGLLDSVLDTLLAPSGPGQSQPSPPACEVTSSWCLFGPELPEDPPAAPATQRVLSPLMSRSGCKVGDSSGTAAAHKVLPRGLSPARQLLLPASESPHWSGAPVKPSPQAAAVEVEEEDGSESEESAGPLLKGKPRALGGAAAGGGAAAVPPGAAAGGVALVPKEDSRFSAPRVALVEQDAPMAPGRSPLATTVMDFIHVPILPLNHALLAARTRQLLEDESYDGGAGAASAFAPPRSSPCASSTPVAVGDFPDCAYPPDAEPKDDAYPLYSDFQPPALKIKEEEEGAEASARSPRSYLVAGANPAAFPDFPLGPPPPLPPRATPSRPGEAAVTAAPASASVSSASSSGSTLECILYKAEGAPPQQGPFAPPPCKAPGASGCLLPRDGLPSTSASAAAAGAAPALYPALGLNGLPQLGYQAAVLKEGLPQVYPPYLNYLRPDSEASQSPQYSFESLPQKICLICGDEASGCHYGVLTCGSCKVFFKRAMEGRKFKKFNKVRVVRALDAVALPQPVGVPNESQALSQRFTFSPGQDIQLIPPLINLLMSIEPDVIYAGHDNTKPDTSSSLLTSLNQLGERQLLSVVKWSKSLPGFRNLHIDDQITLIQYSWMSLMVFGLGWRSYKHVSGQMLYFAPDLILNESHRSLSSFKLAKKSSSV

SEQ ID NO: 17172 - protein, 339 aa, Artificial Sequence
  derived and/or modified sequence
MEGQHNYLCAGRNDCIVDKIRRKNCPACRLRKCCQAGMVLGGRKFKKFNKVRVVRALDAVALPQPVGVPNESQALSQRFTFSPGQDIQLIPPLINLLMSIEPDVIYAGHDNTKPDTSSSLLTSLNQLGERQLLSVVKWSKSLPGFRNLHIDDQITLIQYSWMSLMVFGLGWRSYKHVSGQMLYFAPDLILNEQRMKESSFYSLCLTMWQIPQEFVKLQVSQEEFLCMKVLLLLNTIPLEGLRSQTQFEEMRSSYIRELIKAIGLRQKGVVSSSQRFYQLTKLLDNLHDLVKQLHLYCLNTFIQSRALSVEFPEMMSEVIAAQLPKILAGMVKPLLFHKK

SEQ ID NO: 17173 - protein, 803 aa, Artificial Sequence
  derived and/or modified sequence
MTELKAKGPRAPHVAGGPPSPEVGSPLLCRPAAGPFPGSQTSDTLPEVSAIPISLDGLLFPRPCQGQDPSDEKTQDQQSLSDVEGAYSRAEATRGAGGSSSSPPEKDSGLLDSVLDTLLAPSGPGQSQPSPPACEVTSSWCLFGPELPEDPPAAPATQRVLSPLMSRSGCKVGDSSGTAAAHKVLPRGLSPARQLLLPASESPHWSGAPVKPSPQAAAVEVEEEDGSESEESAGPLLKGKPRALGGAAAGGGAAAVPPGAAAGGVALVPKEDSRFSAPRVALVEQDAPMAPGRSPLATTVMDFIHVPILPLNHALLAARTRQLLEDESYDGGAGAASAFAPPRSSPCASSTPVAVGDFPDCAYPPDAEPKDDAYPLYSDFQPPALKIKEEEEGAEASARSPRSYLVAGANPAAFPDFPLGPPPPLPPRATPSRPGEAAVTAAPASASVSSASSSGSTLECILYKAEGAPPQQGPFAPPPCKAPGASGCLLPRDGLPSTSASAAAAGAAPALYPALGLNGLPQLGYQAAVLKEGLPQVYPPYLNYLRPDSEASQSPQYSFESLPQKICLICGDEASGCHYGVLTCGSCKVFFKRAMEGQHNYLCAGRNDCIVDKIRRKNCPACRLRKCCQAGMVLGGRKFKKFNKVRVVRALDAVALPQPVGVPNESQALSQRFTFSPGQDIQLIPPLINLLMSIEPDVIYAGHDNTKPDTSSSLLTSLNQLGERQLLSVVKWSKSLPGFRNLHIDDQITLIQYSWMSLMVFGLGWRSYKHVSGQMLYFAPDLILNESHRSLSSFKLAKKSSSV

SEQ ID NO: 17174 - DNA, 13037 bp, Artificial Sequence
  derived and/or modified sequence
agtccacagctgtcactaatcggggtaagccttgttgtatttgtgcgtgtgggtggcattctcaatgagaactagcttcacttgtcatttgagtgaaatctacaacccgaggcggctagtgctcccgcactactgggatctgagatcttcggagatgactgtcgcccgcagtacggagccagcagaagtccgacccttcctgggaatgggctgtaccgagaggtccgactagccccagggttttagtgagggggcagtggaactcagcgagggactgagagcttcacagcatgcacgagtttgatgccagagaaaaagtcgggagataaaggagccgcgtgtcactaaattgccgtcgcagccgcagccactcaagtgccggacttgtgagtactctgcgtctccagtcctcggacagaagttggagaactctcttggagaactccccgagttaggagacgagatctcctaacaattactactttttcttgcgctccccacttgccgctcgctgggacaaacgacagccacagttcccctgacgacaggatggaggccaagggcaggagctgaccagcgccgccctcccccgcccccgacccaggaggtggagatccctccggtccagccacattcaacacccactttctcctccctctgcccctatattcccgaaaccccctcctccttcccttttccctcctcctggagacgggggaggagaaaaggggagtccagtcgtcatgactgagctgaaggcaaagggtccccgggctccccacgtggcgggcggcccgccctcccccgaggtcggatccccactgctgtgtcgcccagccgcaggtccgttcccggggagccagacctcggacaccttgcctgaagtttcggccatacctatctccctggacgggctactcttccctcggccctgccagggacaggacccctccgacgaaaagacgcaggaccagcagtcgctgtcggacgtggagggcgcatattccagagctgaagctacaaggggtgctggaggcagcagttctagtcccccagaaaaggacagcggactgctggacagtgtcttggacactctgttggcgccctcaggtcccgggcagagccaacccagccctcccgcctgcgaggtcaccagctcttggtgcctgtttggccccgaacttcccgaagatccaccggctgcccccgccacccagcgggtgttgtccccgctcatgagccggtccgggtgcaaggttggagacagctccgggacggcagctgcccataaagtgctgccccggggcctgtcaccagcccggcagctgctgctcccggcctctgagagccctcactggtccggggccccagtgaagccgtctccgcaggccgctgcggtggaggttgaggaggaggatggctctgagtccgaggagtctgcgggtccgcttctgaagggcaaacctcgggctctgggtggcgcggcggctggaggaggagccgcggctgtcccgccgggggcggcagcaggaggcgtcgccctggtccccaaggaagattcccgcttctcagcgcccagggtcgccctggtggagcaggacgcgccgatggcgcccgggcgctccccgctggccaccacggtgatggatttcatccacgtgcctatcctgcctctcaatcacgccttattggcagcccgcactcggcagctgctggaagacgaaagttacgacggcggggccggggctgccagcgcctttgccccgccgcggagttcaccctgtgcctcgtccaccccggtcgctgtaggcgacttccccgactgcgcgtacccgcccgacgccgagcccaaggacgacgcgtaccctctctatagcgacttccagccgcccgctctaaagataaaggaggaggaggaaggcgcggaggcctccgcgcgctccccgcgttcctaccttgtggccggtgccaaccccgcagccttcccggatttcccgttggggccaccgcccccgctgccgccgcgagcgaccccatccagacccggggaagcggcggtgacggccgcacccgccagtgcctcagtctcgtctgcgtcctcctcggggtcgaccctggagtgcatcctgtacaaagcggagggcgcgccgccccagcagggcccgttcgcgccgccgccctgcaaggcgccgggcgcgagcggctgcctgctcccgcgggacggcctgccctccacctccgcctctgccgccgccgccggggcggcccccgcgctctaccctgcactcggcctcaacgggctcccgcagctcggctaccaggccgccgtgctcaaggagggcctgccgcaggtctacccgccctatctcaactacctgaggccggattcagaagccagccagagcccacaatacagcttcgagtcattacctcagaagatttgtttaatctgtggggatgaagcatcaggctgtcattatggtgtccttacctgtgggagctgtaaggtcttctttaagagggcaatggaagggcagcacaactacttatgtgctggaagaaatgactgcatcgttgataaaatccgcagaaaaaactgcccagcatgtcgccttagaaagtgctgtcaggctggcatggtccttggaggtcgaaaatttaaaaagttcaataaagtcagagttgtgagagcactggatgctgttgctctcccacagccagtgggcgttccaaatgaaagccaagccctaagccagagattcactttttcaccaggtcaagacatacagttgattccaccactgatcaacctgttaatgagcattgaaccagatgtgatctatgcaggacatgacaacacaaaacctgacacctccagttctttgctgacaagtcttaatcaactaggcgagaggcaacttctttcagtagtcaagtggtctaaatcattgccaggttttcgaaacttacatattgatgaccagataactctcattcagtattcttggatgagcttaatggtgtttggtctaggatggagatcctacaaacacgtcagtgggcagatgctgtattttgcacctgatctaatactaaatgaacagcggatgaaagaatcatcattctattcattatgccttaccatgtggcagatcccacaggagtttgtcaagcttcaagttagccaagaagagttcctctgtatgaaagtattgttacttcttaatacaattcctttggaagggctacgaagtcaaacccagtttgaggagatgaggtcaagctacattagagagctcatcaaggcaattggtttgaggcaaaaaggagttgtgtcgagctcacagcgtttctatcaacttacaaaacttcttgataacttgcatgatcttgtcaaacaacttcatctgtactgcttgaatacatttatccagtcccgggcactgagtgttgaatttccagaaatgatgtctgaagttattgctgcacaattacccaagatattggcagggatggtgaaaccccttctctttcataaaaagtgaatgtcatctttttcttttaaagaattaaattttgtggtatgtctttttgttttggtcaggattatgaggtcttgagtttttataatgttcttctgaaagccttacatttataacatcatagtgtgtaaatttaaaagaaaaattgtgaggttctaattattttcttttataaagtataattagaatgtttaactgttttgtttacccatattttcttgaagaatttacaagattgaaaaagtactaaaattgttaaagtaaactatcttatccatattatttcataccatgtaggtgaggatttttaacttttgcatctaacaaatcatcgacttaagagaaaaaatcttacatgtaataacacaaagctattatatgttatttctaggtaactccctttgtgtcaattatatttccaaaaatgaacctttaaaatggtatgcaaaattttgtctatatatatttgtgtgaggaggaaattcataactttcctcagattttcaaaagtatttttaatgcaaaaaatgtagaaagagtttaaaaccactaaaatagattgatgttcttcaaactaggcaaaacaactcatatgttaagaccattttccagattggaaacacaaatctcttaggaagttaataagtagattcatatcattatgcaaatagtattgtgggttttgtaggtttttaaaataaccttttttggggagagaattgtcctctaatgaggtattgcgagtggacataagaaatcagaagattatggcctaactgtactccttaccaactgtggcatgctgaaagttagtcactcttactgattctcaattctctcacctttgaaagtagtaaaatatctttcctgccaattgctcctttgggtcagagcttattaacatcttttcaaatcaaaggaaagaagaaagggagaggaggaggagggaggtatcaattcacatacctttctcctctttatcctccactatcatgaattcatattatgtttcagccatgcaaatctttttaccatgaaatttcttccagaattttccccctttgacacaaattccatgcatgtttcaaccttcgagactcagccaaatgtcatttctgtaaaatcttccctgagtcttccaagcagtaatttgccttctcctagagtttacctgccattttgtgcacatttgagttacagtagcatgttattttacaattgtgactctcctgggagtctgggagccatataaagtggtcaatagtgtttgctgactgagagttgaatgacattttctctctgtcttggtattactgtagatttcgatcattctttggttacatttctgcatatttctgtacccatgactttatcactttcttctcccatgctttatctccatcaattatcttcattacttttaaattttccacctttgcttcctactttgtgagatctctccctttactgactataacatagaagaatagaagtgtattttatgtgtcttaaggacaatactttagattccttgttctaagtttttaaactgaatgaatggaatattatttctctccctaagcaaaattccacaaaacaattatttcttatgtttatgtagccttaaattgttttgtactgtaaacctcagcataaaaactttcttcatttctaatttcattcaacaaatattgattgaatacctggtattagcacaagaaaaatgtgctaataagccttatgagaatttggagctgaagaaagacatataactcaggaaagttacagtccagtagtaggtataaattacagtgcctgataaataggcattttaatatttgtacactcaacgtatactaggtaggtgcaaaacatttacatataattttactgatacccatgcagcacaaaggtactaactttaaatattaaataacacctttatgtgtcagtaattcatttgcattaaatcttattgaaaaggctttcaatatattttccccacaaatgtcatcccaagaaaaaagtatttttaacatctcccaaatataatagttacaggaaatctacctctgtgagagtgacacctctcagaatgaactgtgtgacacaagaaaatgaatgtaggtctatccaaaaaaaaccccaagaaacaaaaacaatattattagccctttatgcttaagtgatggactcagggaacagttgatgttgtgatcattttattatctgattcttgttactttgaattaaaccaatattttgatgatataaatcatttccaccagcatatatttaatttccataataactttaaaattttctaatttcactcaactatgagggaatagaatgtggtggccacaggtttggcttttgttaaaatgtttgatatcttcgatgttgatctctgtctgcaatgtagatgtctaaacactaggatttaatatttaaggctaagctttaaaaataaagtacctttttaaaaagaatatggcttcaccaaatggaaaatacctaatttctaaatctttttctctacaaagtcctatctactaatgtctccattactatttagtcatcataaccattatcttcattttacatgtcgtgttctttctggtagctctaaaatgacactaaatcataagaagacaggttacatatcaggaaatacttgaaggttactgaaatagattcttgagttaatgaaaatattttctgtaaaaaggtttgaaaagccatttgagtctaaagcattatacctccattatcagtagttatgtgacaattgtgtgtgtgtttaatgtttaaagatgtggcactttttaataaggcaatgctatgctattttttcccatttaacattaagataatttattgctatacagatgatatggaaatatgatgaacaatattttttttgccaaaactatgccttgtaagtagccatggaatgtcaacctgtaacttaaattatccacagatagtcatgtgtttgatgatgggcactgtggagataactgacataggactgtgccccccttctctgccacttactagctggatgagattaagcaagtcatttaactgctctgattaaacctgcctttcccaagtgctttgtaatgaatagaaatggaaaccaaaaaaaacgtatacaggccttcagaaatagtaattgctactattttgttttcattaagccatagttctggctataattttatcaaactcaccagctatattctacagtgaaagcaggattctagaaagtctcactgttttatttatgtcaccatgtgctatgatatatttggttgaattcatttgaaattagggctggaagtattcaagtaatttcttctgctgaaaaaatacagtgttttgagtttagggcctgttttatcaaagttctaaagagcctatcactcttccattgtagacattttaaaataatgacactgattttaacatttttaagtgtctttttagaacagagagcctgactagaacacagcccctccaaaaacccatgctcaaattatttttactatggcagcaattccacaaaagggaacaatgggtttagaaattacaatgaagtcatcaacccaaaaaacatccctatccctaagaaggttatgatataaaatgcccacaagaaatctatgtctgctttaatctgtcttttattgctttggaaggatggctattacatttttagtttttgctgtgaatacctgagcagtttctctcatccatacttatccttcacacatcagaagtcaggatagaatatgaatcattttaaaaacttttacaactccagagccatgtgcataagaagcattcaaaacttgccaaaacatacattttttttcaaatttaaagatactctatttttgtattcaatagctcaacaactgtggtccccactgataaagtgaagtggacaaggagacaagtaatggcataagtttgtttttcccaaagtatgcctgttcaatagccattggatgtgggaaatttctacatctcttaaaattttacagaaaatacatagccagatagtctagcaaaagttcaccaagtcctaaattgcttatccttacttcactaagtcatgaaatcattttaatgaaaagaacatcacctaggttttgtggtttctttttttcttattcatggctgagtgaaaacaacaatctctgtttctccctagcatctgtggactatttaatgtaccattattccacactctatggtccttactaaatacaaaattgaacaaaaagcagtaaaacaactgactcttcacccatattataaaatataatccaagccagattagtcaacatccataagatgaatccaagctgaactgggcctagattattgagttcaggttggatcacatccctatttattaataaacttaggaaagaaggccttacagaccatcagttagctggagctaatagaacctacacttctaaagttcggcctagaatcaatgtggccttaaaagctgaaaagaagcaggaaagaacagttttcttcaataatttgtccaccctgtcactggagaaaatttaagaatttgggggtgttggtagtaagttaaacacagcagctgttcatggcagaaattattcaatacataccttctctgaatatcctataaccaaagcaaagaaaaacaccaaggggtttgttctcctccttggagttgacctcattccaaggcagagctcaggtcacaggcacaggggctgcgcccaagcttgtccgcagccttatgcagctgtggagtctggaagactgttgcaggactgctggcctagtcccagaatgtcagcctcattttcgatttactggctcttgttgctgtatgtcatgctgaccttattgttaaacacaggtttgtttgctttttttccactcatggagacatgggagaggcattatttttaagctggttgaaagctttaaccgataaagcatttttagagaaatgtgaatcaggcagctaagaaagcatactctgtccattacggtaaagaaaatgcacagattattaactctgcagtgtggcattagtgtcctggtcaatattcggatagatatgaataaaatatttaaatggtattgtaaatagttttcaggacatatgctatagcttatttttattatcttttgaaattgctcttaatacatcaaatcctgatgtattcaatttatcagatataaattattctaaatgaagcccagttaaatgtttttgtcttgtcagttatatgttaagtttctgatctctttgtctatgacgtttactaatctgcatttttactgttatgaattattttagacagcagtggtttcaagctttttgccactaaaaataccttttattttctcctcccccagaaaagtctataccttgaagtatctatccaccaaactgtacttctattaagaaatagttattgtgttttcttaatgttttgttattcaaagacatatcaatgaaagctgctgagcagcatgaataacaattatatccacacagatttgatatattttgtgcagccttaacttgatagtataaaatgtcattgctttttaaataatagttagtcaatggacttctatcatagctttcctaaactaggttaagatccagagctttggggtcataatatattacatacaattaagttatctttttctaagggctttaaaattcatgagaataaccaaaaaaggtatgtggagagttaatacaaacataccatattcttgttgaaacagagatgtggctctgcttgttctccataaggtagaaatactttccagaatttgcctaaactagtaagccctgaatttgctatgattagggataggaagagattttcacatggcagactttagaattcttcactttagccagtaaagtatctccttttgatcttagtattctgtgtattttaacttttctgagttgtgcatgtttataagaaaaatcagcacaaagggtttaagttaaagcctttttactgaaatttgaaagaaacagaagaaaatatcaaagttctttgtattttgagaggattaaatatgatttacaaaagttacatggagggctctctaaaacattaaattaattattttttgttgaaaagtcttactttaggcatcattttattcctcagcaactagctgtgaagcctttactgtgctgtatgccagtcactctgctagattgtggagattaccagtgttcccgtcttctccgagcttagagttggatggggaataaagacaggtaaacagatagctacaatattgtactgtgaatgcttatgctggaggaagtacagggaactattggagcacctaagaggagcacctaccttgaatttaggggttagcagaggcatcctgaaaaaagtcaaagctaagccacaatctataagcagtttaggaattagcagaacgtgcgtggtgaggagatgccaaaggcaagaagagaagagtattccaaacaggagggattccaaagagagaagagtatcccaaacaacatttgcacaaacctgatggggagagagaatgtggggtggggatggatgatgagactgaagaagaaagccaggtctagataatcagtggccttgtacaccatgttaaagagtgtagacttgattctgttgtaaacaggaaagcagcacaattcatatgaatattttagaagactcccactggaatatggagaataaagttggagatgactaatcctggaagcagggagaacatttttgaggaagttgcactattttggtgaaaatgatgatcataaacatgaagaattgtaggtgatcatgacctcctctctaattttccagaagggttttggaagatataacataggaacattgacaggactgacgaaaggagatgaaatacaccatataaattgtcaaacacaaggccagatgtctaattattttgcttatgtgttgaaattacaaatttttcatcaggaaaccaaaaactacaaaacttagttttcccaagtcccagaattctatctgtccaaacaatctgtaccactccacctatatccctacctttgcatgtctgtccaacctcaaagtccaggtctatacacacgggtaagactagagcagttcaagtttcagaaaatgagaaagaggaactgagttgtgctgaacccatacaaaataaacacattctttgtatagattcttggaacctcgagaggaattcacctaactcataggtatttgatggtatgaatccatggctgggctcggcttttaaaaagccttatctgggattccttctatggaaccaagttccatcaaagcccatttaaaagcctacattaaaaacaaaattcttgctgcattgtatacaaataatgatgtcatgatcaaataatcagatgccattatcaagtggaattacaaaatggtatacccactccaaaaaaaaaaaaaaagctaaattctcagtagaacattgtgacttcatgagccctccacagccttggagctgaggagggagcactggtgagcagtaggttgaagagaaaacttggcgcttaataatctatccatgttttttcatctaaaagagccttctttttggattaccttattcaatttccatcaaggaaattgttagttccactaaccagacagcagctgggaaggcagaagcttactgtatgtacatggtagctgtgggaaggaggtttctttctccaggtcctcactggccatacaccagtcccttgttagttatgcctggtcatagacccccgttgctatcatctcatatttaagtctttggcttgtgaatttatctattctttcagcttcagcactgcagagtgctgggactttgctaacttccatttcttgctggcttagcacattcctcataggcccagctcttttctcatctggccctgctgtggagtcaccttgccccttcaggagagccatggcttaccactgcctgctaagcctccactcagctgccaccacactaaatccaagcttctctaagatgttgcagactttacaggcaagcataaaaggcttgatcttcctggacttccctttacttgtctgaatctcacctccttcaactttcagtctcagaatgtaggcatttgtcctctttgccctacatcttccttcttctgaatcatgaaagcctctcacttcctcttgctatgtgctggaggcttctgtcaggttttagaatgagttctcatctagtcctagtagcttttgatgcttaagtccaccttttaaggatacctttgagatttagaccatgtttttcgcttgagaaagccctaatctccagacttgcctttctgtggatttcaaagaccaactgaggaagtcaaaagctgaatgttgactttctttgaacatttccgctataacaattccaattctcctcagagcaatatgcctgcctccaactgaccaggagaaaggtccagtgccaaagagaaaaacacaaagattaattatttcagttgagcacatactttcaaagtggtttgggtattcatatgaggttttctgtcaagagggtgagactcttcatctatccatgtgtgcctgacagttctcctggcactggctggtaacagatgcaaaactgtaaaaattaagtgatcatgtattttaacgatatcatcacatacttattttctatgtaatgttttaaatttcccctaacatactttgactgttttgcacatggtagatattcacatttttttgtgttgaagttgatgcaatcttcaaagttatctaccccgttgcttattagtaaaactagtgttaatacttggcaagagatgcagggaatctttctcatgactcacgccctatttagttattaatgctactaccctattttgagtaagtagtaggtccctaagtacattgtccagagttatacttttaaagatatttagccccatatacttcttgaatctaaagtcatacaccttgctcctcatttctgagtgggaaagacatttgagagtatgttgacaattgttctgaaggtttttgccaagaaggtgaaactgtcctttcatctgtgtatgcctggggctgggtccctggcagtgatggggtgacaatgcaaagctgtaaaaactaggtgctagtgggcacctaatatcatcatcatatacttattttcaagctaatatgcaaaatcccatctctgtttttaaactaagtgtagatttcagagaaaatattttgtggttcacataagaaaacagtctactcagcttgacaagtgttttatgttaaattggctggtggtttgaaatgaatcatcttcacataatgttttctttaaaaatattgtgaatttaactctaattcttgttattctgtgtgataataaagaataaactaatttcta

SEQ ID NO: 17175 - DNA, 2802 bp, Artificial Sequence
  derived and/or modified sequence
atgaccgagctgaaggccaagggccccagagccccccacgtggccggcggcccccccagccccgaggtgggcagccccctgctgtgcagacccgccgccggccccttccccggcagccagaccagcgacaccctgcccgaggtgagcgccatccccatcagcctggacggcctgctgttccccagaccctgccagggccaggaccccagcgacgagaagacccaggaccagcagagcctgagcgacgtggagggcgcctacagcagagccgaggccaccagaggcgccggcggcagcagcagcagcccccccgagaaggacagcggcctgctggacagcgtgctggacaccctgctggcccccagcggccccggccagagccagcccagcccccccgcctgcgaggtgaccagcagctggtgcctgttcggccccgagctgcccgaggacccccccgccgcccccgccacccagagagtgctgagccccctgatgagcagaagcggctgcaaggtgggcgacagcagcggcaccgccgccgcccacaaggtgctgcccagaggcctgagccccgccagacagctgctgctgcccgccagcgagagcccccactggagcggcgcccccgtgaagcccagcccccaggccgccgccgtggaggtggaggaggaggacggcagcgagagcgaggagagcgccggccccctgctgaagggcaagcccagagccctgggcggcgccgccgccggcggcggcgccgccgccgtgccccccggcgccgccgccggcggcgtggccctggtgcccaaggaggacagcagattcagcgcccccagagtggccctggtggagcaggacgcccccatggcccccggcagaagccccctggccaccaccgtgatggacttcatccacgtgcccatcctgcccctgaaccacgccctgctggccgccagaaccagacagctgctggaggacgagagctacgacggcggcgccggcgccgccagcgccttcgccccccccagaagcagcccctgcgccagcagcacccccgtggccgtgggcgacttccccgactgcgcctacccccccgacgccgagcccaaggacgacgcctaccccctgtacagcgacttccagccccccgccctgaagatcaaggaggaggaggagggcgccgaggccagcgccagaagccccagaagctacctggtggccggcgccaaccccgccgccttccccgacttccccctgggcccccccccccccctgccccccagagccacccccagcagacccggcgaggccgccgtgaccgccgcccccgccagcgccagcgtgagcagcgccagcagcagcggcagcaccctggagtgcatcctgtacaaggccgagggcgcccccccccagcagggccccttcgccccccccccctgcaaggcccccggcgccagcggctgcctgctgcccagagacggcctgcccagcaccagcgccagcgccgccgccgccggcgccgcccccgccctgtaccccgccctgggcctgaacggcctgccccagctgggctaccaggccgccgtgctgaaggagggcctgccccaggtgtaccccccctacctgaactacctgagacccgacagcgaggccagccagagcccccagtacagcttcgagagcctgccccagaagatctgcctgatctgcggcgacgaggccagcggctgccactacggcgtgctgacctgcggcagctgcaaggtgttcttcaagagagccatggagggccagcacaactacctgtgcgccggcagaaacgactgcatcgtggacaagatcagaagaaagaactgccccgcctgcagactgagaaagtgctgccaggccggcatggtgctgggcggcagaaagttcaagaagttcaacaaggtgagagtggtgagagccctggacgccgtggccctgccccagcccgtgggcgtgcccaacgagagccaggccctgagccagagattcaccttcagccccggccaggacatccagctgatcccccccctgatcaacctgctgatgagcatcgagcccgacgtgatctacgccggccacgacaacaccaagcccgacaccagcagcagcctgctgaccagcctgaaccagctgggcgagagacagctgctgagcgtggtgaagtggagcaagagcctgcccggcttcagaaacctgcacatcgacgaccagatcaccctgatccagtacagctggatgagcctgatggtgttcggcctgggctggagaagctacaagcacgtgagcggccagatgctgtacttcgcccccgacctgatcctgaacgagcagagaatgaaggagagcagcttctacagcctgtgcctgaccatgtggcagatcccccaggagttcgtgaagctgcaggtgagccaggaggagttcctgtgcatgaaggtgctgctgctgctgaacaccatccccctggagggcctgagaagccagacccagttcgaggagatgagaagcagctacatcagagagctgatcaaggccatcggcctgagacagaagggcgtggtgagcagcagccagagattctaccagctgaccaagctgctggacaacctgcacgacctggtgaagcagctgcacctgtactgcctgaacaccttcatccagagcagagccctgagcgtggagttccccgagatgatgagcgaggtgatcgccgcccagctgcccaagatcctggccggcatggtgaagcccctgctgttccacaagaagtag

SEQ ID NO: 17176 - DNA, 2802 bp, Artificial Sequence
  derived and/or modified sequence
atgacagagctgaaagctaaagggccgagggctccccacgtggccggcggacccccaagtcctgaagtggggtcacctctattatgccgacccgcagccggcccctttcccggctcccagacctccgacaccctaccggaggtaagtgcgatccctatctccttagacggccttctgttcccgcgtccctgtcaggggcaagaccctagtgatgaaaaaacccaggatcagcagagtctgagtgacgtggagggtgcctattcccgagctgaggctactcggggcgctggaggctcatcatcaagcccacctgaaaaagactccggactactggatagcgtgctggatacgctgctcgccccttcaggaccaggacagtcccagccctctcctcccgcctgcgaggttacttcctcctggtgtttgttcggtcccgagttgccagaggaccctccggccgcccctgccactcagagagttttgtcgcccctcatgagtcgatctggttgcaaggttggagacagcagcggaaccgccgccgcgcacaaagtcttgccccggggcctgtccccagcccggcagttgctgctgcccgcatccgagagcccgcattggagcggggcacctgtgaaacccagccctcaagcagccgcggttgaagtggaggaggaggacgggtctgaatctgaagaatctgcgggacctctactgaagggcaaaccccgcgcgttgggcggtgccgcagctggaggaggagccgccgccgtcccacccggcgccgccgcgggtggggttgctctggtgccaaaagaggactctcgatttagtgcccctcgggtggcactcgttgaacaagatgccccgatggccccgggcagaagccccctggcgacgacggtgatggattttatccacgtccctatccttccgctcaatcacgcactgttggccgccagaactcgacaacttctcgaggacgaaagttacgatgggggagccggcgctgcctcagcttttgcccctccccgttcttctccatgtgcatcctctacaccggtggccgtgggggactttccagattgtgcatacccccccgatgctgagcctaaagacgatgcatatccactgtactcagattttcagccccctgcgcttaagattaaagaagaggaggagggggctgaagccagtgctagatctcctcggagttacctcgtcgcaggcgcgaaccctgcagcattccctgatttcccgctcgggccaccaccgcctctaccacctagggccaccccaagtcgcccaggtgaagcagccgtgacagcagctccggcaagtgcatcggtgtctagcgctagcagcagtggttccactctggaatgtatcctgtacaaggctgagggcgctcctcctcagcaaggcccctttgcacctcccccatgcaaggcacccggcgccagcggatgtctccttccccgtgacggccttccctccaccagcgcatctgcagccgcagctggtgccgccccagctctctatcctgcgctggggctgaatgggctgcctcagctgggataccaggcggcagtcctaaaagaagggttaccccaggtgtatccaccctacttgaactatctgcgtccagacagcgaagctagccaatccccccagtacagcttcgagtccctaccccagaagatatgtctcatttgtggggacgaggcaagcgggtgccactacggtgttcttacctgtggaagctgcaaggtcttctttaaacgcgctatggaaggtcagcataactacctatgcgctgggcgcaacgactgtatcgtggacaaaatacgtaggaagaattgcccggcctgtagactcaggaaatgctgccaagctggcatggtactgggaggacgcaaattcaagaaatttaataaggttagggtggtaagggccctggatgcagtggctctcccccagcccgtgggagtgccaaatgagagccaggcgctgtcacagagattcacatttagccccggtcaggacatacaattgatcccacctctgataaacttattaatgtcgattgaacccgatgttatctatgctggccacgataatacaaaacccgatacctcctcttcactcctcacaagtttgaaccagctgggcgagcggcagctactcagcgtggtaaagtggagtaagagtttgcccgggtttcgcaaccttcacatcgacgaccagattacactgatacagtacagttggatgtccttaatggtatttggccttggttggagatcatacaagcacgtttcgggacaaatgttatactttgcgcccgacttaattctcaacgaacaacgcatgaaagagagcagcttttatagtctgtgcttgacgatgtggcaaataccacaggagttcgttaagctacaggtgtcccaggaagagttcctctgtatgaaagttctccttctgctgaacactattcctttggaggggctccgctcgcagacacaatttgaggagatgagaagttcttacattagagagctgattaaggctattggactcaggcagaagggggtggtgagcagttcacagcggttctatcagctgacgaaactgctggataatctgcatgacctagtcaagcagcttcatctctactgcctcaatacattcatccagtcacgcgccctcagcgtagagttcccggaaatgatgtccgaggtgatcgcggcgcaactgcccaagatcctcgcaggaatggtcaaaccactactgtttcacaagaaatag

SEQ ID NO: 17177 - DNA, 2802 bp, Artificial Sequence
  derived and/or modified sequence
atgacagagctgaaggccaagggcccccgggcccctcatgtggccggcggcccccccagccctgaggtgggcagccccctgctgtgcaggcctgctgctggccccttccctggcagccagaccagtgacaccctgcctgaggtgtctgccatccccatcagcctggatggcctgctcttcccccggccctgccagggccaggaccccagtgatgagaagacccaggaccagcagagcctgagtgatgtggagggcgcctacagcagagctgaggccaccaggggggccggcggcagcagcagcagccccccagagaaggacagcggcctgctggacagcgtgctggacaccctgctggcccccagcggccctggccagagccagcccagccccccagcctgtgaggtgaccagctcctggtgcctgtttggacctgagctgcctgaagatcctcctgctgccccagccacccagagggtgctgagccccctgatgagccgcagcggctgcaaggtgggggacagcagcggcacagctgctgcccacaaggtgctgccccggggcctgagccctgcccggcagctgctgctgcctgccagcgagagcccccactggagcggggcccctgtgaagcccagcccccaggccgctgctgtggaggtggaggaggaggatggcagcgagagcgaggagagcgctggccccctgctgaagggcaagccccgggccctgggcggcgctgctgctgggggcggcgctgctgctgtgcccccaggagctgctgctgggggcgtggccctggtgcccaaggaggacagccgcttcagcgccccccgggtggccctggtggagcaggatgcccccatggcccctggccgcagccccctggccaccaccgtgatggacttcatccacgtgcccatcctgcccctgaaccacgccctgctggccgcccggacccggcagctgctggaggatgagagctatgatggaggagctggggccgccagcgcctttgccccacccaggagcagcccctgtgccagcagcacccctgtggccgtgggggacttcccagactgtgcctaccccccagatgctgagcccaaggatgatgcctaccccctgtacagcgacttccagcccccagccctgaagatcaaggaggaggaggagggcgctgaggccagcgcccggagccccaggagctacctggtggccggggccaacccagctgccttcccagacttccccctgggccccccaccacccctgcccccccgggccacccccagcaggcctggagaggccgctgtgacagctgccccagccagcgcctctgtgagcagcgccagcagcagcggcagcaccctggagtgcatcctgtacaaggccgagggcgccccaccccagcagggcccctttgcccccccaccctgcaaggcccctggggccagcggctgcctgctgcccagagatggcctgcccagcaccagcgccagcgctgctgctgctggagctgccccagccctgtacccagccctgggcctgaatggcctgccccagctgggctaccaggccgctgtgctgaaggagggcctgccccaggtgtacccaccctacctgaactacctgcggccagattctgaggccagccagagcccccagtacagctttgagagcctgccccagaagatctgcctgatctgtggagatgaggccagcggctgccactatggagtgctgacctgtggcagctgcaaggtgttcttcaagagggccatggagggccagcacaactacctgtgtgccggcagaaatgactgcatcgtggacaagatccggaggaagaactgcccagcctgccgcctgaggaagtgctgccaggccggcatggtgctgggcggcaggaagttcaagaagttcaacaaggtgcgggtggtgcgggccctggatgctgtggccctgccccagcctgtgggcgtgcccaatgaaagccaggccctgagccagcgcttcaccttcagccctggccaggacatccagctgatccccccactcatcaacctgctgatgagcattgaaccagatgtgatctatgccggccatgacaacaccaagccagacaccagcagcagcctgctgaccagcctgaaccagctgggggagcggcagctgctgtctgtggtgaagtggagcaagagcctgcccggcttcaggaacctgcacattgatgaccagatcaccctcatccagtacagctggatgagcctgatggtgtttggcctgggctggaggagctacaagcacgtgtctggccagatgctgtactttgccccagacctgatcctgaatgagcagaggatgaaggagagcagcttctacagcctgtgcctgaccatgtggcagatcccccaggagtttgtgaagctgcaggtgtcccaggaggagttcctgtgcatgaaggtgctgctgctgctgaacaccatccccctggagggcctgcggagccagacccagtttgaggagatgaggagcagctacatccgggagctgatcaaggccatcggcctgcggcagaagggcgtggtgagcagcagccagcgcttctaccagctgaccaagctgctggacaacctgcatgacctggtgaagcagctgcacctgtactgcctgaacaccttcatccagagccgggccctgtctgtggagttccctgagatgatgtctgaggtgattgctgcccagctgcccaagatcctggccggcatggtgaagcccctgctcttccacaagaagtag

SEQ ID NO: 17178 - DNA, 2802 bp, Artificial Sequence
  derived and/or modified sequence
atgaccgagctgaaggccaagggcccccgggccccccacgtggccgggggccctcccagtccagaagttgggagccctctgttgtgccgtccagcagccggcccctttcccggttctcagacttcagacactctcccagaagtaagcgcaattccaatctccttggacggactgctatttccgcggccttgccagggccaggatccaagtgatgagaagacccaagaccagcagtcattgagcgacgttgaaggcgcttacagcagggccgaggccacccggggagccggtgggtcctctagctccccgcctgaaaaagattcagggctgctcgactctgtgcttgatacgctcctggccccttcgggtcccggacaatcccagccctcacctccggcctgtgaagtcactagcagttggtgcctttttggcccagaattgcctgaggatccaccagcagctcctgccacacagagggttctgtcaccattgatgagcagatccggatgcaaagtaggcgactcctctgggactgccgctgcccacaaagttttgcctcgtgggttatctccagcacgacaactcctcctccccgcctccgagtcaccccactggtccggcgctcccgttaagcccagtccacaggctgcagctgtggaagttgaagaggaggatgggagcgagtccgaggagtctgctgggccgcttctgaaaggtaagcctagggctttaggcggtgccgcagccgggggcggagccgcggcagttccccctggcgctgctgctgggggtgtagccttggtgcctaaagaggacagccgatttagtgcaccccgagtggccctggtcgaacaggacgctccgatggctcccggccggagcccacttgccactaccgtgatggatttcattcacgtgccaatactcccacttaatcacgccctgctggccgcacgcacgaggcagttgctggaggacgagtcttatgatgggggagcaggtgccgccagtgccttcgcaccaccaagatctagcccttgtgcttccagtactccagtggccgtcggggatttcccagattgcgcgtatccgcccgatgcggagcccaaagacgacgcttatcccctgtattctgattttcaacctcctgcattaaaaattaaggaggaagaggaaggggctgaagccagcgccaggtcccccaggtcgtatttagtggccggcgcaaatcccgcagccttcccggacttccctctcggaccaccgccacctctacctcctagagctaccccttctcgtcccggcgaggcagccgtaacagccgctcccgctagcgcttcagttagctcagcatcctctagcggtagtacattagagtgcatattgtataaagcagaaggagccccaccccagcagggcccatttgcacctccaccttgcaaggcccctggagctagcggctgcctgctgcccagagacggtcttccaagtacctctgctagtgcagccgccgctggggcagctcctgcactctatccagcactcggattgaacggtctaccccagctggggtatcaggctgctgtgctcaaagagggtctgccacaagtgtacccgccatatctgaactacctccgccccgattcagaagcctctcagagcccacaatatagctttgagtccctgcctcagaaaatctgcctaatctgtggcgatgaggcttcaggatgtcattacggagtgttaacctgtggaagctgcaaggtgtttttcaaacgcgcaatggagggccagcacaattacctttgtgcgggtaggaacgattgcatagtggacaagattcgtagaaagaattgccctgcttgcagactgaggaaatgttgtcaggcaggtatggtgctgggaggccgaaagtttaaaaagttcaataaggtcagagtagtccgcgctctggacgctgtggccctcccgcagccagtaggggtgcccaatgagtctcaggcactatctcaacggttcaccttttcccccggtcaggatatccagctgattccaccactaattaacctactcatgagtatcgaaccagatgtgatttacgctggccatgacaacaccaaacccgataccagcagctctcttctgacatccctcaaccagctgggggaaaggcagctgctgagtgtggtaaaatggtccaaatctctgcctggcttccgcaacctccacattgacgaccagattactctgatacagtacagttggatgagtttgatggtgttcggccttggatggagaagttataaacacgttagcggccagatgttatactttgcacctgacttaatattgaacgagcagcggatgaaagagtcatccttctacagcctctgcctgacgatgtggcagataccccaggagttcgtcaaacttcaggtctcccaagaggagttcctgtgcatgaaagttttactacttctgaatacaattccattggaaggactaaggtcacagacacagttcgaggagatgagaagctcctatatcagggagctaatcaaggccataggcttacgtcagaaaggagtcgtgtcttcgagtcaaaggttctaccagttaactaagttgcttgacaacctgcacgacctggtgaagcagcttcacctgtactgcctcaatacttttattcaaagccgcgctctgagcgttgagttccctgaaatgatgtcagaggtgatcgccgcacagcttcctaaaatcctggctgggatggtgaagcccctcttgttccacaaaaagtag

SEQ ID NO: 17179 - DNA, 2802 bp, Artificial Sequence
  derived and/or modified sequence
atgaccgagctcaaggctaaaggaccgcgagccccacacgtcgcgggaggccctccctctccagaggtcggatccccactgttatgcaggcctgccgctgggcctttcccgggaagtcaaacgagcgacacattgccggaggtgtcagccattccaatcagtctagatgggcttctattcccacgaccgtgccagggccaggacccaagcgacgagaagacccaggaccagcaatcactctctgatgtggagggcgcttattcccgcgcagaggccactagaggtgccggaggtagtagctccagtccgccagagaaagatagcggactgcttgacagcgttctggacacactactcgccccaagtggacccggtcagagtcagccctcgcccccagcctgtgaggtcacgagttcttggtgcctgttcggaccagaactgcctgaggaccccccagccgcacccgctacgcagcgggtcctctcccccttaatgagcagatcggggtgcaaagttggtgattcctccggcactgctgccgcacacaaggtcctcccacgtgggctctcgccagccaggcagctgcttctgccggcttctgagagcccccattggtctggtgctccggtgaaaccatcaccccaggcagcagcagtggaagtggaagaggaagacgggagtgagagtgaggagtccgcgggtcccctgctcaaaggaaagcccagagcactgggcggagctgccgctgggggaggggctgccgcagtgccgcctggcgcagcagctggtggggtggctctagtcccaaaagaagacagtagattcagcgctcctagagttgctctggtggagcaggacgcccctatggccccaggtcgatcaccactagcgaccacagtgatggactttatacacgtacccatcctgcctctcaatcacgccctgctcgcagctcgcactcgccagttgttggaagatgagtcctacgatgggggagcaggtgctgcatccgctttcgccccacccagatcctcgccctgcgcctcttctacaccagtcgcagttggggattttcctgattgcgcctatccccctgacgccgagccaaaggacgatgcttaccccctgtatagtgatttccagcccccagcccttaaaatcaaggaagaagaagagggggcagaagcctctgctaggtcccccagaagctatctggtagcaggcgcaaatccagccgcattccccgacttccctctaggacctcccccacctcttcccccaagggccacgccgagtcgccctggggaggctgcggtcacagcggctccagcctcagcctctgtgagcagtgccagcagtagtgggagcacactcgagtgtatactctacaaagccgaaggagctccgcctcagcaggggccattcgccccacctccatgcaaagcgcctggcgcttcaggctgtctgttgcctcgggatggactgcctagcaccagtgcgagtgctgctgccgcaggcgctgcccctgcactgtacccagccctaggactgaatggcttacctcaactgggctatcaagccgctgttcttaaggaaggcctgccccaggtgtatcccccttatctgaattacctgaggccagatagcgaagcatctcagtccccccagtactcattcgaaagtttgcctcagaaaatttgtttgatttgcggagacgaggcatccggatgccactacggggtgctgacttgcggcagctgcaaggtattttttaagcgcgcaatggagggacaacacaattacctctgcgctggaagaaacgactgcattgtcgataaaattcggagaaagaactgtcctgcctgtaggctcaggaagtgctgccaggcaggcatggtccttggcggacggaaatttaagaagttcaataaagtcagagtggtcagggccctggacgctgtggccttaccccagcctgtcggtgtcccaaatgagtcccaagcactctcccagaggtttactttctctcccggacaggacatccagctaatccccccactgattaacttgttgatgtctatcgagcctgacgtgatttacgccggtcacgacaatactaagcccgatacaagcagctctcttctgacttccctgaatcagttaggggagcgccagctgctatccgtagttaagtggagcaagagccttccgggattccgaaatttgcatatcgacgaccagataaccctaattcaatacagttggatgagcctgatggtgtttggactcggatggaggagctataagcacgtgtctgggcaaatgctgtacttcgcaccggatctcattcttaacgagcagcgaatgaaggagagttctttttattccttgtgtctgacaatgtggcaaatccctcaagaattcgtgaaattacaggtgtctcaggaggagttcctgtgcatgaaggtactcctgctcctgaacaccattccacttgaaggattgcggagccagacccagttcgaggagatgagatcatcctacataagggagttaatcaaagccataggactgcggcagaagggagtcgtttccagcagtcagcggttttaccagctcactaaactccttgacaatctccatgatcttgtcaagcagctgcacctctattgtctgaataccttcatacagtctcgggctctgagcgtggagtttccggaaatgatgtcagaggttattgccgctcagctacctaagatacttgcgggtatggtgaagcctctcctgttccacaagaagtag

SEQ ID NO: 17180 - DNA, 13748 bp, Artificial Sequence
  derived and/or modified sequence
ggatccattttataagctcaaagataattacttttcagactaagaatatttagggtaaaaagtactgttcaacatctctactgaggatgttatgatgtagcacactgtataagctggagctaaaggaaactttccttaaagtgctatttactaaaaattggaacacattccttaagacaaatcgaagtgtggcacacaacatccaaacttccatcatagatacagaggtgttaccatctcccactcccaaatttctttgtcacgctgaggatactcaagaggagcaggacatgttggtcgcagcaggagaaacttgaaagcattcacttttatggaactcataagggagagaatctcttatttagtatcgtccttgatacatttattattttaaaagataatgtagccaaatgtcttcctctgtgttaaatctttacaaaactgaaatcttaaaatggtgacaaaaattctacttctgatagaatctattcatttttccaattagatagggcataattcttaatttgcaaaacaaaacgtaatatgcttatgaggttccatcccaaagaacctgctattgagagtagcattcagaataacgggtggaaatgccaactccagagtttcagatcctaccggtaattggggtagggaggggctttgggcggggcctccctagaggaggaggcgttgttagaaagctgtctggccagtccacagctgtcactaatcggggtaagccttgttgtatttgtgcgtgtgggtggcattctcaatgagaactagcttcacttgtcatttgagtgaaatctacaacccgaggcggctagtgctcccgcactactgggatctgagatcttcggagatgactgtcgcccgcagtacggagccagcagaagtccgacccttcctgggaatgggctgtaccgagaggtccgactagccccagggttttagtgagggggcagtggaactcagcgagggactgagagcttcacagcatgcacgagtttgatgccagagaaaaagtcgggagataaaggagccgcgtgtcactaaattgccgtcgcagccgcagccactcaagtgccggacttgtgagtactctgcgtctccagtcctcggacagaagttggagaactctcttggagaactccccgagttaggagacgagatctcctaacaattactactttttcttgcgctccccacttgccgctcgctgggacaaacgacagccacagttcccctgacgacaggatggaggccaagggcaggagctgaccagcgccgccctcccccgcccccgacccaggaggtggagatccctccggtccagccacattcaacacccactttctcctccctctgcccctatattcccgaaaccccctcctccttcccttttccctcctcctggagacgggggaggagaaaaggggagtccagtcgtcatgactgagctgaaggcaaagggtccccgggctccccacgtggcgggcggcccgccctcccccgaggtcggatccccactgctgtgtcgcccagccgcaggtccgttcccggggagccagacctcggacaccttgcctgaagtttcggccatacctatctccctggacgggctactcttccctcggccctgccagggacaggacccctccgacgaaaagacgcaggaccagcagtcgctgtcggacgtggagggcgcatattccagagctgaagctacaaggggtgctggaggcagcagttctagtcccccagaaaaggacagcggactgctggacagtgtcttggacactctgttggcgccctcaggtcccgggcagagccaacccagccctcccgcctgcgaggtcaccagctcttggtgcctgtttggccccgaacttcccgaagatccaccggctgcccccgccacccagcgggtgttgtccccgctcatgagccggtccgggtgcaaggttggagacagctccgggacggcagctgcccataaagtgctgccccggggcctgtcaccagcccggcagctgctgctcccggcctctgagagccctcactggtccggggccccagtgaagccgtctccgcaggccgctgcggtggaggttgaggaggaggatggctctgagtccgaggagtctgcgggtccgcttctgaagggcaaacctcgggctctgggtggcgcggcggctggaggaggagccgcggctgtcccgccgggggcggcagcaggaggcgtcgccctggtccccaaggaagattcccgcttctcagcgcccagggtcgccctggtggagcaggacgcgccgatggcgcccgggcgctccccgctggccaccacggtgatggatttcatccacgtgcctatcctgcctctcaatcacgccttattggcagcccgcactcggcagctgctggaagacgaaagttacgacggcggggccggggctgccagcgcctttgccccgccgcggagttcaccctgtgcctcgtccaccccggtcgctgtaggcgacttccccgactgcgcgtacccgcccgacgccgagcccaaggacgacgcgtaccctctctatagcgacttccagccgcccgctctaaagataaaggaggaggaggaaggcgcggaggcctccgcgcgctccccgcgttcctaccttgtggccggtgccaaccccgcagccttcccggatttcccgttggggccaccgcccccgctgccgccgcgagcgaccccatccagacccggggaagcggcggtgacggccgcacccgccagtgcctcagtctcgtctgcgtcctcctcggggtcgaccctggagtgcatcctgtacaaagcggagggcgcgccgccccagcagggcccgttcgcgccgccgccctgcaaggcgccgggcgcgagcggctgcctgctcccgcgggacggcctgccctccacctccgcctctgccgccgccgccggggcggcccccgcgctctaccctgcactcggcctcaacgggctcccgcagctcggctaccaggccgccgtgctcaaggagggcctgccgcaggtctacccgccctatctcaactacctgaggccggattcagaagccagccagagcccacaatacagcttcgagtcattacctcagaagatttgtttaatctgtggggatgaagcatcaggctgtcattatggtgtccttacctgtgggagctgtaaggtcttctttaagagggcaatggaagggcagcacaactacttatgtgctggaagaaatgactgcatcgttgataaaatccgcagaaaaaactgcccagcatgtcgccttagaaagtgctgtcaggctggcatggtccttggaggtcgaaaatttaaaaagttcaataaagtcagagttgtgagagcactggatgctgttgctctcccacagccagtgggcgttccaaatgaaagccaagccctaagccagagattcactttttcaccaggtcaagacatacagttgattccaccactgatcaacctgttaatgagcattgaaccagatgtgatctatgcaggacatgacaacacaaaacctgacacctccagttctttgctgacaagtcttaatcaactaggcgagaggcaacttctttcagtagtcaagtggtctaaatcattgccaggttttcgaaacttacatattgatgaccagataactctcattcagtattcttggatgagcttaatggtgtttggtctaggatggagatcctacaaacacgtcagtgggcagatgctgtattttgcacctgatctaatactaaatgaacagcggatgaaagaatcatcattctattcattatgccttaccatgtggcagatcccacaggagtttgtcaagcttcaagttagccaagaagagttcctctgtatgaaagtattgttacttcttaatacaattcctttggaagggctacgaagtcaaacccagtttgaggagatgaggtcaagctacattagagagctcatcaaggcaattggtttgaggcaaaaaggagttgtgtcgagctcacagcgtttctatcaacttacaaaacttcttgataacttgcatgatcttgtcaaacaacttcatctgtactgcttgaatacatttatccagtcccgggcactgagtgttgaatttccagaaatgatgtctgaagttattgctgcacaattacccaagatattggcagggatggtgaaaccccttctctttcataaaaagtgaatgtcatctttttcttttaaagaattaaattttgtggtatgtctttttgttttggtcaggattatgaggtcttgagtttttataatgttcttctgaaagccttacatttataacatcatagtgtgtaaatttaaaagaaaaattgtgaggttctaattattttcttttataaagtataattagaatgtttaactgttttgtttacccatattttcttgaagaatttacaagattgaaaaagtactaaaattgttaaagtaaactatcttatccatattatttcataccatgtaggtgaggatttttaacttttgcatctaacaaatcatcgacttaagagaaaaaatcttacatgtaataacacaaagctattatatgttatttctaggtaactccctttgtgtcaattatatttccaaaaatgaacctttaaaatggtatgcaaaattttgtctatatatatttgtgtgaggaggaaattcataactttcctcagattttcaaaagtatttttaatgcaaaaaatgtagaaagagtttaaaaccactaaaatagattgatgttcttcaaactaggcaaaacaactcatatgttaagaccattttccagattggaaacacaaatctcttaggaagttaataagtagattcatatcattatgcaaatagtattgtgggttttgtaggtttttaaaataaccttttttggggagagaattgtcctctaatgaggtattgcgagtggacataagaaatcagaagattatggcctaactgtactccttaccaactgtggcatgctgaaagttagtcactcttactgattctcaattctctcacctttgaaagtagtaaaatatctttcctgccaattgctcctttgggtcagagcttattaacatcttttcaaatcaaaggaaagaagaaagggagaggaggaggagggaggtatcaattcacatacctttctcctctttatcctccactatcatgaattcatattatgtttcagccatgcaaatctttttaccatgaaatttcttccagaattttccccctttgacacaaattccatgcatgtttcaaccttcgagactcagccaaatgtcatttctgtaaaatcttccctgagtcttccaagcagtaatttgccttctcctagagtttacctgccattttgtgcacatttgagttacagtagcatgttattttacaattgtgactctcctgggagtctgggagccatataaagtggtcaatagtgtttgctgactgagagttgaatgacattttctctctgtcttggtattactgtagatttcgatcattctttggttacatttctgcatatttctgtacccatgactttatcactttcttctcccatgctttatctccatcaattatcttcattacttttaaattttccacctttgcttcctactttgtgagatctctccctttactgactataacatagaagaatagaagtgtattttatgtgtcttaaggacaatactttagattccttgttctaagtttttaaactgaatgaatggaatattatttctctccctaagcaaaattccacaaaacaattatttcttatgtttatgtagccttaaattgttttgtactgtaaacctcagcataaaaactttcttcatttctaatttcattcaacaaatattgattgaatacctggtattagcacaagaaaaatgtgctaataagccttatgagaatttggagctgaagaaagacatataactcaggaaagttacagtccagtagtaggtataaattacagtgcctgataaataggcattttaatatttgtacactcaacgtatactaggtaggtgcaaaacatttacatataattttactgatacccatgcagcacaaaggtactaactttaaatattaaataacacctttatgtgtcagtaattcatttgcattaaatcttattgaaaaggctttcaatatattttccccacaaatgtcatcccaagaaaaaagtatttttaacatctcccaaatataatagttacaggaaatctacctctgtgagagtgacacctctcagaatgaactgtgtgacacaagaaaatgaatgtaggtctatccaaaaaaaaccccaagaaacaaaaacaatattattagccctttatgcttaagtgatggactcagggaacagttgatgttgtgatcattttattatctgattcttgttactttgaattaaaccaatattttgatgatataaatcatttccaccagcatatatttaatttccataataactttaaaattttctaatttcactcaactatgagggaatagaatgtggtggccacaggtttggcttttgttaaaatgtttgatatcttcgatgttgatctctgtctgcaatgtagatgtctaaacactaggatttaatatttaaggctaagctttaaaaataaagtacctttttaaaaagaatatggcttcaccaaatggaaaatacctaatttctaaatctttttctctacaaagtcctatctactaatgtctccattactatttagtcatcataaccattatcttcattttacatgtcgtgttctttctggtagctctaaaatgacactaaatcataagaagacaggttacatatcaggaaatacttgaaggttactgaaatagattcttgagttaatgaaaatattttctgtaaaaaggtttgaaaagccatttgagtctaaagcattatacctccattatcagtagttatgtgacaattgtgtgtgtgtttaatgtttaaagatgtggcactttttaataaggcaatgctatgctattttttcccatttaacattaagataatttattgctatacagatgatatggaaatatgatgaacaatattttttttgccaaaactatgccttgtaagtagccatggaatgtcaacctgtaacttaaattatccacagatagtcatgtgtttgatgatgggcactgtggagataactgacataggactgtgccccccttctctgccacttactagctggatgagattaagcaagtcatttaactgctctgattaaacctgcctttcccaagtgctttgtaatgaatagaaatggaaaccaaaaaaaacgtatacaggccttcagaaatagtaattgctactattttgttttcattaagccatagttctggctataattttatcaaactcaccagctatattctacagtgaaagcaggattctagaaagtctcactgttttatttatgtcaccatgtgctatgatatatttggttgaattcatttgaaattagggctggaagtattcaagtaatttcttctgctgaaaaaatacagtgttttgagtttagggcctgttttatcaaagttctaaagagcctatcactcttccattgtagacattttaaaataatgacactgattttaacatttttaagtgtctttttagaacagagagcctgactagaacacagcccctccaaaaacccatgctcaaattatttttactatggcagcaattccacaaaagggaacaatgggtttagaaattacaatgaagtcatcaacccaaaaaacatccctatccctaagaaggttatgatataaaatgcccacaagaaatctatgtctgctttaatctgtcttttattgctttggaaggatggctattacatttttagtttttgctgtgaatacctgagcagtttctctcatccatacttatccttcacacatcagaagtcaggatagaatatgaatcattttaaaaacttttacaactccagagccatgtgcataagaagcattcaaaacttgccaaaacatacattttttttcaaatttaaagatactctatttttgtattcaatagctcaacaactgtggtccccactgataaagtgaagtggacaaggagacaagtaatggcataagtttgtttttcccaaagtatgcctgttcaatagccattggatgtgggaaatttctacatctcttaaaattttacagaaaatacatagccagatagtctagcaaaagttcaccaagtcctaaattgcttatccttacttcactaagtcatgaaatcattttaatgaaaagaacatcacctaggttttgtggtttctttttttcttattcatggctgagtgaaaacaacaatctctgtttctccctagcatctgtggactatttaatgtaccattattccacactctatggtccttactaaatacaaaattgaacaaaaagcagtaaaacaactgactcttcacccatattataaaatataatccaagccagattagtcaacatccataagatgaatccaagctgaactgggcctagattattgagttcaggttggatcacatccctatttattaataaacttaggaaagaaggccttacagaccatcagttagctggagctaatagaacctacacttctaaagttcggcctagaatcaatgtggccttaaaagctgaaaagaagcaggaaagaacagttttcttcaataatttgtccaccctgtcactggagaaaatttaagaatttgggggtgttggtagtaagttaaacacagcagctgttcatggcagaaattattcaatacataccttctctgaatatcctataaccaaagcaaagaaaaacaccaaggggtttgttctcctccttggagttgacctcattccaaggcagagctcaggtcacaggcacaggggctgcgcccaagcttgtccgcagccttatgcagctgtggagtctggaagactgttgcaggactgctggcctagtcccagaatgtcagcctcattttcgatttactggctcttgttgctgtatgtcatgctgaccttattgttaaacacaggtttgtttgctttttttccactcatggagacatgggagaggcattatttttaagctggttgaaagctttaaccgataaagcatttttagagaaatgtgaatcaggcagctaagaaagcatactctgtccattacggtaaagaaaatgcacagattattaactctgcagtgtggcattagtgtcctggtcaatattcggatagatatgaataaaatatttaaatggtattgtaaatagttttcaggacatatgctatagcttatttttattatcttttgaaattgctcttaatacatcaaatcctgatgtattcaatttatcagatataaattattctaaatgaagcccagttaaatgtttttgtcttgtcagttatatgttaagtttctgatctctttgtctatgacgtttactaatctgcatttttactgttatgaattattttagacagcagtggtttcaagctttttgccactaaaaataccttttattttctcctcccccagaaaagtctataccttgaagtatctatccaccaaactgtacttctattaagaaatagttattgtgttttcttaatgttttgttattcaaagacatatcaatgaaagctgctgagcagcatgaataacaattatatccacacagatttgatatattttgtgcagccttaacttgatagtataaaatgtcattgctttttaaataatagttagtcaatggacttctatcatagctttcctaaactaggttaagatccagagctttggggtcataatatattacatacaattaagttatctttttctaagggctttaaaattcatgagaataaccaaaaaaggtatgtggagagttaatacaaacataccatattcttgttgaaacagagatgtggctctgcttgttctccataaggtagaaatactttccagaatttgcctaaactagtaagccctgaatttgctatgattagggataggaagagattttcacatggcagactttagaattcttcactttagccagtaaagtatctccttttgatcttagtattctgtgtattttaacttttctgagttgtgcatgtttataagaaaaatcagcacaaagggtttaagttaaagcctttttactgaaatttgaaagaaacagaagaaaatatcaaagttctttgtattttgagaggattaaatatgatttacaaaagttacatggagggctctctaaaacattaaattaattattttttgttgaaaagtcttactttaggcatcattttattcctcagcaactagctgtgaagcctttactgtgctgtatgccagtcactctgctagattgtggagattaccagtgttcccgtcttctccgagcttagagttggatggggaataaagacaggtaaacagatagctacaatattgtactgtgaatgcttatgctggaggaagtacagggaactattggagcacctaagaggagcacctaccttgaatttaggggttagcagaggcatcctgaaaaaagtcaaagctaagccacaatctataagcagtttaggaattagcagaacgtgcgtggtgaggagatgccaaaggcaagaagagaagagtattccaaacaggagggattccaaagagagaagagtatcccaaacaacatttgcacaaacctgatggggagagagaatgtggggtggggatggatgatgagactgaagaagaaagccaggtctagataatcagtggccttgtacaccatgttaaagagtgtagacttgattctgttgtaaacaggaaagcagcacaattcatatgaatattttagaagactcccactggaatatggagaataaagttggagatgactaatcctggaagcagggagaacatttttgaggaagttgcactattttggtgaaaatgatgatcataaacatgaagaattgtaggtgatcatgacctcctctctaattttccagaagggttttggaagatataacataggaacattgacaggactgacgaaaggagatgaaatacaccatataaattgtcaaacacaaggccagatgtctaattattttgcttatgtgttgaaattacaaatttttcatcaggaaaccaaaaactacaaaacttagttttcccaagtcccagaattctatctgtccaaacaatctgtaccactccacctatatccctacctttgcatgtctgtccaacctcaaagtccaggtctatacacacgggtaagactagagcagttcaagtttcagaaaatgagaaagaggaactgagttgtgctgaacccatacaaaataaacacattctttgtatagattcttggaacctcgagaggaattcacctaactcataggtatttgatggtatgaatccatggctgggctcggcttttaaaaagccttatctgggattccttctatggaaccaagttccatcaaagcccatttaaaagcctacattaaaaacaaaattcttgctgcattgtatacaaataatgatgtcatgatcaaataatcagatgccattatcaagtggaattacaaaatggtatacccactccaaaaaaaaaaaaaaagctaaattctcagtagaacattgtgacttcatgagccctccacagccttggagctgaggagggagcactggtgagcagtaggttgaagagaaaacttggcgcttaataatctatccatgttttttcatctaaaagagccttctttttggattaccttattcaatttccatcaaggaaattgttagttccactaaccagacagcagctgggaaggcagaagcttactgtatgtacatggtagctgtgggaaggaggtttctttctccaggtcctcactggccatacaccagtcccttgttagttatgcctggtcatagacccccgttgctatcatctcatatttaagtctttggcttgtgaatttatctattctttcagcttcagcactgcagagtgctgggactttgctaacttccatttcttgctggcttagcacattcctcataggcccagctcttttctcatctggccctgctgtggagtcaccttgccccttcaggagagccatggcttaccactgcctgctaagcctccactcagctgccaccacactaaatccaagcttctctaagatgttgcagactttacaggcaagcataaaaggcttgatcttcctggacttccctttacttgtctgaatctcacctccttcaactttcagtctcagaatgtaggcatttgtcctctttgccctacatcttccttcttctgaatcatgaaagcctctcacttcctcttgctatgtgctggaggcttctgtcaggttttagaatgagttctcatctagtcctagtagcttttgatgcttaagtccaccttttaaggatacctttgagatttagaccatgtttttcgcttgagaaagccctaatctccagacttgcctttctgtggatttcaaagaccaactgaggaagtcaaaagctgaatgttgactttctttgaacatttccgctataacaattccaattctcctcagagcaatatgcctgcctccaactgaccaggagaaaggtccagtgccaaagagaaaaacacaaagattaattatttcagttgagcacatactttcaaagtggtttgggtattcatatgaggttttctgtcaagagggtgagactcttcatctatccatgtgtgcctgacagttctcctggcactggctggtaacagatgcaaaactgtaaaaattaagtgatcatgtattttaacgatatcatcacatacttattttctatgtaatgttttaaatttcccctaacatactttgactgttttgcacatggtagatattcacatttttttgtgttgaagttgatgcaatcttcaaagttatctaccccgttgcttattagtaaaactagtgttaatacttggcaagagatgcagggaatctttctcatgactcacgccctatttagttattaatgctactaccctattttgagtaagtagtaggtccctaagtacattgtccagagttatacttttaaagatatttagccccatatacttcttgaatctaaagtcatacaccttgctcctcatttctgagtgggaaagacatttgagagtatgttgacaattgttctgaaggtttttgccaagaaggtgaaactgtcctttcatctgtgtatgcctggggctgggtccctggcagtgatggggtgacaatgcaaagctgtaaaaactaggtgctagtgggcacctaatatcatcatcatatacttattttcaagctaatatgcaaaatcccatctctgtttttaaactaagtgtagatttcagagaaaatattttgtggttcacataagaaaacagtctactcagcttgacaagtgttttatgttaaattggctggtggtttgaaatgaatcatcttcacataatgttttctttaaaaatattgtgaatttaactctaattcttgttattctgtgtgataataaagaataaactaatttcta

SEQ ID NO: 17181 - protein, 1280 aa, Artificial Sequence
  derived and/or modified sequence
MDLEGDRNGGAKKKNFFKLNNKSEKDKKEKKPTVSVFSMFRYSNWLDKLYMVVGTLAAIIHGAGLPLMMLVFGEMTDIFANAGNLEDLMSNITNRSDINDTGFFMNLEEDMTRYAYYYSGIGAGVLVAAYIQVSFWCLAAGRQIHKIRKQFFHAIMRQEIGWFDVHDVGELNTRLTDDVSKINEGIGDKIGMFFQSMATFFTGFIVGFTRGWKLTLVILAISPVLGLSAAVWAKILSSFTDKELLAYAKAGAVAEEVLAAIRTVIAFGGQKKELERYNKNLEEAKRIGIKKAITANISIGAAFLLIYASYALAFWYGTTLVLSGEYSIGQVLTVFFSVLIGAFSVGQASPSIEAFANARGAAYEIFKIIDNKPSIDSYSKSGHKPDNIKGNLEFRNVHFSYPSRKEVKILKGLNLKVQSGQTVALVGNSGCGKSTTVQLMQRLYDPTEGMVSVDGQDIRTINVRFLREIIGVVSQEPVLFATTIAENIRYGRENVTMDEIEKAVKEANAYDFIMKLPHKFDTLVGERGAQLSGGQKQRIAIARALVRNPKILLLDEATSALDTESEAVVQVALDKARKGRTTIVIAHRLSTVRNADVIAGFDDGVIVEKGNHDELMKEKGIYFKLVTMQTAGNEVELENAADESKSEIDALEMSSNDSRSSLIRKRSTRRSVRGSQAQDRKLSTKEALDESIPPVSFWRIMKLNLTEWPYFVVGVFCAIINGGLQPAFAIIFSKIIGVFTRIDDPETKRQNSNLFSLLFLALGIISFITFFLQGFTFGKAGEILTKRLRYMVFRSMLRQDVSWFDDPKNTTGALTTRLANDAAQVKGAIGSRLAVITQNIANLGTGIIISFIYGWQLTLLLLAIVPIIAIAGVVEMKMLSGQALKDKKELEGSGKIATEAIENFRTVVSLTQEQKFEHMYAQSLQVPYRNSLRKAHIFGITFSFTQAMMYFSYAGCFRFGAYLVAHKLMSFEDVLLVFSAVVFGAMAVGQVSSFAPDYAKAKISAAHIIMIIEKTPLIDSYSTEGLMPNTLEGNVTFGEVVFNYPTRPDIPVLQGLSLEVKKGQTLALVGSSGCGKSTVVQLLERFYDPLAGKVLLDGKEIKRLNVQWLRAHLGIVSQEPILFDCSIAENIAYGDNSRVVSQEEIVRAAKEANIHAFIESLPNKYSTKVGDKGTQLSGGQKQRIAIARALVRQPHILLLDEATSALDTESEKVVQEALDKAREGRTCIVIAHRLSTIQNADLIVVFQNGRVKEHGTHQQLLAQKGIYFSMVSVQAGTKRQ

SEQ ID NO: 17182 - protein, 22 aa, Artificial Sequence
  derived and/or modified sequence
MDLEGDRNGGAKKKNFFKLNNK

SEQ ID NO: 17183 - protein, 48 aa, Artificial Sequence
  derived and/or modified sequence
MDLEGDRNGGAKKKNFFKLNNKSEKDKKEKKPTVSVFSMFRYSNWLDK

SEQ ID NO: 17184 - protein, 1061 aa, Artificial Sequence
  derived and/or modified sequence
ALSPVMGVSAGYWPKILSSFTDKELLAYAKAGAVAEEVLAAIRTVIAFGGQKKELERYNKNLEEAKRIGIKKAITANISIGAAFLLIYASYALAFWYGTTLVLSGEYSIGQVLTVFFSVLIGAFSVGQASPSIEAFANARGAAYEIFKIIDNKPSIDSYSKSGHKPDNIKGNLEFRNVHFSYPSRKEVKILKGLNLKVQSGQTVALVGNSGCGKSTTVQLMQRLYDPTEGMVSVDGQDIRTINVRFLREIIGVVSQEPVLFATTIAENIRYGRENVTMDEIEKAVKEANAYDFIMKLPHKFDTLVGERGAQLSGGQKQRIAIARALVRNPKILLLDEATSALDTESEAVVQVALDKARKGRTTIVIAHRLSTVRNADVIAGFDDGVIVEKGNHDELMKEKGIYFKLVTMQTAGNEVELENAADESKSEIDALEMSSNDSRSSLIRKRSTRRSVRGSQAQDRKLSTKEALDESIPPVSFWRIMKLNLTEWPYFVVGVFCAIINGGLQPAFAIIFSKIIGVFTRIDDPETKRQNSNLFSLLFLALGIISFITFFLQGFTFGKAGEILTKRLRYMVFRSMLRQDVSWFDDPKNTTGALTTRLANDAAQVKGAIGSRLAVITQNIANLGTGIIISFIYGWQLTLLLLAIVPIIAIAGVVEMKMLSGQALKDKKELEGSGKIATEAIENFRTVVSLTQEQKFEHMYAQSLQVPYRNSLRKAHIFGITFSFTQAMMYFSYAGCFRFGAYLVAHKLMSFEDVLLVFSAVVFGAMAVGQVSSFAPDYAKAKISAAHIIMIIEKTPLIDSYSTEGLMPNTLEGNVTFGEVVFNYPTRPDIPVLQGLSLEVKKGQTLALVGSSGCGKSTVVQLLERFYDPLAGKVLLDGKEIKRLNVQWLRAHLGIVSQEPILFDCSIAENIAYGDNSRVVSQEEIVRAAKEANIHAFIESLPNKYSTKVGDKGTQLSGGQKQRIAIARALVRQPHILLLDEATSALDTESEKVVQEALDKAREGRTCIVIAHRLSTIQNADLIVVFQNGRVKEHGTHQQLLAQKGIYFSMVSVQAGTKRQ

SEQ ID NO: 17185 - protein, 1216 aa, Artificial Sequence
  derived and/or modified sequence
MDLEGDRNGGAKKKNFFKLNNKSEKDKKEKKPTVSVFSMFRYSNWLDKLYMVVGTLAAIIHGAGLPLMMLVFGEMTDIFANAGNLEDLMSNITNRSDINDTGFFMNLEEDMTSDVSKINEGIGDKIGMFFQSMATFFTGFIVGFTRGWKLTLVILAISPVLGLSAAVWAKILSSFTDKELLAYAKAGAVAEEVLAAIRTVIAFGGQKKELERYNKNLEEAKRIGIKKAITANISIGAAFLLIYASYALAFWYGTTLVLSGEYSIGQVLTVFFSVLIGAFSVGQASPSIEAFANARGAAYEIFKIIDNKPSIDSYSKSGHKPDNIKGNLEFRNVHFSYPSRKEVKILKGLNLKVQSGQTVALVGNSGCGKSTTVQLMQRLYDPTEGMVSVDGQDIRTINVRFLREIIGVVSQEPVLFATTIAENIRYGRENVTMDEIEKAVKEANAYDFIMKLPHKFDTLVGERGAQLSGGQKQRIAIARALVRNPKILLLDEATSALDTESEAVVQVALDKARKGRTTIVIAHRLSTVRNADVIAGFDDGVIVEKGNHDELMKEKGIYFKLVTMQTAGNEVELENAADESKSEIDALEMSSNDSRSSLIRKRSTRRSVRGSQAQDRKLSTKEALDESIPPVSFWRIMKLNLTEWPYFVVGVFCAIINGGLQPAFAIIFSKIIGVFTRIDDPETKRQNSNLFSLLFLALGIISFITFFLQGFTFGKAGEILTKRLRYMVFRSMLRQDVSWFDDPKNTTGALTTRLANDAAQVKGAIGSRLAVITQNIANLGTGIIISFIYGWQLTLLLLAIVPIIAIAGVVEMKMLSGQALKDKKELEGSGKIATEAIENFRTVVSLTQEQKFEHMYAQSLQVPYRNSLRKAHIFGITFSFTQAMMYFSYAGCFRFGAYLVAHKLMSFEDVLLVFSAVVFGAMAVGQVSSFAPDYAKAKISAAHIIMIIEKTPLIDSYSTEGLMPNTLEGNVTFGEVVFNYPTRPDIPVLQGLSLEVKKGQTLALVGSSGCGKSTVVQLLERFYDPLAGKVLLDGKEIKRLNVQWLRAHLGIVSQEPILFDCSIAENIAYGDNSRVVSQEEIVRAAKEANIHAFIESLPNKYSTKVGDKGTQLSGGQKQRIAIARALVRQPHILLLDEATSALDTESEKVVQEALDKAREGRTCIVIAHRLSTIQNADLIVVFQNGRVKEHGTHQQLLAQKGIYFSMVSVQAGTKRQ

SEQ ID NO: 17186 - DNA, 3843 bp, Artificial Sequence
  derived and/or modified sequence
atggacctcgaaggagaccgtaacggaggagcaaagaagaagaattttttcaagcttaacaataaatctgagaaggataaaaaggagaagaaacccacggtgtcagtattctcaatgttccgctacagcaactggctggacaagctttacatggtggtgggtaccttggccgccataatccacggagcgggcttgccactcatgatgttagtttttggcgaaatgacagacatattcgcaaatgcgggaaacctcgaggatctcatgagcaacatcaccaacagatcagacattaatgatacaggattctttatgaatctggaggaagacatgaccaggtacgcttattattacagcggaattggggcgggcgtgctagtggcagcctacatccaagttagcttttggtgcctggcagcgggcagacagatacacaaaatccgtaaacagttctttcatgccatcatgagacaggagatcgggtggttcgacgtgcatgatgtcggcgagctcaataccagacttacggacgatgtatcgaagattaacgaaggaatcggcgacaaaatcggtatgttctttcagtctatggcaactttctttacgggctttattgtggggtttacacgaggctggaaactgaccctcgttattctggctatatctcccgttttaggcctgtctgcagctgtgtgggcaaaaatactctcctcctttactgataaggaactgctggcttacgccaaggccggagccgtggccgaagaggtcctagctgccatcagaacagtaatcgctttcgggggtcagaagaaggaactggaaagatacaacaagaatctagaagaggctaaaagaattggaatcaagaaagcgattacagctaacatcagtataggagctgccttcctgttgatatacgcttcttacgccctggcattttggtacggtaccacccttgtgttgagtggagaatactcaatcggacaggtgctgactgtgtttttctctgtattgatcggagctttcagcgttggccaagcctctccaagtatcgaggccttcgctaacgcaaggggtgctgcctacgaaattttcaagattatagacaataaaccatctatcgactcatatagtaaatccgggcacaagcctgacaacataaagggcaatctcgaatttcgcaacgtgcatttctcttatccctcaagaaaagaggttaagatattaaaaggcctgaatttgaaggtgcagtccgggcaaacagtcgcactcgtcggaaattcagggtgcggcaaaagtaccactgtacagctgatgcaacgtttatacgatccgactgagggaatggttagtgtggacggtcaggacattagaaccatcaatgtaaggttccttagggaaattatcggtgtggtgtcacaggaacctgtgttgtttgcgaccactatcgcagagaatattagatatggaagagagaacgtgacaatggacgagatcgagaaggcagttaaggaggcaaacgcctatgatttcataatgaaacttccccacaagtttgacactctggtgggagagagaggtgcccagctgtctgggggtcagaagcagcgcattgcaattgcacgggcattagtcaggaatccgaagatattgttgctggatgaagcaacctccgctctagataccgagagcgaagccgtggttcaagtcgctctcgataaggccagaaagggccgcactaccattgtaatcgcccacaggctgagtactgtgcgcaatgccgacgttatcgctggcttcgatgatggagtgattgtggaaaagggcaaccacgacgagttgatgaaggagaagggcatatactttaaactagtgaccatgcaaaccgccggaaatgaagtggagctggaaaacgccgcagacgagagcaagagtgagatagacgccctggaaatgtccagtaacgactcccgcagctcactcatcagaaaacggagcactagacgctccgtgcggggatcccaggcccaggatcgcaaactttccacgaaggaggctctggacgagagtataccgccagtgtccttctggcggatcatgaaactgaaccttacagaatggccatacttcgtggtgggtgtattttgcgccattataaacggtggcttacagcctgccttcgctatcatattctccaaaattatcggcgtgttcacaagaatagatgatcccgaaactaagagacaaaattccaacctgttttctcttctgtttctcgctctcggcattatctcatttatcaccttttttctccagggcttcaccttcggaaaggcaggcgagatcctgaccaagcgacttcgctacatggtattcaggagtatgctacgccaggacgtgtcatggttcgacgacccaaagaacactaccggagccttgacaacccgtttggccaatgacgctgcccaagtcaaaggcgccattggtagtcgccttgctgttatcacacaaaatatcgcaaacctgggaactggaattatcattagctttatttacgggtggcagctcactctgctgcttcttgcaatcgtccccatcatcgccatagcaggagtggtggaaatgaaaatgttatcgggacaggccctgaaagacaagaaagagctcgagggtagcgggaaaatagccacggaagctatcgagaattttagaaccgtagtctcgctgacacaggagcagaagtttgaacatatgtacgcccaatctctccaagtgccttatcgaaacagcctgcgaaaagctcatatatttggaattaccttttcctttactcaggcaatgatgtatttcagttatgctggctgtttccgcttcggggcctacctcgtggcgcacaaactcatgtcctttgaggacgttctgcttgtgttctcggccgtggtttttggggcaatggccgtgggccaggtctcctcttttgccccagactacgctaaagcaaagatatccgctgcgcatatcataatgataatcgagaagactcctttgatcgattcttactccaccgagggtttgatgcccaatacactcgagggcaatgttacctttggggaagtcgtgttcaactatccaacccggcccgacattcctgtcctccagggtctctcacttgaggtaaagaaaggacaaacactcgcattggtggggtcttcgggctgcggaaaaagtacggtggtgcaactcctggagcgtttctacgacccactcgctgggaaggtactgttagacggcaaagaaatcaaacggttgaacgtgcagtggcttagggcccacctggggatcgtaagccaggagcctattctgttcgactgcagcattgccgagaatatagcgtatggggacaactcccgtgttgtcagtcaggaagaaatcgttcgagcagccaaggaagcaaacatccacgcttttatcgaaagcctcccaaataagtattctacgaaggtgggcgataaagggacacagctgtcgggcgggcagaagcaacgcatcgccattgccagggctcttgtgcgccagccacatatacttctcttagacgaggctacgtctgccctcgacactgagagtgagaaggtagttcaggaggcactggacaaggcccgagagggtcggacttgcattgttattgcacaccgtttatctacaatccagaacgcagacctaatcgtggtatttcagaacggaagggtcaaggaacacgggacccatcagcagttgctggcacaaaaagggatctacttctcaatggtcagcgtccaggcagggaccaagagacaatag

SEQ ID NO: 17187 - DNA, 69 bp, Artificial Sequence
  derived and/or modified sequence
atggacctcgaaggagaccgaaatggcggggcaaagaaaaagaactttttcaagttgaacaataaatag

SEQ ID NO: 17188 - DNA, 147 bp, Artificial Sequence
  derived and/or modified sequence
atggatcttgagggggatcgaaacgggggggctaaaaaaaagaatttttttaagttgaataacaagagcgagaaagacaaaaaggaaaaaaaacctactgtctcagttttttctatgttcaggtactcgaactggctcgacaagtag

SEQ ID NO: 17189 - DNA, 3186 bp, Artificial Sequence
  derived and/or modified sequence
gcacttagtcctgttatgggcgtctccgccgggtactggccaaagatcctgagcagttttaccgacaaggagcttctggcctacgcgaaagctggcgctgttgccgaagaagtgcttgccgcgatccggacggtcatcgccttcgggggccagaaaaaggagctcgagcgctataataagaatctcgaagaagccaagcggatcgggatcaagaaggccatcacagcaaacataagcattggggctgcatttctcctgatttatgcgagctacgctttggccttctggtacggcacaaccctggtgttgtcaggcgagtactcaatcggccaggttcttaccgtctttttctccgtgctgatcggcgcgttcagcgtcgggcaagcctcaccttcaatcgaggctttcgcaaatgctcgaggcgctgcctatgaaatctttaagataatagacaacaaacccagtatagacagttattcaaagtcaggacacaaacccgataacatcaagggaaacttggagtttagaaacgtgcatttctcctacccttccaggaaagaggtgaaaattctcaagggcctgaaccttaaggtccagtctggccaaaccgttgccctggtcgggaactccgggtgcggcaaaagcacgacggtccagctcatgcagagactttacgaccccaccgagggcatggtgagtgtcgacggtcaagatatcaggaccatcaatgtgcgctttctgagggagataataggggtggtgtctcaggagcctgtcctgttcgcaacaaccattgcagagaatatacggtacggaagggaaaatgtgaccatggatgaaatagaaaaggccgtcaaggaagccaacgcatatgacttcatcatgaagcttccccataagtttgacacgctggtcggtgagaggggcgctcagttaagtggaggccagaagcagaggatcgccattgcgagagcactcgtccgcaacccaaaaatcctcctactcgatgaagctactagtgctttggatacagagtcggaggcggtcgttcaagtcgccttggataaagccaggaagggccgcaccacaatcgtgattgcccaccgcctgtcaacagtacgcaatgccgacgtaatcgccggatttgatgatggcgtaatcgtggaaaaggggaatcatgacgagctgatgaaagagaagggtatctattttaagctcgtgaccatgcagaccgctggcaatgaggtcgagctagaaaacgccgccgatgagtcaaagtctgaaatcgacgctctcgagatgtcatctaatgacagtaggagctcactgattagaaagcgatctactcgccgcagcgtgcgcggctcacaggcacaggacagaaagctgagcacaaaggaggctttagatgagagcatcccccctgtctcgttctggcgcattatgaagcttaacctcaccgagtggccctatttcgtggtaggggtgttctgtgccatcattaacggaggcttacagccagcctttgcgatcattttctctaaaatcattggagtattcactcggatagatgaccctgaaacaaaacgacagaatagtaacctgttctctctcctgtttcttgcgctcggaatcatctctttcatcacgttctttctacagggatttacttttgggaaggcaggggagatcctcaccaagaggcttaggtatatggtattcaggtccatgctcagacaggatgtctcctggtttgatgatcctaaaaatacgaccggcgccctgaccactcgactcgccaacgacgccgcacaggttaaaggcgcaatcggatctaggctggctgttatcacgcagaacatcgccaaccttggaacaggcataataatcagcttcatttacggatggcagctgactctgctcctcttggctattgttcccattattgcgattgccggtgttgtcgaaatgaaaatgctctcagggcaagctctgaaggataaaaaggagttagaaggcagtggtaaaatcgccacagaggcgattgagaatttcaggactgttgtgagcctcacccaggagcaaaagttcgaacacatgtatgcccagtccctgcaggtgccctatcgtaactctctacgcaaagcacacatatttggaattacattctcatttactcaggcaatgatgtacttctcctatgccggatgtttccggtttggtgcctacctggtggctcataaacttatgtctttcgaggatgtgctgctcgtcttctctgcagttgtttttggcgcaatggctgtgggccaggttagctccttcgcccctgattacgccaaagcaaagatcagcgccgcacacattattatgattatcgaaaaaaccccgcttatcgattcctactccactgaaggattaatgccaaacaccctcgaaggtaacgtgacttttggggaggtggtttttaactaccctactcggccagacatccctgtgctgcaagggctttctctggaagttaagaagggtcagacactggccttagtgggttcttccggttgcgggaaaagcaccgtggtgcaattgttggagcgcttctatgatcctctggctggcaaggttctgctggatggaaaagagattaagcggcttaatgtccagtggcttcgagcacatctcggaatcgtaagccaagaaccgatactcttcgactgctcaatcgcagagaatatcgcttacggggacaatagtcgggtggtctcccaggaagaaatcgtacgggccgcgaaggaggccaacatccatgctttcatagaaagcctcccaaataagtactcaacaaaggtgggagataaaggcactcagttgtctggaggacagaagcagagaatagccatcgccagagctttggtgagacagccccatatcctactgctggacgaggctacctccgcgttggatacagagagcgaaaaagtcgtccaggaagcgctagataaagcaagggagggtcgaacctgcatcgtgatcgcccaccgcctgagcacaattcagaacgccgatcttattgtggtgtttcagaatggacgcgttaaagagcacggaacccaccagcaactgctggcccagaaaggcatatacttctcaatggtgagcgtgcaggcaggtacgaaacggcagtag

SEQ ID NO: 17190 - DNA, 3651 bp, Artificial Sequence
  derived and/or modified sequence
atggatttggagggagacagaaatggaggggccaaaaaaaagaatttcttcaaacttaataacaagagcgagaaggacaagaaggagaagaaacctaccgtgagcgtcttcagcatgtttcggtacagcaactggttagataagctctacatggtagttggcactctcgccgctataatacatggcgccggtttaccgctcatgatgctggttttcggggagatgaccgacatcttcgcaaatgccggaaacctggaggatctgatgtccaatataacgaaccggtcagatatcaatgacacgggattctttatgaatctggaggaggatatgacctctgacgtgagcaagattaacgaggggattggtgacaagattggcatgttctttcagtctatggctacattttttacaggttttattgtaggattcactcggggatggaaactgactctcgttattctggccattagccctgttctgggcctgtcagccgctgtttgggcaaagattctgtcctcgttcacggataaggaactgttagcgtatgccaaagcaggggcggtggccgaggaggtgttggcggccatccggaccgtcattgcctttggcggccagaagaaagagctagagaggtacaacaaaaatctcgaggaggctaagcgtatcggtatcaagaaggccattacggccaatatctcaatcggagcggcctttctgctgatttacgcctcctatgcactagcattctggtacgggaccactctggttctgagcggcgaatatagcatcggtcaggtgctgacagtgtttttctcggttctgataggagccttcagcgtgggccaggcctccccaagcatcgaggccttcgccaatgcacgaggggctgcctatgagatcttcaagataatcgataacaaacccagcattgattcctacagtaagtctggccataagccagataacattaaaggaaatctagagttcaggaatgtgcatttctcctacccaagtagaaaagaggtgaaaatcctcaaaggccttaaccttaaggtccagagcggccaaactgtagcactcgtaggcaattccggatgcgggaaaagcaccaccgtccaactgatgcaaagactctatgaccctactgaaggcatggtctccgtggatggacaagatatcaggactattaatgtgcgctttctgcgggagattatcggcgtcgtctcccaggaacccgttctgttcgctacaacaatagctgagaacatccgctatggcagggagaatgttactatggacgaaatcgaaaaggctgttaaagaggccaacgcgtacgactttattatgaagctgccccacaagtttgatacccttgtaggggagcgcggcgcccaactcagcggcggccagaaacagcggattgctattgccagagcgctggtgagaaacccaaaaatcctcttgctagacgaagctaccagcgcccttgacactgagagtgaggcggtcgtacaggtggcacttgataaagctcggaaggggagaacaaccatcgtcatagctcaccgcctatccacagtgagaaacgccgacgtgatagcaggcttcgacgacggcgtaattgtggagaagggaaatcacgatgaactcatgaaggaaaaaggtatctatttcaaattggtaactatgcaaacagccggcaatgaagtcgagctggagaatgctgcagatgagtctaagtcagagatcgatgctctcgagatgagttccaacgactcgcgcagttctcttatccgtaagcgaagcacccgacgatcagtaagaggctcacaggcccaggatcgcaagctcagcactaaggaagccttggacgagagtatccccccggtatctttttggcgtattatgaaactgaacctgactgagtggccttatttcgtggtaggagtgttttgtgcaatcataaatggtggccttcagcctgcctttgccataatcttcagtaaaattatcggcgtcttcaccagaatagatgatcctgagaccaaacggcaaaatagcaacctgttttcactcctctttctggcacttggaattatttctttcattactttcttcctgcagggcttcacatttggaaaagccggggagattcttaccaagaggctgcgttatatggtctttaggtcgatgctgcggcaggacgtgtcttggttcgacgatcctaaaaacacgaccggtgctctgacaacaaggctggctaatgacgcagctcaggtaaagggggcaattgggagccgcctagctgtgatcactcaaaacatcgctaacctgggcaccggaatcatcatttccttcatctacggatggcagttgacattattactgctggcgattgtacctatcatagctatcgcaggggttgtcgaaatgaagatgctgtctgggcaagcgctgaaagataagaaggagctggaggggagtggaaaaattgcgacagaagcgattgaaaactttagaaccgttgtcagcctcacgcaggaacagaagttcgagcacatgtacgcacagagcctccaggtgccatatcggaactccctacggaaagcgcatatattcggcattaccttcagctttacacaagccatgatgtatttctcatacgctggatgcttcaggttcggggcatacctggttgctcataagttgatgagctttgaagacgtgctgctcgtattctcagcggtggtgtttggcgccatggcagttgggcaggtgagttcattcgcaccagattatgctaaagctaagatttccgccgcccacattattatgatcatcgaaaaaacacccttgattgactcttattccaccgaaggactaatgcccaatacacttgaaggcaatgttacttttggggaagtggttttcaattatcctactcgaccggatattccggtgttacagggactctcgttagaagttaagaaaggacaaacactggccctggttggttcatctggctgcggcaagtcaactgttgtccagttgctggagagattctacgaccctctggccgggaaggtcttactggatgggaaggaaattaaaagactgaacgtgcaatggctgcgcgcccacttgggcatcgttagtcaggagcctatcctgtttgactgctcaatcgcggagaacatcgcatatggtgacaactctcgcgtcgtgagccaggaagaaattgtgagagcggctaaagaagccaatatccacgcttttatagaaagcctccctaacaagtactctacgaaagtcggggacaagggtactcaattatccggggggcagaaacagagaattgccatagccagggctctggttcgccagccacacattttattgttggatgaagctacctctgcgcttgatactgaatccgagaaagtggttcaagaagctctggataaagcacgtgagggacggacgtgcatcgtaatcgcccacagattatcgaccattcagaacgctgacctcattgtagtgtttcagaacggacgcgttaaggagcacgggactcaccagcagctgctcgcacagaagggtatttactttagcatggtgtctgtgcaggctgggacaaagcgacaatag

SEQ ID NO: 17191 - DNA, 3843 bp, Artificial Sequence
  derived and/or modified sequence
atggacctggagggggacagaaatggaggagccaagaagaagaacttcttcaagctgaacaacaagtctgagaaggacaagaaggagaagaagcccaccgtgtctgtgttctccatgttccgctacagcaactggctggacaagctgtacatggtggtgggcaccctggccgccatcatccatggagctggcctgcccctgatgatgctggtgtttggagagatgacagacatctttgccaatgccggcaacctggaggacctgatgagcaacatcaccaacagaagtgacatcaatgacaccggcttcttcatgaacctggaggaggacatgaccaggtatgcctactactacagcggcattggagctggggtgctggtggccgcctacatccaggtgtccttctggtgcctggccgccggccggcagatccacaagatcaggaagcagttcttccacgccatcatgaggcaggagatcggctggtttgatgtgcatgatgtgggggagctgaacacccggctgacagatgatgtgtccaagatcaatgaaggcatcggggacaagattggcatgttcttccagagcatggccaccttcttcaccggcttcatcgtgggcttcacccggggctggaagctgaccctggtgatcctggccatcagccctgtgctgggcctgtctgctgctgtgtgggccaagatcctgagcagcttcacagacaaggagctgctggcctatgccaaggccggggctgtggccgaggaggtgctggccgccatcagaacagtgattgcctttggaggccagaagaaggagctggagcgctacaacaagaacctggaggaggccaagagaattggcatcaagaaggccatcacagccaacatcagcattggagctgccttcctgctgatctatgccagctatgccctggccttctggtacggcaccaccctggtgctgtctggagagtacagcatcggccaggtgctgactgtgttcttctctgtgctgattggagccttctctgtgggccaggccagccccagcattgaggcctttgccaatgcccggggagctgcctatgagatcttcaagatcatcgacaacaagcccagcattgacagctacagcaagagcggccacaagccagacaacatcaagggcaacctggagttcagaaatgtgcacttctcctaccccagcaggaaggaggtgaagatcctgaagggcctgaacctgaaggtgcagagcggccagacagtggccctggtgggcaacagcggctgcggcaagagcaccaccgtgcagctgatgcagaggctgtatgaccccacagagggcatggtgtctgtggatggccaggacatccgcaccatcaacgtgcgcttcctgcgggagatcatcggcgtggtgtcccaggagcctgtgctgtttgccaccaccatcgccgagaacatccgctatggaagagaaaatgtgaccatggatgaaattgagaaggctgtgaaggaggccaatgcctatgacttcatcatgaagctgccccacaagtttgacaccctggtgggggagcggggggcccagctgagcggcggccagaagcagagaattgccatcgcccgggccctggtgaggaaccccaagatcctgctgctggatgaggccaccagcgccctggacacagaaagtgaagctgtggtgcaggtggccctggacaaggccaggaagggccgcaccaccatcgtgattgcccaccggctgagcacagtgagaaatgctgatgtgattgctggctttgatgatggagtcatcgtggagaagggcaaccatgatgagctgatgaaggagaagggcatctacttcaagctggtgaccatgcagacagctggaaatgaggtggagctggagaatgctgctgatgagagcaagtcagaaattgatgccctggagatgagcagcaatgacagccgcagcagcctcatcaggaagaggagcaccaggagatctgtgcggggcagccaggcccaggacaggaagctgagcaccaaggaggccctggatgagagcatcccccctgtgtccttctggaggatcatgaagctgaacctgacagagtggccctactttgtggtgggcgtcttctgtgccatcatcaatggaggcctgcagcctgcctttgccatcatcttcagcaagatcatcggggtcttcaccagaattgatgatcctgagaccaagaggcagaacagcaacctcttcagcctgctcttcctggccctgggcatcatctccttcatcaccttcttcctgcagggcttcaccttcggcaaggccggggagatcctgaccaagaggctgcgctacatggtgttccgctccatgctgcggcaggatgtgtcctggtttgatgaccccaagaacaccactggagccctgaccacccggctggccaatgatgctgcccaggtgaagggggccatcggcagccggctggccgtcatcacccagaacatcgccaacctgggcaccggcatcatcatctccttcatctacggctggcagctgaccctgctgctgctggccatcgtgcccatcatcgccatcgccggcgtggtggagatgaagatgctgagcggccaggccctgaaggacaagaaggagctggagggcagcggcaagatcgccacagaggccatcgagaacttcagaacagtggtgtccctgacccaggagcagaagtttgagcacatgtatgcccagagcctgcaggtgccctacagaaacagcctgaggaaggcccacatcttcggcatcaccttctccttcacccaggccatgatgtacttctcctatgccggctgcttccgctttggagcctacctggtggcccacaagctgatgagctttgaagatgtgctgctggtgttttctgctgtggtgtttggagccatggctgtgggccaggtgtcctcctttgccccagactatgccaaggccaagatctctgctgcccacatcatcatgatcatcgagaagacccccctgattgacagctacagcacagagggcctgatgcccaacaccctggagggcaatgtgacctttggagaggtggtgttcaactaccccaccaggccagacatccctgtgctgcagggcctgagcctggaggtgaagaagggccagaccctggccctggtgggcagcagcggctgtgggaagagcacagtggtgcagctgctggagcgcttctatgaccccctggccggcaaggtgctgctggatggcaaggagatcaagaggctgaatgtgcagtggctgcgggcccacctgggcatcgtgtcccaggagcccatcctgtttgactgcagcattgctgaaaatattgcctatggagacaacagccgggtggtgtcccaggaggagatcgtgcgggccgccaaggaggccaacatccacgccttcatcgagagcctgcccaacaagtacagcaccaaggtgggggacaagggcacccagctgagcggcggccagaagcagagaattgccatcgcccgggccctggtgcggcagccccacatcctgctgctggatgaggccaccagcgccctggacacagagagcgagaaggtggtgcaggaggccctggacaaggcccgggagggccgcacctgcatcgtcatcgcccaccggctgagcaccatccagaatgctgacctgattgtggtgttccagaatggccgggtgaaggagcacggcacccaccagcagctgctggcccagaagggcatctacttctccatggtgtctgtgcaggccggcaccaagaggcagtag

SEQ ID NO: 17192 - DNA, 69 bp, Artificial Sequence
  derived and/or modified sequence
atggacctggagggggacagaaatggaggagccaagaagaagaacttcttcaagctgaacaacaagtag

SEQ ID NO: 17193 - DNA, 147 bp, Artificial Sequence
  derived and/or modified sequence
atggacctggagggggacagaaatggaggagccaagaagaagaacttcttcaagctgaacaacaagtctgagaaggacaagaaggagaagaagcccaccgtgtctgtgttctccatgttccgctacagcaactggctggacaagtag

SEQ ID NO: 17194 - DNA, 3186 bp, Artificial Sequence
  derived and/or modified sequence
gccctgagccctgtgatgggcgtgtctgctggctactggcccaagatcctgagcagcttcacagacaaggagctgctggcctatgccaaggccggggctgtggccgaggaggtgctggccgccatccgcaccgtcatcgccttcggcggccagaagaaggagctggagcgctacaacaagaacctggaggaggccaagagaattggcatcaagaaggccatcacagccaacatcagcatcggggccgccttcctgctgatctatgccagctatgccctggccttctggtacggcaccaccctggtgctgagcggggagtacagcatcggccaggtgctgaccgtcttcttctctgtgctgattggagccttctctgtgggccaggccagccccagcattgaggcctttgccaatgcccggggggccgcctatgagatcttcaagatcatcgacaacaagcccagcattgacagctacagcaagagcggccacaagccagacaacatcaagggcaacctggagttcagaaatgtgcacttctcctaccccagcaggaaggaggtgaagatcctgaagggcctgaacctgaaggtgcagagcggccagacagtggccctggtgggcaacagcggctgtgggaagagcaccaccgtgcagctgatgcagaggctgtatgaccccacagagggcatggtgtctgtggatggccaggacatccgcaccatcaacgtgcgcttcctgcgggagatcattggagtggtgtcccaggagcctgtgctgtttgccaccaccatcgccgagaacatccgctatggccgggagaatgtgaccatggatgaaattgagaaggctgtgaaggaggccaatgcctatgacttcatcatgaagctgccccacaagtttgacaccctggtgggggagcggggggcccagctgagcggcggccagaagcagagaattgccatcgcccgggccctggtgaggaaccccaagatcctgctgctggatgaggccaccagcgccctggacacagagagcgaggccgtggtgcaggtggccctggacaaggccaggaaaggaagaaccaccatcgtcatcgcccaccggctgagcacagtgagaaatgctgatgtgattgctggctttgatgatggagtgattgtggagaagggcaaccatgatgagctgatgaaggagaagggcatctacttcaagctggtgaccatgcagacagctggaaatgaggtggagctggagaatgctgctgatgagagcaagtcagaaattgatgccctggagatgagcagcaatgacagccgcagcagcctcatcaggaagaggagcacccggcgctctgtgcggggcagccaggcccaggacaggaagctgagcaccaaggaggccctggatgagagcatcccccctgtgtccttctggaggatcatgaagctgaacctgacagagtggccctactttgtggtgggcgtcttctgtgccatcatcaatggaggcctgcagcctgcctttgccatcatcttcagcaagatcattggagtcttcaccagaattgatgatcctgagaccaagaggcagaacagcaacctcttcagcctgctcttcctggccctgggcatcatctccttcatcaccttcttcctgcagggcttcaccttcggcaaggccggggagatcctgaccaagaggctgcgctacatggtgttccgctccatgctgcggcaggatgtgtcctggtttgatgaccccaagaacaccaccggggccctgaccacccggctggccaatgatgctgcccaggtgaagggggccatcggcagccggctggccgtcatcacccagaacatcgccaacctgggcaccggcatcatcatctccttcatctacggctggcagctgaccctgctgctgctggccatcgtgcccatcatcgccatcgccggcgtggtggagatgaagatgctgagcggccaggccctgaaggacaagaaggagctggagggcagcggcaagatcgccacagaggccatcgagaacttcagaacagtggtgtccctgacccaggagcagaagtttgagcacatgtatgcccagagcctgcaggtgccctacagaaacagcctgaggaaggcccacatcttcggcatcaccttctccttcacccaggccatgatgtacttctcctatgccggctgcttccgctttggagcctacctggtggcccacaagctgatgagctttgaagatgtgctgctggtgttttctgctgtggtgtttggagccatggctgtgggccaggtgagcagctttgccccagactatgccaaggccaagatctctgctgcccacatcatcatgatcatcgagaagacccccctgattgacagctacagcacagagggcctgatgcccaacaccctggagggcaatgtgaccttcggggaggtggtgttcaactaccccaccaggccagacatccctgtgctgcagggcctgagcctggaggtgaagaagggccagaccctggccctggtgggcagcagcggctgcggcaagagcacagtggtgcagctgctggagcgcttctatgaccccctggccggcaaggtgctgctggatggcaaggagatcaagaggctgaatgtgcagtggctgcgggcccacctgggcatcgtgtcccaggagcccatcctgtttgactgcagcattgctgagaacatcgcctacggggacaacagccgggtggtgtcccaggaggagatcgtgcgggccgccaaggaggccaacatccacgccttcatcgagagcctgcccaacaagtacagcaccaaggtgggggacaagggcacccagctgagcggcggccagaagcagagaattgccatcgcccgggccctggtgcggcagccccacatcctgctgctggatgaggccaccagcgccctggacacagaaagtgagaaggtggtgcaggaggccctggacaaggcccgggagggccgcacctgcatcgtgattgcccaccggctgagcaccatccagaatgctgacctgattgtggtgttccagaatggccgggtgaaggagcacggcacccaccagcagctgctggcccagaagggcatctacttctccatggtgtctgtgcaggccggcaccaagaggcagtag

SEQ ID NO: 17195 - DNA, 3651 bp, Artificial Sequence
  derived and/or modified sequence
atggacctggagggggacagaaatggaggagccaagaagaagaacttcttcaagctgaacaacaagtctgagaaggacaagaaggagaagaagcccaccgtgtctgtgttctccatgttccgctacagcaactggctggacaagctgtacatggtggtgggcaccctggccgccatcatccatggagctggcctgcccctgatgatgctggtgtttggagagatgacagacatctttgccaatgccggcaacctggaggacctgatgagcaacatcaccaacagaagtgacatcaatgacaccggcttcttcatgaacctggaggaggacatgaccagtgatgtgtccaagatcaatgaaggcatcggggacaagattggcatgttcttccagagcatggccaccttcttcaccggcttcatcgtgggcttcacccggggctggaagctgaccctggtgatcctggccatcagccctgtgctgggcctgtctgctgctgtgtgggccaagatcctgagcagcttcacagacaaggagctgctggcctatgccaaggccggggctgtggccgaggaggtgctggccgccatcagaacagtgattgcctttggaggccagaagaaggagctggagcgctacaacaagaacctggaggaggccaagagaattggcatcaagaaggccatcacagccaacatcagcattggagctgccttcctgctgatctatgccagctatgccctggccttctggtacggcaccaccctggtgctgtctggagagtacagcatcggccaggtgctgactgtgttcttctctgtgctgattggagccttctctgtgggccaggccagccccagcattgaggcctttgccaatgcccggggagctgcctatgagatcttcaagatcatcgacaacaagcccagcattgacagctacagcaagagcggccacaagccagacaacatcaagggcaacctggagttcagaaatgtgcacttctcctaccccagcaggaaggaggtgaagatcctgaagggcctgaacctgaaggtgcagagcggccagacagtggccctggtgggcaacagcggctgcggcaagagcaccaccgtgcagctgatgcagaggctgtatgaccccacagagggcatggtgtctgtggatggccaggacatccgcaccatcaacgtgcgcttcctgcgggagatcatcggcgtggtgtcccaggagcctgtgctgtttgccaccaccatcgccgagaacatccgctatggaagagaaaatgtgaccatggatgaaattgagaaggctgtgaaggaggccaatgcctatgacttcatcatgaagctgccccacaagtttgacaccctggtgggggagcggggggcccagctgagcggcggccagaagcagagaattgccatcgcccgggccctggtgaggaaccccaagatcctgctgctggatgaggccaccagcgccctggacacagaaagtgaagctgtggtgcaggtggccctggacaaggccaggaagggccgcaccaccatcgtgattgcccaccggctgagcacagtgagaaatgctgatgtgattgctggctttgatgatggagtcatcgtggagaagggcaaccatgatgagctgatgaaggagaagggcatctacttcaagctggtgaccatgcagacagctggaaatgaggtggagctggagaatgctgctgatgagagcaagtcagaaattgatgccctggagatgagcagcaatgacagccgcagcagcctcatcaggaagaggagcaccaggagatctgtgcggggcagccaggcccaggacaggaagctgagcaccaaggaggccctggatgagagcatcccccctgtgtccttctggaggatcatgaagctgaacctgacagagtggccctactttgtggtgggcgtcttctgtgccatcatcaatggaggcctgcagcctgcctttgccatcatcttcagcaagatcatcggggtcttcaccagaattgatgatcctgagaccaagaggcagaacagcaacctcttcagcctgctcttcctggccctgggcatcatctccttcatcaccttcttcctgcagggcttcaccttcggcaaggccggggagatcctgaccaagaggctgcgctacatggtgttccgctccatgctgcggcaggatgtgtcctggtttgatgaccccaagaacaccactggagccctgaccacccggctggccaatgatgctgcccaggtgaagggggccatcggcagccggctggccgtcatcacccagaacatcgccaacctgggcaccggcatcatcatctccttcatctacggctggcagctgaccctgctgctgctggccatcgtgcccatcatcgccatcgccggcgtggtggagatgaagatgctgagcggccaggccctgaaggacaagaaggagctggagggcagcggcaagatcgccacagaggccatcgagaacttcagaacagtggtgtccctgacccaggagcagaagtttgagcacatgtatgcccagagcctgcaggtgccctacagaaacagcctgaggaaggcccacatcttcggcatcaccttctccttcacccaggccatgatgtacttctcctatgccggctgcttccgctttggagcctacctggtggcccacaagctgatgagctttgaagatgtgctgctggtgttttctgctgtggtgtttggagccatggctgtgggccaggtgtcctcctttgccccagactatgccaaggccaagatctctgctgcccacatcatcatgatcatcgagaagacccccctgattgacagctacagcacagagggcctgatgcccaacaccctggagggcaatgtgacctttggagaggtggtgttcaactaccccaccaggccagacatccctgtgctgcagggcctgagcctggaggtgaagaagggccagaccctggccctggtgggcagcagcggctgtgggaagagcacagtggtgcagctgctggagcgcttctatgaccccctggccggcaaggtgctgctggatggcaaggagatcaagaggctgaatgtgcagtggctgcgggcccacctgggcatcgtgtcccaggagcccatcctgtttgactgcagcattgctgaaaatattgcctatggagacaacagccgggtggtgtcccaggaggagatcgtgcgggccgccaaggaggccaacatccacgccttcatcgagagcctgcccaacaagtacagcaccaaggtgggggacaagggcacccagctgagcggcggccagaagcagagaattgccatcgcccgggccctggtgcggcagccccacatcctgctgctggatgaggccaccagcgccctggacacagagagcgagaaggtggtgcaggaggccctggacaaggcccgggagggccgcacctgcatcgtcatcgcccaccggctgagcaccatccagaatgctgacctgattgtggtgttccagaatggccgggtgaaggagcacggcacccaccagcagctgctggcccagaagggcatctacttctccatggtgtctgtgcaggccggcaccaagaggcagtag

SEQ ID NO: 17196 - DNA, 3843 bp, Artificial Sequence
  derived and/or modified sequence
atggacctggagggcgaccggaacggcggcgccaagaagaagaacttctttaagctgaacaataaaagtgagaaagataaaaaggaaaaaaagcctacagtctccgtcttcagtatgttccgttacagcaattggctggataagctgtacatggtggtgggcaccctcgccgcaatcatccacggggcaggactgcccctcatgatgttggtcttcggtgaaatgaccgacatcttcgctaacgctggcaatcttgaggacctgatgagcaatatcaccaaccgtagcgatatcaatgataccggcttttttatgaatctggaggaggatatgaccagatacgcttactactactcagggattggggcgggggttttggtggcagcttatatccaagtcagtttctggtgcctagccgctggccggcagatccacaagattaggaagcagttcttccatgcaattatgcgtcaagagattgggtggtttgacgtccatgacgtgggagaattaaacacccgtctgacggacgacgttagtaagatcaacgaggggatcggcgataagattggaatgttcttccagtcgatggcaacattctttaccggctttattgtggggtttactcgaggatggaagttaaccttggtcatcctggccattagtcccgtgcttggattgagcgctgccgtttgggcaaaaatcctgtcctcctttactgacaaggaacttcttgcctacgccaaagccggggctgtggccgaggaggtcttagcagctatcagaacagtgatcgcttttggcggacagaagaaagaactggaaaggtacaataaaaatctcgaggaggcaaaaaggatcggaataaagaaagccattacagcaaacatctctattggcgctgcttttcttcttatctatgcctcttatgcccttgcgttctggtatggcactacccttgtcttgagtggcgagtacagcatcggtcaggtgctgacagtatttttttccgttctgataggagccttttccgtcggacaagctagccccagtatcgaagcctttgccaatgcgcggggggccgcctacgagatcttcaagatcattgataacaagcccagcatcgattcctattccaagagcggtcataagcctgataacataaagggcaacttggagtttcgcaatgttcacttttcataccctagccgcaaggaagtcaaaatcttgaaaggtttaaatcttaaggtgcagtccggtcaaacagttgcactggtcggcaactccggctgtgggaagtccaccacagtgcagctgatgcaaaggctctatgaccccacagagggcatggtttccgtggacggacaagatattcgcaccatcaatgtgaggttcctgagagagatcattggagtggtgtcgcaggagccagtgctgtttgccactaccatcgccgagaacatccgctacggtagagagaacgtgaccatggacgagatagagaaagctgtaaaggaggccaacgcctacgatttcatcatgaagctaccccacaagttcgataccctagttggagaaagaggagcgcaactgtcaggaggacagaagcagcgtatcgctatcgcgagggccctggtcaggaaccctaaaatcctgctgctggacgaggctacgagcgcactcgatacagagtctgaggctgtcgtccaggtcgcactggataaggcccgcaagggtcggaccaccatcgttattgcacaccgtctttctactgtcaggaacgccgatgtcattgccggatttgacgacggcgttattgtggagaagggtaaccacgatgagctcatgaaggaaaaaggcatatacttcaaactagtcactatgcagacggctggcaatgaggtagaactcgagaacgcagcagatgaaagcaagagcgagatcgatgcccttgaaatgagctcgaacgatagtcgctcctccctgatccgtaaaagaagtacccggcgttctgtcagaggcagccaggcccaggaccggaaactgtccacaaaagaagctctggatgagtctatccccccggtgagcttctggcggatcatgaaactgaatctgactgagtggccctactttgtagtcggtgtcttttgcgccattattaacggaggactccaaccagctttcgcgattatcttttctaagatcatcggagtgtttaccagaatagatgacccagagaccaagcgccagaattccaacctatttagtcttctcttcctggctctgggaatcatctccttcattactttctttctgcaaggcttcaccttcggcaaggccggtgagattctcacaaagaggctgagatacatggtatttagaagtatgctaagacaagacgtgtcctggtttgatgaccccaaaaacacaactggcgccctcaccacaagactggccaatgatgccgcacaagtaaagggcgcgattggctcgagacttgcagtcatcacccagaacatcgcgaacttaggtactggtattatcataagcttcatttacgggtggcagctcactctgctgctgcttgcaatagtgcctattattgctatagcgggcgtggttgaaatgaagatgctgagcgggcaggctttaaaggataagaaggagctggagggaagtgggaagatcgcaaccgaggccatagaaaactttcgaaccgtggtaagcttaactcaggagcagaaattcgagcatatgtacgcacagtcgcttcaggtgccatatcggaattctttaagaaaagcacacatttttgggattaccttcagcttcacgcaggccatgatgtatttctcttatgctggatgctttcgcttcggcgcctacctggtagctcataagctaatgtcgttcgaagacgtgcttcttgtgtttagcgctgttgtcttcggtgctatggcggttggccaagtgtcttcattcgctcccgattatgcaaaggctaaaatcagtgccgcccacatcattatgattatagaaaaaactcctctcatcgattcttacagtactgagggcttaatgccaaatactttggaaggcaacgtgacattcggagaggtggttttcaactaccctacgcgacccgatataccagtgctacaggggctgtccctagaggtgaagaaagggcagacgcttgctttggtgggttctagtggctgtgggaagtcaactgtggttcaactccttgagcgcttttacgatcccctagccggcaaagtgctactagacggaaaagaaatcaaaagactgaatgttcagtggctgagagcacacctgggcatagtttcccaggagccgatcctgtttgactgttctatcgccgagaacatagcctacggtgataactctagagtggtcagccaagaggagatcgtaagagctgccaaggaggcaaacatccacgccttcattgaatcactgcccaataagtacagcaccaaggtgggtgacaagggcacacagctgtctggcggccagaaacagcggattgctatagctagagcactggttaggcagccgcatattttactgctcgatgaggcgacctcagctcttgacacagaaagcgaaaaggtggtgcaggaggccctcgacaaggccagggaagggagaacttgtattgttatcgcgcaccgcctgagtacaatccagaatgctgatctcattgtcgtgtttcagaatggtagggtgaaagagcacgggacacaccaacagttacttgcacagaagggaatctacttctcaatggtctccgtgcaagcagggacaaagcgtcagtag

SEQ ID NO: 17197 - DNA, 69 bp, Artificial Sequence
  derived and/or modified sequence
atggacctggagggcgaccggaacggcggcgccaagaagaagaacttttttaagctgaataataagtag

SEQ ID NO: 17198 - DNA, 147 bp, Artificial Sequence
  derived and/or modified sequence
atggacctggagggcgaccggaacggcggcgccaagaagaagaactttttcaagttaaacaacaaatccgagaaagacaagaaagagaaaaagcccaccgtatccgtgttctccatgtttcgatactcaaactggctggataaatag

SEQ ID NO: 17199 - DNA, 3186 bp, Artificial Sequence
  derived and/or modified sequence
gccctgagccccgtgatgggcgtgagcgccggctactggcccaagatactgtctagttttactgataaagagttgctagcttacgccaaagccggagccgtcgctgaggaggtcctcgcagccatcagaaccgttatcgcctttgggggacagaagaaagaattggagcgttacaacaagaatctcgaggaggccaaaagaattgggattaagaaagctatcactgccaacatctccattggcgccgcatttcttcttatctacgcatcgtatgctctcgccttctggtatggcactacgctggtgttgtccggggagtacagcattgggcaggtcctgacagttttttttagcgtgctgataggtgccttcagcgtaggccaggcgtctcctagcattgaagcatttgccaacgcacgaggtgcggcgtacgagatatttaaaattatcgataataaacccagcattgactcatattccaagtcagggcataagcctgacaatattaaaggcaacctggaatttaggaatgtgcacttttcttacccctcaaggaaggaggtgaagatcttaaaggggttgaatctgaaagtgcagtccggacagactgtggctcttgtcggcaattccggctgcgggaaaagcacgacagtgcagcttatgcagcggctgtacgacccaactgaggggatggtctccgtggacggtcaggatattagaacaattaatgtcaggttcctgcgcgagattatcggcgtggtgagccaggagcccgtgctgtttgccacaacaatagccgaaaacattcgctacggaagagagaatgtgacaatggacgagatcgagaaggccgtgaaggaagctaatgcttacgattttatcatgaaattgccgcacaagtttgacacactggttggcgaaagaggagcccaactgtctggaggccagaagcagcgaatcgccatcgcgagagccttagtcaggaatcctaaaattctgctcctcgacgaagccaccagcgcactagacactgagtccgaagccgtcgttcaagtggcattggataaagctcgtaaggggagaaccacgattgttattgctcatcgactctcaaccgtgagaaacgctgatgtaatagccggctttgacgacggtgtgattgtcgagaaggggaatcacgatgagcttatgaaagagaagggcatctatttcaaactggtgactatgcagaccgcaggaaacgaagtcgagctggagaatgccgccgatgagagcaagtccgagattgacgcccttgagatgtcaagcaacgattcccggtcctctcttatccgtaagcggtctacaagacgttccgtgagggggagccaggctcaggatagaaagctgagtaccaaggaggcacttgacgaatcgatcccccccgtcagcttctggcgtattatgaagctgaacttgactgaatggccttatttcgttgtcggggtgttttgtgcaattatcaatggcggacttcagcctgcattcgcgattatcttctcaaagatcataggagtctttacccgaatagacgaccccgagaccaagcgccagaactccaacttgttctccctattgtttttggccctcggaataattagtttcattaccttctttttacagggtttcactttcggcaaagctggggagatcttaaccaaacggctcagatacatggtttttcgctcaatgttaagacaggacgttagctggttcgatgaccccaaaaacacaacaggagccctcactacccggcttgccaacgatgccgcgcaggttaagggtgccattggctcccgcttggctgtcattacccaaaatatcgctaatctgggcacaggaattattatcagcttcatatacgggtggcaactgaccctgttgttactcgccatcgtgcctattatcgctatcgctggcgtggtggagatgaaaatgctgtccggacaagccctgaaagataagaaggaactggagggctccggaaaaattgctacggaagcgatagaaaacttcaggacagtcgttagtttaactcaggaacagaagtttgaacatatgtacgctcagagcctccaggtcccataccggaatagcctgcggaaagcacacatctttggtattacgtttagtttcacccaggccatgatgtatttctcgtacgctggttgtttccggttcggcgcttatctggtcgcacataaactcatgtcctttgaagatgtgcttctcgtgttcagcgctgtggttttcggcgcgatggccgtcggccaggtttcttcttttgccccagattacgccaaggccaaaattagcgcagcccacatcatcatgatcattgaaaaaaccccacttattgatagttactcaacagaaggattgatgcccaacaccctggaaggaaatgttacttttggggaagtagttttcaactatcctaccaggcctgatatccccgtcctccaggggctgagcctcgaggtgaagaaaggccagacgctggcactggtgggctcgagtgggtgcgggaagagcacggtggtccaactacttgagcgattctacgatccacttgctgggaaagtacttctggacggaaaggaaatcaaacgactaaacgtgcagtggctcagagcccacctgggaatcgtgtcacaagaaccgatactatttgattgttccatagcagagaatatcgcatatggcgacaattctcgggtggtctcacaggaggaaatcgtacgggcggcaaaggaagctaatatccatgcctttatcgaatcccttccaaacaaatactccacaaaggtgggcgacaaaggtacccaactctctggtggccaaaaacagcgaattgcaatcgcacgggccctggtaagacagccccacatcctcctcctggatgaagctacttcagccctggacactgaatctgagaaagtggtgcaagaggcattagataaagccagagagggccggacgtgtatagttattgcacaccgtctgtcaacaattcagaatgccgacctcatcgtagtgtttcagaatggcagagtcaaagagcatgggacccaccagcagctcctcgcccagaaggggatttatttttccatggtctctgtccaggccgggaccaaaagacagtag

SEQ ID NO: 17200 - DNA, 3651 bp, Artificial Sequence
  derived and/or modified sequence
atggacctggagggcgaccggaacggcggcgccaagaagaagaactttttcaagcttaataacaagtccgagaaagacaaaaaagagaaaaagccaaccgtgagcgtcttctctatgttcaggtatagcaattggttggacaagctctatatggtggtcggaacactcgcagccatcatccacggcgccggccttcctctgatgatgttggtgttcggcgaaatgaccgatatctttgctaacgcaggaaacttagaggacttaatgtccaatattacaaatagatccgatatcaacgacaccgggttcttcatgaatcttgaagaggacatgactagtgacgtgagcaagatcaacgagggtatcggcgacaaaatcgggatgttcttccagagtatggccaccttcttcacggggttcattgttggctttacccgggggtggaagcttactttggtcatactggctatttcgcctgttttgggtctgagtgccgccgtgtgggcaaaaatcctgagcagcttcaccgataaggagctgctcgcctacgccaaagcaggggctgttgccgaagaggtgcttgccgcaatcagaaccgtcatcgctttcggcgggcagaagaaggagctcgagcgttataacaaaaacctagaggaagctaaacggatcggaatcaaaaaggcaatcaccgcaaacatatctattggggccgcatttctgttgatatacgctagctacgcgttagctttttggtacggcacgactttggtcttaagcggcgaatattccataggccaggtgcttacagtgtttttctcagtgctgattggcgcctttagcgtaggccaggcctcaccctcgatcgaggctttcgccaacgcaagaggagccgcttatgagatcttcaaaatcatcgataataaaccgtcaattgactcatactccaaatccggacacaagccagataacatcaaagggaacctcgaatttagaaacgtacatttttcatacccatcccgcaaagaagtcaagattttaaaaggcctgaacctaaaggtccagtccggccagacggtggcgctggtcggcaactcagggtgcggcaagagcactactgtgcaactgatgcagcggctgtatgaccccaccgaggggatggtgtctgttgacgggcaagatatccggacaatcaatgtcagattcttaagagagatcattggcgtcgtgtctcaggaaccagtgctgtttgctaccacgatagccgagaatataaggtatggaagggaaaacgtgacaatggatgaaatcgagaaggctgttaaggaggcgaacgcgtacgactttatcatgaagctgccacacaaatttgataccctagttggcgagcgcggcgcacaactctccgggggacaaaaacagcggatcgcaatagccagagccctcgtcagaaatcccaagatactgctcctcgatgaggccacatctgccctggataccgaaagtgaagctgtggtgcaggtggcgcttgataaggcacggaagggacgaaccaccattgtgatcgcacaccgcttaagcaccgtacgcaatgccgacgtgatcgccgggttcgacgatggcgtgatcgtagaaaagggaaaccatgatgagttaatgaaggagaaaggcatttattttaagctggtcaccatgcagacggccggtaatgaggtcgaactggagaacgccgcagacgaatctaagtcagagatcgatgccctcgagatgtcttccaatgattccagaagctcactaattaggaaacgctccactagacgttccgtgcggggtagccaggctcaggacaggaagctgtccaccaaggaagcactggatgagtcaattccacctgtgagcttctggcggatcatgaagctcaacctgaccgagtggccttactttgtggtgggcgtattttgtgcaattatcaatgggggcctgcagccagcttttgcaattatcttttctaaaataatcggcgtgttcaccaggatcgacgaccctgagactaagaggcagaactctaacttattttccctcctatttttggctctcgggataatcagttttattacattttttctgcaaggtttcacttttggcaaggcaggggaaatcctcaccaagcgcctgagatacatggtgtttcggagcatgttgagacaggatgtgtcctggtttgacgacccgaagaataccaccggcgccctgacaaccaggctggccaacgacgccgcccaggtcaagggtgcaattggctctcgcctcgcagtcataacacagaacatcgcgaacctcggtacaggcatcattatttcttttatatacgggtggcagctcaccttactattgctggccatcgtccctatcattgctatagccggagtggtggaaatgaagatgttgagcggacaagctttaaaggacaagaaggagctcgaaggttcgggaaaaatcgctaccgaagccatcgaaaacttcagaaccgtcgtatctctgactcaggagcaaaagttcgagcacatgtacgcccagagtttgcaggtgccctacagaaattccctccgcaaggctcatatctttgggatcaccttcagtttcacccaggccatgatgtatttctcatacgcagggtgcttccgtttcggtgcgtatctggtggcccacaagttgatgtccttcgaagacgtgctgctggttttttccgccgtggtgttcggagccatggccgtgggacaagtttcttccttcgcgcccgactacgcaaaagcaaagatcagcgccgctcatattattatgattattgagaagacaccgctcatcgatagctactcaacagagggcctaatgccaaacacattggaagggaacgtgacattcggagaggtagtctttaactaccccacccggccggatatccccgtcctgcagggactctcactggaagtaaagaaagggcaaacgttggcactggttgggagttctggatgtggaaagtcaaccgttgtgcagttgctcgaacggttctatgacccgttggcaggaaaagtactgctggacggcaaagagatcaagcgcctgaatgtccagtggctgagagcgcacctgggaatcgtgtcacaggaacctatactgttcgactgctcaatcgctgaaaatattgcgtatggcgataactctcgcgtggtgagtcaggaggagatcgtgagggccgctaaagaggctaatatccacgccttcatagagtcactgcccaataaatattcaactaaagtgggagacaaggggactcaattgagcggaggccagaaacagcggattgctattgccagggccctggttaggcagccgcacattctcctcctcgatgaggctaccagtgccctggacaccgagtccgaaaaagtggtgcaggaagcgctagataaggctagggaagggcggacttgcatcgtgatcgcacaccggctttcaacgatccagaacgctgatctgatcgtggtgttccagaatggcagagtcaaggagcacggcactcatcaacagttgctggcccagaaaggtatatacttcagcatggtttcagtccaggcagggacgaagcgacagtag

SEQ ID NO: 17201 - DNA, 3843 bp, Artificial Sequence
  derived and/or modified sequence
atggacctcgagggcgatcgaaatgggggagcgaagaagaagaatttcttcaaactaaataataagtcagagaaagacaaaaaggaaaagaagcccactgtgtccgtgttctcgatgttcagatattctaactggctggacaagctgtatatggtcgtgggaaccctggcggcaattatacacggagccggactgccactgatgatgctcgtcttcggcgaaatgactgacatcttcgccaatgctgggaatttggaagacttaatgtcaaacattacaaataggtccgacatcaatgatactgggttctttatgaacttggaagaggacatgacacgttacgcctactactactctggaattggagccggtgtgctcgttgctgcctacattcaggtgagtttttggtgcctcgccgctgggcgtcagattcacaagatacgcaaacaatttttccacgcaattatgcgtcaggagattgggtggttcgacgtgcatgacgtgggtgagctgaacaccaggctgactgatgacgtttcaaaaatcaacgaagggataggcgacaagattggcatgttcttccaaagtatggccaccttttttacaggattcatagtgggatttacccgtggctggaaactgaccctggtaatcctcgccattagtccagtgctggggctgagcgccgctgtgtgggccaagatcctgagtagtttcaccgataaagaactgctagcctatgctaaagccggtgcagtcgctgaggaggtcttggctgcgattcgcacagtgatcgcattcgggggtcagaaaaaagaacttgaacgctacaacaaaaatctggaggaagccaaacggatcggaatcaagaaggccatcaccgccaacatcagcattggcgcagcatttctgctcatttatgccagttatgcccttgcattttggtatggaacaaccctggtcctcagcggtgagtattctataggccaggtgctgacagtgtttttctctgttctgattggcgcttttagcgtcggccaggcatcccctagtatagaggcattcgccaatgccagaggagctgcctacgagatattcaagataattgataacaagcccagtatcgactcgtattcaaaatctggacacaaacccgacaatatcaaggggaatcttgagttccgcaatgtccacttttcttaccccagcaggaaagaagtgaagatcctgaaagggctaaacctgaaagtccagtccggccagaccgtggctctggttggcaactccggctgtggcaagagtactacagtacaactcatgcagaggctctatgatcctacagagggaatggtctccgtcgacggacaagacatccgcacaattaacgtgaggttcctgcgcgaaattatcggtgtggtgagtcaggagccagtgctcttcgctactaccatcgccgaaaacatcagatacggaagggagaacgtcacgatggatgagattgagaaggccgtgaaggaggctaatgcttacgatttcatcatgaaattgccacataagttcgataccctcgtgggagagcgcggtgcccagctgtctgggggacagaaacagcgcatcgctattgccagagccctggtgcgaaacccaaagatcctgctgcttgacgaagctacctcagcactggacaccgaatctgaggccgtcgtccaggttgctctggataaagcgcgaaagggtagaaccaccatcgtgattgcccataggctgagcactgtcagaaacgctgatgtcattgccggtttcgacgatggggtgattgtggagaaaggaaaccacgacgagctaatgaaagagaagggaatttatttcaagctggtgacgatgcagaccgcaggtaatgaagtagagctcgagaacgcagccgatgagtccaaaagcgaaattgacgcccttgagatgtccagtaatgatagccgttcatccttaattaggaagaggagcaccaggcggtctgtccgcggaagccaggcccaggaccgcaaactgtcaaccaaggaggccctggacgagtctattccaccagtgtctttctggagaattatgaagctcaatctgactgagtggccgtactttgtagtgggagtattttgcgctatcatcaatggtgggctgcagcccgcttttgcgatcatcttttctaagataatcggcgtgttcacacggattgatgatccggagaccaagaggcaaaattccaacttgttttctctgctcttcctggccctgggaatcatcagcttcatcacatttttcctgcagggattcacgtttgggaaggccggagagattctaacgaaaagattacggtacatggtgttcaggtccatgttacgtcaggacgtatcctggttcgacgatcccaagaacacgaccggcgctctcacgactaggcttgctaatgatgcagcgcaggtgaaaggggcaataggtagtaggcttgccgtgatcacccagaacatcgctaaccttgggaccgggataatcattagcttcatttacggctggcaactgaccctcctgttattggcaatcgtgcccatcatcgctatagctggcgtagtcgaaatgaagatgctgagtggtcaggctcttaaggataaaaaagagctggagggcagcggaaaaatagcaactgaggctattgaaaatttccggacggtggtgagcttgactcaggagcagaagttcgagcatatgtacgctcagtccttacaggtgccctacaggaattccctgagaaaagcccacatttttggcatcacattttccttcacccaggccatgatgtacttcagctatgcagggtgttttaggtttggggcttacctggtcgcccacaagctcatgagtttcgaggacgtgttactcgtcttctctgcagtagtatttggcgctatggcagtcgggcaggtatcttccttcgctccagactacgctaaagccaaaatctccgcagcccacattatcatgattattgaaaaaactcccctcatcgattcttacagtaccgagggcttgatgccgaatacgcttgaaggcaacgtgacctttggcgaagttgtctttaattaccccacccgccctgatatacctgtccttcagggtctgtcccttgaagtaaagaaaggccagaccctcgccctcgttggctcgtccggctgtggtaagtcaaccgtggtgcagctattagagcgcttctatgatccactcgcaggaaaggtactcctggatggcaaggagatcaagcgcttgaacgtgcaatggttaagagcccacctggggattgtgagccaggagccaattctcttcgattgttctattgctgaaaacatcgcttatggggataacagtcgggtggtcagtcaggaagaaatcgtgcgagctgccaaggaggctaatatccatgcttttatcgaaagcttgcccaacaaatacagcacaaaggtgggcgacaaaggaacgcagctctcaggaggacagaagcagaggatagcaatagcaagggcactcgttaggcagccccacatcttgctgctggacgaagccaccagtgcccttgacactgaaagcgagaaggtagttcaggaggctctcgacaaggcgagagaaggacggacttgcattgtcattgcacacaggttatccaccatacaaaacgcggatctaatagttgtgtttcagaatggtcgcgtgaaagagcatggtactcatcagcagctgctcgcccaaaagggaatctacttctccatggtgtcagtgcaggccggaacaaagcgccagtag

SEQ ID NO: 17202 - DNA, 69 bp, Artificial Sequence
  derived and/or modified sequence
atggacctggagggcgaccgtaacgggggtgcaaaaaaaaagaacttcttcaaacttaacaataaatag

SEQ ID NO: 17203 - DNA, 147 bp, Artificial Sequence
  derived and/or modified sequence
atggacttagaaggagatcgaaacgggggagctaagaaaaaaaacttctttaagcttaacaacaaatccgagaaggataagaaggagaagaaaccaaccgtctctgtgttctctatgtttaggtactccaattggttagacaaatag

SEQ ID NO: 17204 - DNA, 3186 bp, Artificial Sequence
  derived and/or modified sequence
gccctgagcccagtgatgggcgtgtcggctggttactggcctaagatcctatccagtttcacagacaaggaactgctcgcttacgccaaggccggagctgtcgccgaagaggttctggcagcaatccgcacagttatcgcctttggcggacaaaagaaagaactggagcgatacaacaagaatcttgaagaggctaaacgaattgggataaagaaagccattactgccaatatatcaattggggcagcttttctcttaatctatgcctcctacgctctcgcgttttggtacggaactacacttgtgctttctggcgagtactcaatcggccaagtcttgaccgtgttcttttccgtgctcatcggcgctttctccgtaggacaagctagccccagtatcgaagcatttgccaatgcaagaggtgccgcttacgagatcttcaaaattatcgataataaaccatcaattgatagctattcgaagtccggacacaaaccagataacattaaaggtaacctcgaattccggaacgtccatttctcctatccctcgagaaaggaggtgaagatactgaagggtctgaatctcaaggttcagtccggccagacagtagcactcgtaggtaacagcgggtgcggcaaatcaacaaccgtgcagctcatgcagagactttacgacccgacagagggcatggtctcagtggacggacaggacattcgcaccattaatgtccgattcctgcgtgagatcatcggagtggtgtcacaagaaccggtgctttttgccactacaatagcagagaatattcgatatggcagagagaatgtaaccatggatgaaattgagaaggccgtgaaggaagccaacgcatatgatttcatcatgaaactccctcacaaattcgataccctggtaggagagcggggtgcccaactgagcggcggtcaaaagcagaggatcgccatcgcaagggctctggtgcggaatcctaagatcctcttgctcgacgaggccaccagtgcactggatacggaatcagaagcagtagttcaagttgccctcgacaaggccagaaaaggaagaacgacgatcgtgattgcccaccgccttagtacagtccgtaatgctgacgttatcgctgggtttgatgacggagtaatcgtcgaaaagggaaatcacgacgaacttatgaaagagaaggggatctattttaagctggttacaatgcagacggccggtaacgaagttgagttagaaaacgccgcagacgaatccaaaagtgaaatcgacgctctggaaatgtcatctaacgatagcagaagttcactcatcagaaagcgtagtaccaggagatccgttcgaggatcccaggcccaggaccgcaagctgtcaacaaaagaagcactggatgaaagtattcctcccgtctcattctggcgaataatgaagctcaatcttacagaatggccttactttgtagtgggtgttttctgtgcgataattaatggagggcttcagccggcattcgccataattttttctaaaattatcggggtatttactcggattgatgatccggagacaaagagacaaaattccaatttatttagccttctatttctagccctgggcattatttcttttattacttttttcctgcagggcttcactttcggtaaggcaggggagattctgactaagagactgcgctacatggtgtttcgcagcatgctgaggcaggacgtcagctggttcgacgatcctaaaaatacgactggcgctctgactacaaggctcgccaacgacgcggctcaggtcaagggggctatcggtagccgtctcgccgtaattactcagaatatcgcgaacctgggcaccggtatcatcatctcttttatttacggttggcagctgaccctgctccttctggccatcgtccccataatcgctatagctggcgttgtagagatgaagatgctgtccgggcaggccctgaaagacaaaaaggagcttgaagggtccggaaagattgccacagaagcgatcgaaaattttcgcacagtggtgtctctgacacaagagcagaaattcgaacacatgtatgcgcagtctctgcaggtgccctacagaaacagcctgcggaaagctcacatctttggcattacgttttccttcacccaagctatgatgtactttagttacgcaggttgcttccgtttcggggcttatctggtagcgcacaaactgatgtcttttgaggatgtgttgctcgtcttctctgcagttgtgttcggggctatggcagtgggacaggtttcttcattcgcacctgactatgctaaggccaagatcagtgccgcacatatcatcatgatcatcgagaagacccctctgattgattcctactctactgaaggtcttatgcctaacactttagaggggaacgttacatttggtgaagtggtcttcaattaccccacaaggcctgatattccagttctgcagggcctgtctctggaagttaaaaagggccaaaccctggccctagtcggaagctctggttgcggcaagtcgacagtggtgcagctcctcgagaggttctacgacccgttggcagggaaggtcttgttggacggcaaagaaatcaagagactgaacgtccagtggctccgagcccacctcgggattgtgtctcaagagccaattttgttcgactgcagcatcgcagaaaacatagcctacggtgacaacagtcgggtcgtctcgcaagaggaaattgtaagagcagccaaggaggctaatatccacgcattcatcgaatccctgcctaacaaatactcaaccaaagtgggcgataaagggactcaactgtccggagggcagaagcagcgaatcgctattgcaagagcgctcgtaagacagccacacatcttactgctggacgaagccactagcgccttggatacagaatccgaaaaagtggtccaggaggccctcgacaaagccagggaaggtaggacgtgcatcgtgatagcccatcgtctaagcaccatccagaatgccgacctgatagtcgtgtttcaaaacggtagagttaaggagcacggcacacaccagcagctccttgcacagaagggcatttacttctccatggtctcagtgcaagcgggtaccaagaggcagtag

SEQ ID NO: 17205 - DNA, 3651 bp, Artificial Sequence
  derived and/or modified sequence
atggatctggaaggagatcgcaatggcggtgcgaaaaagaaaaattttttcaagttaaacaataagtcggaaaaggacaaaaaggaaaaaaagcctaccgtctcagtcttcagcatgttcagatactctaattggctcgacaaattgtacatggtcgtgggtactctggccgctatcatccatggagccggtctccctcttatgatgcttgtgtttggagagatgaccgacatattcgccaatgccggaaacctcgaagacctgatgagcaacatcacaaatcgaagcgatatcaacgacacaggcttctttatgaatttggaagaagacatgacatccgatgtcagcaagataaatgagggaatcggcgataaaattggtatgttctttcagtctatggccaccttttttaccggctttatagtagggttcaccaggggctggaaactgaccctcgtgatattggccatctctcccgtgctagggctatctgctgccgtgtgggctaaaatactgtccagtttcaccgacaaggagcttctcgcttatgctaaggcaggagctgtggctgaggaagtactggccgctattcgaaccgtcatagcttttggcggacaaaagaaggagctggaacggtacaataagaatctggaagaagccaagcgtatcggaattaaaaaggccattacagccaacatctctattggtgccgctttccttcttatttacgcatcctacgccttagcattttggtatggaacaacccttgtattgagtggtgaatactctatcggccaagtcctcaccgttttcttttctgtgctgatcggcgcattctcagtcgggcaggcttccccaagtattgaggccttcgctaatgcccgaggcgctgcgtacgaaatcttcaagataattgataacaagcccagtattgactcttattctaaatccggacacaagcctgacaatatcaagggcaatctggagtttcgaaatgtgcatttcagttacccaagtaggaaagaagtgaaaattctgaaaggacttaaccttaaagtccaatcagggcagactgtggctttagtcggaaactctggttgcggcaagagcaccacagttcagcttatgcaaagattatatgaccctaccgagggaatggtctcggtcgatggtcaagacatccgcaccatcaatgtgaggttcctgagggaaatcattggcgtggtttcacaggagcccgttctgtttgccactaccatcgccgagaatatccgctacggaagggagaatgtcactatggacgagatagaaaaggcagtgaaagaggctaacgcgtatgattttatcatgaagctgccccacaaatttgacacacttgtgggggagcgaggtgcccagctctccgggggacagaaacagcggattgctattgccagggcactcgttcgcaaccctaagatactcctgctggatgaggctacctcagctttggacaccgagagtgaagctgtggttcaagtggctctggataaggctcgtaaaggcagaactacaattgtgatagctcatagactgtcaactgttaggaatgccgacgtgatcgctgggttcgatgatggggtgatagtggaaaaaggtaaccatgatgagcttatgaaagaaaagggtatttacttcaaactggtgaccatgcagacggcgggaaatgaggttgagctagaaaacgccgctgacgagtccaaaagtgagatcgacgccttggagatgagctcaaacgatagcagatcctctctgataaggaagagatctacaagaaggagcgtgaggggcagccaggcacaggatcgtaagttgtccactaaggaggccctggacgaaagtatcccaccagtgtcattctggagaattatgaaattgaatctaacagagtggccttatttcgttgttggcgtcttctgtgctattattaacggaggtctacagcccgcattcgctatcatatttagcaaaattatcggtgtgtttacccggattgatgaccctgaaaccaaaagacagaacagtaacctatttagtttgctgttcttggcactaggcataataagttttatcacgtttttcctccagggcttcacctttggaaaggctggcgagatactgactaagaggttacgctacatggtttttagaagcatgctgcggcaggatgtctcctggtttgacgatcctaaaaacacaaccggggctctcacaacgaggttggctaatgatgccgctcaggttaagggggctatcggatctaggctggccgtgatcacacaaaatattgccaatctgggtaccggcattatcatctctttcatctacgggtggcagctgaccctgctgctactggccatcgtccctataatcgccatcgctggtgtggtcgagatgaagatgctgtcaggccaggcgctcaaggacaagaaggaactcgagggaagcggcaagatagccaccgaggccatcgaaaatttccggaccgtggtttcactgactcaggagcaaaaattcgagcatatgtacgctcagtcgctgcaggtcccttatcgcaattcccttcggaaagcacacatttttggtatcacattttcattcacccaagctatgatgtatttcagctatgccggttgtttcagattcggggcatatcttgttgctcacaagctgatgagctttgaggatgtcctccttgtcttttcagctgtggtattcggagccatggccgtcgggcaggtatcgagtttcgcaccagactatgctaaagcgaaaatcagcgccgcacatattatcatgataatagagaagacccccttgattgacagttattctacagaaggccttatgcctaataccctcgaaggcaacgtaaccttcggggaagtggtattcaactaccctactagacccgatatccccgtgctgcagggattgtctctagaagttaagaaaggccagacgctcgccttggtgggctcctccgggtgtggtaaaagcaccgtggtgcagctgctggagaggttctatgatccacttgccggaaaggtgttgctcgatggaaaggagattaagaggctgaatgtgcagtggttacgggctcatctgggcattgtcagccaagagcccatactgttcgactgtagtatagccgaaaatattgcatacggcgacaactctagggtggttagccaggaagagattgtacgggcagctaaggaggctaatatacacgcctttatagagtcactgccaaacaagtactcaacgaaggtgggagataaaggaactcagctatccggtggacaaaaacagagaattgcaatagctagggcgttggtccgacaaccccacattctccttctggacgaggcaacgagcgcccttgacactgaatccgagaaagtagtccaggaagctctggacaaggccagagaagggcgtacttgcatcgttatcgcccaccgcctgagtacaatccaaaacgccgatctcatcgtcgttttccagaacggccgagtaaaagaacacgggacccaccaacagctgctggcccagaagggcatctacttttccatggtgtctgtgcaggccggaacgaagaggcaatag

SEQ ID NO: 17206 - DNA, 4645 bp, Artificial Sequence
  derived and/or modified sequence
tattcagatattctccagattcctaaagattagagatcatttctcattctcctaggagtactcacttcaggaagcaaccagataaaagagaggtgcaacggaagccagaacattcctcctggaaattcaacctgtttcgcagtttctcgaggaatcagcattcagtcaatccgggccgggagcagtcatctgtggtgaggctgattggctgggcaggaacagcgccggggcgtgggctgagcacagccgcttcgctctctttgccacaggaagcctgagctcattcgagtagcggctcttccaagctcaaagaagcagaggccgctgttcgtttcctttaggtctttccactaaagtcggagtatcttcttccaaaatttcacgtcttggtggccgttccaaggagcgcgaggtcggaatggatcttgaaggggaccgcaatggaggagcaaagaagaagaacttttttaaactgaacaataaaagtgaaaaagataagaaggaaaagaaaccaactgtcagtgtattttcaatgtttcgctattcaaattggcttgacaagttgtatatggtggtgggaactttggctgccatcatccatggggctggacttcctctcatgatgctggtgtttggagaaatgacagatatctttgcaaatgcaggaaatttagaagatctgatgtcaaacatcactaatagaagtgatatcaatgatacagggttcttcatgaatctggaggaagacatgaccaggtatgcctattattacagtggaattggtgctggggtgctggttgctgcttacattcaggtttcattttggtgcctggcagctggaagacaaatacacaaaattagaaaacagttttttcatgctataatgcgacaggagataggctggtttgatgtgcacgatgttggggagcttaacacccgacttacagatgatgtctccaagattaatgaaggaattggtgacaaaattggaatgttctttcagtcaatggcaacatttttcactgggtttatagtaggatttacacgtggttggaagctaacccttgtgattttggccatcagtcctgttcttggactgtcagctgctgtctgggcaaagatactatcttcatttactgataaagaactcttagcgtatgcaaaagctggagcagtagctgaagaggtcttggcagcaattagaactgtgattgcatttggaggacaaaagaaagaacttgaaaggtacaacaaaaatttagaagaagctaaaagaattgggataaagaaagctattacagccaatatttctataggtgctgctttcctgctgatctatgcatcttatgctctggccttctggtatgggaccaccttggtcctctcaggggaatattctattggacaagtactcactgtattcttttctgtattaattggggcttttagtgttggacaggcatctccaagcattgaagcatttgcaaatgcaagaggagcagcttatgaaatcttcaagataattgataataagccaagtattgacagctattcgaagagtgggcacaaaccagataatattaagggaaatttggaattcagaaatgttcacttcagttacccatctcgaaaagaagttaagatcttgaagggtctgaacctgaaggtgcagagtgggcagacggtggccctggttggaaacagtggctgtgggaagagcacaacagtccagctgatgcagaggctctatgaccccacagaggggatggtcagtgttgatggacaggatattaggaccataaatgtaaggtttctacgggaaatcattggtgtggtgagtcaggaacctgtattgtttgccaccacgatagctgaaaacattcgctatggccgtgaaaatgtcaccatggatgagattgagaaagctgtcaaggaagccaatgcctatgactttatcatgaaactgcctcataaatttgacaccctggttggagagagaggggcccagttgagtggtgggcagaagcagaggatcgccattgcacgtgccctggttcgcaaccccaagatcctcctgctggatgaggccacgtcagccttggacacagaaagcgaagcagtggttcaggtggctctggataaggccagaaaaggtcggaccaccattgtgatagctcatcgtttgtctacagttcgtaatgctgacgtcatcgctggtttcgatgatggagtcattgtggagaaaggaaatcatgatgaactcatgaaagagaaaggcatttacttcaaacttgtcacaatgcagacagcaggaaatgaagttgaattagaaaatgcagctgatgaatccaaaagtgaaattgatgccttggaaatgtcttcaaatgattcaagatccagtctaataagaaaaagatcaactcgtaggagtgtccgtggatcacaagcccaagacagaaagcttagtaccaaagaggctctggatgaaagtatacctccagtttccttttggaggattatgaagctaaatttaactgaatggccttattttgttgttggtgtattttgtgccattataaatggaggcctgcaaccagcatttgcaataatattttcaaagattataggggtttttacaagaattgatgatcctgaaacaaaacgacagaatagtaacttgttttcactattgtttctagcccttggaattatttcttttattacatttttccttcagggtttcacatttggcaaagctggagagatcctcaccaagcggctccgatacatggttttccgatccatgctcagacaggatgtgagttggtttgatgaccctaaaaacaccactggagcattgactaccaggctcgccaatgatgctgctcaagttaaaggggctataggttccaggcttgctgtaattacccagaatatagcaaatcttgggacaggaataattatatccttcatctatggttggcaactaacactgttactcttagcaattgtacccatcattgcaatagcaggagttgttgaaatgaaaatgttgtctggacaagcactgaaagataagaaagaactagaaggttctgggaagatcgctactgaagcaatagaaaacttccgaaccgttgtttctttgactcaggagcagaagtttgaacatatgtatgctcagagtttgcaggtaccatacagaaactctttgaggaaagcacacatctttggaattacattttccttcacccaggcaatgatgtatttttcctatgctggatgtttccggtttggagcctacttggtggcacataaactcatgagctttgaggatgttctgttagtattttcagctgttgtctttggtgccatggccgtggggcaagtcagttcatttgctcctgactatgccaaagccaaaatatcagcagcccacatcatcatgatcattgaaaaaacccctttgattgacagctacagcacggaaggcctaatgccgaacacattggaaggaaatgtcacatttggtgaagttgtattcaactatcccacccgaccggacatcccagtgcttcagggactgagcctggaggtgaagaagggccagacgctggctctggtgggcagcagtggctgtgggaagagcacagtggtccagctcctggagcggttctacgaccccttggcagggaaagtgctgcttgatggcaaagaaataaagcgactgaatgttcagtggctccgagcacacctgggcatcgtgtcccaggagcccatcctgtttgactgcagcattgctgagaacattgcctatggagacaacagccgggtggtgtcacaggaagagattgtgagggcagcaaaggaggccaacatacatgccttcatcgagtcactgcctaataaatatagcactaaagtaggagacaaaggaactcagctctctggtggccagaaacaacgcattgccatagctcgtgcccttgttagacagcctcatattttgcttttggatgaagccacgtcagctctggatacagaaagtgaaaaggttgtccaagaagccctggacaaagccagagaaggccgcacctgcattgtgattgctcaccgcctgtccaccatccagaatgcagacttaatagtggtgtttcagaatggcagagtcaaggagcatggcacgcatcagcagctgctggcacagaaaggcatctatttttcaatggtcagtgtccaggctggaacaaagcgccagtgaactctgactgtatgagatgttaaatactttttaatatttgtttagatatgacatttattcaaagttaaaagcaaacacttacagaattatgaagaggtatctgtttaacatttcctcagtcaagttcagagtcttcagagacttcgtaattaaaggaacagagtgagagacatcatcaagtggagagaaatcatagtttaaactgcattataaattttataacagaattaaagtagattttaaaagataaaatgtgtaattttgtttatattttcccatttggactgtaactgactgccttgctaaaagattatagaagtagcaaaaagtattgaaatgtttgcataaagtgtctataataaaactaaactttcatgtgactgg

SEQ ID NO: 17207 - DNA, 461 bp, Artificial Sequence
  derived and/or modified sequence
tcattactctttacctgtgaagagtagaacatgaagaaatctactttattcagatattctccagattcctaaagattagagatcatttctcattctcctaggagtactcacttcaggaagcaaccagataaaagagaggtgcaacggaagccagaacattcctcctggaaattcaacctgtttcgcagtttctcgaggaatcagcattcagtcaatccgggccgggagcagtcatctgtggtctttccactaaagtcggagtatcttcttccaaaatttcacgtcttggtggccgttccaaggagcgcgaggtcggaatggatcttgaaggggaccgcaatggaggagcaaagaagaagaacttttttaaactgaacaataaaagtgaaaaagataagaaggaaaagaaaccaactgtcagtgtattttcaatgtttcgctattcaaattggcttgacaag

SEQ ID NO: 17208 - DNA, 3797 bp, Artificial Sequence
  derived and/or modified sequence
gctctctctcctgtcatgggtgtaagtgcaggatactggcccaaaatactatcttcatttactgataaagaactcttagcgtatgcaaaagctggagcagtagctgaagaggtcttggcagcaattagaactgtgattgcatttggaggacaaaagaaagaacttgaaaggtacaacaaaaatttagaagaagctaaaagaattgggataaagaaagctattacagccaatatttctataggtgctgctttcctgctgatctatgcatcttatgctctggccttctggtatgggaccaccttggtcctctcaggggaatattctattggacaagtactcactgtattcttttctgtattaattggggcttttagtgttggacaggcatctccaagcattgaagcatttgcaaatgcaagaggagcagcttatgaaatcttcaagataattgataataagccaagtattgacagctattcgaagagtgggcacaaaccagataatattaagggaaatttggaattcagaaatgttcacttcagttacccatctcgaaaagaagttaagatcttgaagggtctgaacctgaaggtgcagagtgggcagacggtggccctggttggaaacagtggctgtgggaagagcacaacagtccagctgatgcagaggctctatgaccccacagaggggatggtcagtgttgatggacaggatattaggaccataaatgtaaggtttctacgggaaatcattggtgtggtgagtcaggaacctgtattgtttgccaccacgatagctgaaaacattcgctatggccgtgaaaatgtcaccatggatgagattgagaaagctgtcaaggaagccaatgcctatgactttatcatgaaactgcctcataaatttgacaccctggttggagagagaggggcccagttgagtggtgggcagaagcagaggatcgccattgcacgtgccctggttcgcaaccccaagatcctcctgctggatgaggccacgtcagccttggacacagaaagcgaagcagtggttcaggtggctctggataaggccagaaaaggtcggaccaccattgtgatagctcatcgtttgtctacagttcgtaatgctgacgtcatcgctggtttcgatgatggagtcattgtggagaaaggaaatcatgatgaactcatgaaagagaaaggcatttacttcaaacttgtcacaatgcagacagcaggaaatgaagttgaattagaaaatgcagctgatgaatccaaaagtgaaattgatgccttggaaatgtcttcaaatgattcaagatccagtctaataagaaaaagatcaactcgtaggagtgtccgtggatcacaagcccaagacagaaagcttagtaccaaagaggctctggatgaaagtatacctccagtttccttttggaggattatgaagctaaatttaactgaatggccttattttgttgttggtgtattttgtgccattataaatggaggcctgcaaccagcatttgcaataatattttcaaagattataggggtttttacaagaattgatgatcctgaaacaaaacgacagaatagtaacttgttttcactattgtttctagcccttggaattatttcttttattacatttttccttcagggtttcacatttggcaaagctggagagatcctcaccaagcggctccgatacatggttttccgatccatgctcagacaggatgtgagttggtttgatgaccctaaaaacaccactggagcattgactaccaggctcgccaatgatgctgctcaagttaaaggggctataggttccaggcttgctgtaattacccagaatatagcaaatcttgggacaggaataattatatccttcatctatggttggcaactaacactgttactcttagcaattgtacccatcattgcaatagcaggagttgttgaaatgaaaatgttgtctggacaagcactgaaagataagaaagaactagaaggttctgggaagatcgctactgaagcaatagaaaacttccgaaccgttgtttctttgactcaggagcagaagtttgaacatatgtatgctcagagtttgcaggtaccatacagaaactctttgaggaaagcacacatctttggaattacattttccttcacccaggcaatgatgtatttttcctatgctggatgtttccggtttggagcctacttggtggcacataaactcatgagctttgaggatgttctgttagtattttcagctgttgtctttggtgccatggccgtggggcaagtcagttcatttgctcctgactatgccaaagccaaaatatcagcagcccacatcatcatgatcattgaaaaaacccctttgattgacagctacagcacggaaggcctaatgccgaacacattggaaggaaatgtcacatttggtgaagttgtattcaactatcccacccgaccggacatcccagtgcttcagggactgagcctggaggtgaagaagggccagacgctggctctggtgggcagcagtggctgtgggaagagcacagtggtccagctcctggagcggttctacgaccccttggcagggaaagtgctgcttgatggcaaagaaataaagcgactgaatgttcagtggctccgagcacacctgggcatcgtgtcccaggagcccatcctgtttgactgcagcattgctgagaacattgcctatggagacaacagccgggtggtgtcacaggaagagattgtgagggcagcaaaggaggccaacatacatgccttcatcgagtcactgcctaataaatatagcactaaagtaggagacaaaggaactcagctctctggtggccagaaacaacgcattgccatagctcgtgcccttgttagacagcctcatattttgcttttggatgaagccacgtcagctctggatacagaaagtgaaaaggttgtccaagaagccctggacaaagccagagaaggccgcacctgcattgtgattgctcaccgcctgtccaccatccagaatgcagacttaatagtggtgtttcagaatggcagagtcaaggagcatggcacgcatcagcagctgctggcacagaaaggcatctatttttcaatggtcagtgtccaggctggaacaaagcgccagtgaactctgactgtatgagatgttaaatactttttaatatttgtttagatatgacatttattcaaagttaaaagcaaacacttacagaattatgaagaggtatctgtttaacatttcctcagtcaagttcagagtcttcagagacttcgtaattaaaggaacagagtgagagacatcatcaagtggagagaaatcatagtttaaactgcattataaattttataacagaattaaagtagattttaaaagataaaatgtgtaattttgtttatattttcccatttggactgtaactgactgccttgctaaaagattatagaagtagcaaaaagtattgaaatgtttgcataaagtgtctataataaaactaaactttcatgtgactggagtcatcttgtccaaactgcctgtgaatatatcttctctcaattggaatattgtagataacttctgctttaaaaaagttttctttaaatatacctactcatttttgtgggaatggttaagcagtttaaataattcctgttgtatatgtctattcacattgggtcttacagaaccatctggcttcattcttcttggacttgatcctgctgattcttgcatttccacat

SEQ ID NO: 17209 - DNA, 3651 bp, Artificial Sequence
  derived and/or modified sequence
atggatcttgaaggggaccgcaatggaggagcaaagaagaagaacttttttaaactgaacaataaaagtgaaaaagataagaaggaaaagaaaccaactgtcagtgtattttcaatgtttcgctattcaaattggcttgacaagttgtatatggtggtgggaactttggctgccatcatccatggggctggacttcctctcatgatgctggtgtttggagaaatgacagatatctttgcaaatgcaggaaatttagaagatctgatgtcaaacatcactaatagaagtgatatcaatgatacagggttcttcatgaatctggaggaagacatgaccagtgatgtctccaagattaatgaaggaattggtgacaaaattggaatgttctttcagtcaatggcaacatttttcactgggtttatagtaggatttacacgtggttggaagctaacccttgtgattttggccatcagtcctgttcttggactgtcagctgctgtctgggcaaagatactatcttcatttactgataaagaactcttagcgtatgcaaaagctggagcagtagctgaagaggtcttggcagcaattagaactgtgattgcatttggaggacaaaagaaagaacttgaaaggtacaacaaaaatttagaagaagctaaaagaattgggataaagaaagctattacagccaatatttctataggtgctgctttcctgctgatctatgcatcttatgctctggccttctggtatgggaccaccttggtcctctcaggggaatattctattggacaagtactcactgtattcttttctgtattaattggggcttttagtgttggacaggcatctccaagcattgaagcatttgcaaatgcaagaggagcagcttatgaaatcttcaagataattgataataagccaagtattgacagctattcgaagagtgggcacaaaccagataatattaagggaaatttggaattcagaaatgttcacttcagttacccatctcgaaaagaagttaagatcttgaagggtctgaacctgaaggtgcagagtgggcagacggtggccctggttggaaacagtggctgtgggaagagcacaacagtccagctgatgcagaggctctatgaccccacagaggggatggtcagtgttgatggacaggatattaggaccataaatgtaaggtttctacgggaaatcattggtgtggtgagtcaggaacctgtattgtttgccaccacgatagctgaaaacattcgctatggccgtgaaaatgtcaccatggatgagattgagaaagctgtcaaggaagccaatgcctatgactttatcatgaaactgcctcataaatttgacaccctggttggagagagaggggcccagttgagtggtgggcagaagcagaggatcgccattgcacgtgccctggttcgcaaccccaagatcctcctgctggatgaggccacgtcagccttggacacagaaagcgaagcagtggttcaggtggctctggataaggccagaaaaggtcggaccaccattgtgatagctcatcgtttgtctacagttcgtaatgctgacgtcatcgctggtttcgatgatggagtcattgtggagaaaggaaatcatgatgaactcatgaaagagaaaggcatttacttcaaacttgtcacaatgcagacagcaggaaatgaagttgaattagaaaatgcagctgatgaatccaaaagtgaaattgatgccttggaaatgtcttcaaatgattcaagatccagtctaataagaaaaagatcaactcgtaggagtgtccgtggatcacaagcccaagacagaaagcttagtaccaaagaggctctggatgaaagtatacctccagtttccttttggaggattatgaagctaaatttaactgaatggccttattttgttgttggtgtattttgtgccattataaatggaggcctgcaaccagcatttgcaataatattttcaaagattataggggtttttacaagaattgatgatcctgaaacaaaacgacagaatagtaacttgttttcactattgtttctagcccttggaattatttcttttattacatttttccttcagggtttcacatttggcaaagctggagagatcctcaccaagcggctccgatacatggttttccgatccatgctcagacaggatgtgagttggtttgatgaccctaaaaacaccactggagcattgactaccaggctcgccaatgatgctgctcaagttaaaggggctataggttccaggcttgctgtaattacccagaatatagcaaatcttgggacaggaataattatatccttcatctatggttggcaactaacactgttactcttagcaattgtacccatcattgcaatagcaggagttgttgaaatgaaaatgttgtctggacaagcactgaaagataagaaagaactagaaggttctgggaagatcgctactgaagcaatagaaaacttccgaaccgttgtttctttgactcaggagcagaagtttgaacatatgtatgctcagagtttgcaggtaccatacagaaactctttgaggaaagcacacatctttggaattacattttccttcacccaggcaatgatgtatttttcctatgctggatgtttccggtttggagcctacttggtggcacataaactcatgagctttgaggatgttctgttagtattttcagctgttgtctttggtgccatggccgtggggcaagtcagttcatttgctcctgactatgccaaagccaaaatatcagcagcccacatcatcatgatcattgaaaaaacccctttgattgacagctacagcacggaaggcctaatgccgaacacattggaaggaaatgtcacatttggtgaagttgtattcaactatcccacccgaccggacatcccagtgcttcagggactgagcctggaggtgaagaagggccagacgctggctctggtgggcagcagtggctgtgggaagagcacagtggtccagctcctggagcggttctacgaccccttggcagggaaagtgctgcttgatggcaaagaaataaagcgactgaatgttcagtggctccgagcacacctgggcatcgtgtcccaggagcccatcctgtttgactgcagcattgctgagaacattgcctatggagacaacagccgggtggtgtcacaggaagagattgtgagggcagcaaaggaggccaacatacatgccttcatcgagtcactgcctaataaatatagcactaaagtaggagacaaaggaactcagctctctggtggccagaaacaacgcattgccatagctcgtgcccttgttagacagcctcatattttgcttttggatgaagccacgtcagctctggatacagaaagtgaaaaggttgtccaagaagccctggacaaagccagagaaggccgcacctgcattgtgattgctcaccgcctgtccaccatccagaatgcagacttaatagtggtgtttcagaatggcagagtcaaggagcatggcacgcatcagcagctgctggcacagaaaggcatctatttttcaatggtcagtgtccaggctggaacaaagcgccagtga

SEQ ID NO: 17210 - DNA, 3843 bp, Artificial Sequence
  derived and/or modified sequence
atggacctggagggcgacagaaacggcggcgccaagaagaagaacttcttcaagctgaacaacaagagcgagaaggacaagaaggagaagaagcccaccgtgagcgtgttcagcatgttcagatacagcaactggctggacaagctgtacatggtggtgggcaccctggccgccatcatccacggcgccggcctgcccctgatgatgctggtgttcggcgagatgaccgacatcttcgccaacgccggcaacctggaggacctgatgagcaacatcaccaacagaagcgacatcaacgacaccggcttcttcatgaacctggaggaggacatgaccagatacgcctactactacagcggcatcggcgccggcgtgctggtggccgcctacatccaggtgagcttctggtgcctggccgccggcagacagatccacaagatcagaaagcagttcttccacgccatcatgagacaggagatcggctggttcgacgtgcacgacgtgggcgagctgaacaccagactgaccgacgacgtgagcaagatcaacgagggcatcggcgacaagatcggcatgttcttccagagcatggccaccttcttcaccggcttcatcgtgggcttcaccagaggctggaagctgaccctggtgatcctggccatcagccccgtgctgggcctgagcgccgccgtgtgggccaagatcctgagcagcttcaccgacaaggagctgctggcctacgccaaggccggcgccgtggccgaggaggtgctggccgccatcagaaccgtgatcgccttcggcggccagaagaaggagctggagagatacaacaagaacctggaggaggccaagagaatcggcatcaagaaggccatcaccgccaacatcagcatcggcgccgccttcctgctgatctacgccagctacgccctggccttctggtacggcaccaccctggtgctgagcggcgagtacagcatcggccaggtgctgaccgtgttcttcagcgtgctgatcggcgccttcagcgtgggccaggccagccccagcatcgaggccttcgccaacgccagaggcgccgcctacgagatcttcaagatcatcgacaacaagcccagcatcgacagctacagcaagagcggccacaagcccgacaacatcaagggcaacctggagttcagaaacgtgcacttcagctaccccagcagaaaggaggtgaagatcctgaagggcctgaacctgaaggtgcagagcggccagaccgtggccctggtgggcaacagcggctgcggcaagagcaccaccgtgcagctgatgcagagactgtacgaccccaccgagggcatggtgagcgtggacggccaggacatcagaaccatcaacgtgagattcctgagagagatcatcggcgtggtgagccaggagcccgtgctgttcgccaccaccatcgccgagaacatcagatacggcagagagaacgtgaccatggacgagatcgagaaggccgtgaaggaggccaacgcctacgacttcatcatgaagctgccccacaagttcgacaccctggtgggcgagagaggcgcccagctgagcggcggccagaagcagagaatcgccatcgccagagccctggtgagaaaccccaagatcctgctgctggacgaggccaccagcgccctggacaccgagagcgaggccgtggtgcaggtggccctggacaaggccagaaagggcagaaccaccatcgtgatcgcccacagactgagcaccgtgagaaacgccgacgtgatcgccggcttcgacgacggcgtgatcgtggagaagggcaaccacgacgagctgatgaaggagaagggcatctacttcaagctggtgaccatgcagaccgccggcaacgaggtggagctggagaacgccgccgacgagagcaagagcgagatcgacgccctggagatgagcagcaacgacagcagaagcagcctgatcagaaagagaagcaccagaagaagcgtgagaggcagccaggcccaggacagaaagctgagcaccaaggaggccctggacgagagcatcccccccgtgagcttctggagaatcatgaagctgaacctgaccgagtggccctacttcgtggtgggcgtgttctgcgccatcatcaacggcggcctgcagcccgccttcgccatcatcttcagcaagatcatcggcgtgttcaccagaatcgacgaccccgagaccaagagacagaacagcaacctgttcagcctgctgttcctggccctgggcatcatcagcttcatcaccttcttcctgcagggcttcaccttcggcaaggccggcgagatcctgaccaagagactgagatacatggtgttcagaagcatgctgagacaggacgtgagctggttcgacgaccccaagaacaccaccggcgccctgaccaccagactggccaacgacgccgcccaggtgaagggcgccatcggcagcagactggccgtgatcacccagaacatcgccaacctgggcaccggcatcatcatcagcttcatctacggctggcagctgaccctgctgctgctggccatcgtgcccatcatcgccatcgccggcgtggtggagatgaagatgctgagcggccaggccctgaaggacaagaaggagctggagggcagcggcaagatcgccaccgaggccatcgagaacttcagaaccgtggtgagcctgacccaggagcagaagttcgagcacatgtacgcccagagcctgcaggtgccctacagaaacagcctgagaaaggcccacatcttcggcatcaccttcagcttcacccaggccatgatgtacttcagctacgccggctgcttcagattcggcgcctacctggtggcccacaagctgatgagcttcgaggacgtgctgctggtgttcagcgccgtggtgttcggcgccatggccgtgggccaggtgagcagcttcgcccccgactacgccaaggccaagatcagcgccgcccacatcatcatgatcatcgagaagacccccctgatcgacagctacagcaccgagggcctgatgcccaacaccctggagggcaacgtgaccttcggcgaggtggtgttcaactaccccaccagacccgacatccccgtgctgcagggcctgagcctggaggtgaagaagggccagaccctggccctggtgggcagcagcggctgcggcaagagcaccgtggtgcagctgctggagagattctacgaccccctggccggcaaggtgctgctggacggcaaggagatcaagagactgaacgtgcagtggctgagagcccacctgggcatcgtgagccaggagcccatcctgttcgactgcagcatcgccgagaacatcgcctacggcgacaacagcagagtggtgagccaggaggagatcgtgagagccgccaaggaggccaacatccacgccttcatcgagagcctgcccaacaagtacagcaccaaggtgggcgacaagggcacccagctgagcggcggccagaagcagagaatcgccatcgccagagccctggtgagacagccccacatcctgctgctggacgaggccaccagcgccctggacaccgagagcgagaaggtggtgcaggaggccctggacaaggccagagagggcagaacctgcatcgtgatcgcccacagactgagcaccatccagaacgccgacctgatcgtggtgttccagaacggcagagtgaaggagcacggcacccaccagcagctgctggcccagaagggcatctacttcagcatggtgagcgtgcaggccggcaccaagagacagtag

SEQ ID NO: 17211 - DNA, 69 bp, Artificial Sequence
  derived and/or modified sequence
atggacctggagggcgacagaaacggcggcgccaagaagaagaacttcttcaagctgaacaacaagtag

SEQ ID NO: 17212 - DNA, 147 bp, Artificial Sequence
  derived and/or modified sequence
atggacctggagggcgacagaaacggcggcgccaagaagaagaacttcttcaagctgaacaacaagagcgagaaggacaagaaggagaagaagcccaccgtgagcgtgttcagcatgttcagatacagcaactggctggacaagtag

SEQ ID NO: 17213 - DNA, 3186 bp, Artificial Sequence
  derived and/or modified sequence
gccctgagccccgtgatgggcgtgagcgccggctactggcccaagatcctgagcagcttcaccgacaaggagctgctggcctacgccaaggccggcgccgtggccgaggaggtgctggccgccatcagaaccgtgatcgccttcggcggccagaagaaggagctggagagatacaacaagaacctggaggaggccaagagaatcggcatcaagaaggccatcaccgccaacatcagcatcggcgccgccttcctgctgatctacgccagctacgccctggccttctggtacggcaccaccctggtgctgagcggcgagtacagcatcggccaggtgctgaccgtgttcttcagcgtgctgatcggcgccttcagcgtgggccaggccagccccagcatcgaggccttcgccaacgccagaggcgccgcctacgagatcttcaagatcatcgacaacaagcccagcatcgacagctacagcaagagcggccacaagcccgacaacatcaagggcaacctggagttcagaaacgtgcacttcagctaccccagcagaaaggaggtgaagatcctgaagggcctgaacctgaaggtgcagagcggccagaccgtggccctggtgggcaacagcggctgcggcaagagcaccaccgtgcagctgatgcagagactgtacgaccccaccgagggcatggtgagcgtggacggccaggacatcagaaccatcaacgtgagattcctgagagagatcatcggcgtggtgagccaggagcccgtgctgttcgccaccaccatcgccgagaacatcagatacggcagagagaacgtgaccatggacgagatcgagaaggccgtgaaggaggccaacgcctacgacttcatcatgaagctgccccacaagttcgacaccctggtgggcgagagaggcgcccagctgagcggcggccagaagcagagaatcgccatcgccagagccctggtgagaaaccccaagatcctgctgctggacgaggccaccagcgccctggacaccgagagcgaggccgtggtgcaggtggccctggacaaggccagaaagggcagaaccaccatcgtgatcgcccacagactgagcaccgtgagaaacgccgacgtgatcgccggcttcgacgacggcgtgatcgtggagaagggcaaccacgacgagctgatgaaggagaagggcatctacttcaagctggtgaccatgcagaccgccggcaacgaggtggagctggagaacgccgccgacgagagcaagagcgagatcgacgccctggagatgagcagcaacgacagcagaagcagcctgatcagaaagagaagcaccagaagaagcgtgagaggcagccaggcccaggacagaaagctgagcaccaaggaggccctggacgagagcatcccccccgtgagcttctggagaatcatgaagctgaacctgaccgagtggccctacttcgtggtgggcgtgttctgcgccatcatcaacggcggcctgcagcccgccttcgccatcatcttcagcaagatcatcggcgtgttcaccagaatcgacgaccccgagaccaagagacagaacagcaacctgttcagcctgctgttcctggccctgggcatcatcagcttcatcaccttcttcctgcagggcttcaccttcggcaaggccggcgagatcctgaccaagagactgagatacatggtgttcagaagcatgctgagacaggacgtgagctggttcgacgaccccaagaacaccaccggcgccctgaccaccagactggccaacgacgccgcccaggtgaagggcgccatcggcagcagactggccgtgatcacccagaacatcgccaacctgggcaccggcatcatcatcagcttcatctacggctggcagctgaccctgctgctgctggccatcgtgcccatcatcgccatcgccggcgtggtggagatgaagatgctgagcggccaggccctgaaggacaagaaggagctggagggcagcggcaagatcgccaccgaggccatcgagaacttcagaaccgtggtgagcctgacccaggagcagaagttcgagcacatgtacgcccagagcctgcaggtgccctacagaaacagcctgagaaaggcccacatcttcggcatcaccttcagcttcacccaggccatgatgtacttcagctacgccggctgcttcagattcggcgcctacctggtggcccacaagctgatgagcttcgaggacgtgctgctggtgttcagcgccgtggtgttcggcgccatggccgtgggccaggtgagcagcttcgcccccgactacgccaaggccaagatcagcgccgcccacatcatcatgatcatcgagaagacccccctgatcgacagctacagcaccgagggcctgatgcccaacaccctggagggcaacgtgaccttcggcgaggtggtgttcaactaccccaccagacccgacatccccgtgctgcagggcctgagcctggaggtgaagaagggccagaccctggccctggtgggcagcagcggctgcggcaagagcaccgtggtgcagctgctggagagattctacgaccccctggccggcaaggtgctgctggacggcaaggagatcaagagactgaacgtgcagtggctgagagcccacctgggcatcgtgagccaggagcccatcctgttcgactgcagcatcgccgagaacatcgcctacggcgacaacagcagagtggtgagccaggaggagatcgtgagagccgccaaggaggccaacatccacgccttcatcgagagcctgcccaacaagtacagcaccaaggtgggcgacaagggcacccagctgagcggcggccagaagcagagaatcgccatcgccagagccctggtgagacagccccacatcctgctgctggacgaggccaccagcgccctggacaccgagagcgagaaggtggtgcaggaggccctggacaaggccagagagggcagaacctgcatcgtgatcgcccacagactgagcaccatccagaacgccgacctgatcgtggtgttccagaacggcagagtgaaggagcacggcacccaccagcagctgctggcccagaagggcatctacttcagcatggtgagcgtgcaggccggcaccaagagacagtag

SEQ ID NO: 17214 - DNA, 3651 bp, Artificial Sequence
  derived and/or modified sequence
atggacctggagggcgacagaaacggcggcgccaagaagaagaacttcttcaagctgaacaacaagagcgagaaggacaagaaggagaagaagcccaccgtgagcgtgttcagcatgttcagatacagcaactggctggacaagctgtacatggtggtgggcaccctggccgccatcatccacggcgccggcctgcccctgatgatgctggtgttcggcgagatgaccgacatcttcgccaacgccggcaacctggaggacctgatgagcaacatcaccaacagaagcgacatcaacgacaccggcttcttcatgaacctggaggaggacatgaccagcgacgtgagcaagatcaacgagggcatcggcgacaagatcggcatgttcttccagagcatggccaccttcttcaccggcttcatcgtgggcttcaccagaggctggaagctgaccctggtgatcctggccatcagccccgtgctgggcctgagcgccgccgtgtgggccaagatcctgagcagcttcaccgacaaggagctgctggcctacgccaaggccggcgccgtggccgaggaggtgctggccgccatcagaaccgtgatcgccttcggcggccagaagaaggagctggagagatacaacaagaacctggaggaggccaagagaatcggcatcaagaaggccatcaccgccaacatcagcatcggcgccgccttcctgctgatctacgccagctacgccctggccttctggtacggcaccaccctggtgctgagcggcgagtacagcatcggccaggtgctgaccgtgttcttcagcgtgctgatcggcgccttcagcgtgggccaggccagccccagcatcgaggccttcgccaacgccagaggcgccgcctacgagatcttcaagatcatcgacaacaagcccagcatcgacagctacagcaagagcggccacaagcccgacaacatcaagggcaacctggagttcagaaacgtgcacttcagctaccccagcagaaaggaggtgaagatcctgaagggcctgaacctgaaggtgcagagcggccagaccgtggccctggtgggcaacagcggctgcggcaagagcaccaccgtgcagctgatgcagagactgtacgaccccaccgagggcatggtgagcgtggacggccaggacatcagaaccatcaacgtgagattcctgagagagatcatcggcgtggtgagccaggagcccgtgctgttcgccaccaccatcgccgagaacatcagatacggcagagagaacgtgaccatggacgagatcgagaaggccgtgaaggaggccaacgcctacgacttcatcatgaagctgccccacaagttcgacaccctggtgggcgagagaggcgcccagctgagcggcggccagaagcagagaatcgccatcgccagagccctggtgagaaaccccaagatcctgctgctggacgaggccaccagcgccctggacaccgagagcgaggccgtggtgcaggtggccctggacaaggccagaaagggcagaaccaccatcgtgatcgcccacagactgagcaccgtgagaaacgccgacgtgatcgccggcttcgacgacggcgtgatcgtggagaagggcaaccacgacgagctgatgaaggagaagggcatctacttcaagctggtgaccatgcagaccgccggcaacgaggtggagctggagaacgccgccgacgagagcaagagcgagatcgacgccctggagatgagcagcaacgacagcagaagcagcctgatcagaaagagaagcaccagaagaagcgtgagaggcagccaggcccaggacagaaagctgagcaccaaggaggccctggacgagagcatcccccccgtgagcttctggagaatcatgaagctgaacctgaccgagtggccctacttcgtggtgggcgtgttctgcgccatcatcaacggcggcctgcagcccgccttcgccatcatcttcagcaagatcatcggcgtgttcaccagaatcgacgaccccgagaccaagagacagaacagcaacctgttcagcctgctgttcctggccctgggcatcatcagcttcatcaccttcttcctgcagggcttcaccttcggcaaggccggcgagatcctgaccaagagactgagatacatggtgttcagaagcatgctgagacaggacgtgagctggttcgacgaccccaagaacaccaccggcgccctgaccaccagactggccaacgacgccgcccaggtgaagggcgccatcggcagcagactggccgtgatcacccagaacatcgccaacctgggcaccggcatcatcatcagcttcatctacggctggcagctgaccctgctgctgctggccatcgtgcccatcatcgccatcgccggcgtggtggagatgaagatgctgagcggccaggccctgaaggacaagaaggagctggagggcagcggcaagatcgccaccgaggccatcgagaacttcagaaccgtggtgagcctgacccaggagcagaagttcgagcacatgtacgcccagagcctgcaggtgccctacagaaacagcctgagaaaggcccacatcttcggcatcaccttcagcttcacccaggccatgatgtacttcagctacgccggctgcttcagattcggcgcctacctggtggcccacaagctgatgagcttcgaggacgtgctgctggtgttcagcgccgtggtgttcggcgccatggccgtgggccaggtgagcagcttcgcccccgactacgccaaggccaagatcagcgccgcccacatcatcatgatcatcgagaagacccccctgatcgacagctacagcaccgagggcctgatgcccaacaccctggagggcaacgtgaccttcggcgaggtggtgttcaactaccccaccagacccgacatccccgtgctgcagggcctgagcctggaggtgaagaagggccagaccctggccctggtgggcagcagcggctgcggcaagagcaccgtggtgcagctgctggagagattctacgaccccctggccggcaaggtgctgctggacggcaaggagatcaagagactgaacgtgcagtggctgagagcccacctgggcatcgtgagccaggagcccatcctgttcgactgcagcatcgccgagaacatcgcctacggcgacaacagcagagtggtgagccaggaggagatcgtgagagccgccaaggaggccaacatccacgccttcatcgagagcctgcccaacaagtacagcaccaaggtgggcgacaagggcacccagctgagcggcggccagaagcagagaatcgccatcgccagagccctggtgagacagccccacatcctgctgctggacgaggccaccagcgccctggacaccgagagcgagaaggtggtgcaggaggccctggacaaggccagagagggcagaacctgcatcgtgatcgcccacagactgagcaccatccagaacgccgacctgatcgtggtgttccagaacggcagagtgaaggagcacggcacccaccagcagctgctggcccagaagggcatctacttcagcatggtgagcgtgcaggccggcaccaagagacagtag

SEQ ID NO: 17215 - protein, 118 aa, Artificial Sequence
  derived and/or modified sequence
NLYQFKNMIQCAGTQLCVAYVKYGCYCGPGGTGTPLDQLDRCCQTHDHCYDNAKKFGNCIPYFKTYEYTCNKPDLTCTDAKGSCARNVCDCDRAAAICFAAAPYNLANFGINKETHCQ

SEQ ID NO: 17216 - protein, 148 aa, Artificial Sequence
  derived and/or modified sequence
MKLLVLAVLLTVAAADSGISPRAVWQFRKMIKCVIPGSDPFLEYNNYGCYCGLGGSGTPVDELDKCCQTHDNCYDQAKKLDSCKFLLDNPYTHTYSYSCSGSAITCSSKNKECEAFICNCDRNAAICFSKAPYNKAHKNLDTKKYCQS

SEQ ID NO: 17217 - DNA, 447 bp, Artificial Sequence
  derived and/or modified sequence
atgaagctgctggtgctggccgtgctgctgaccgtggccgccgccgacagcggcatcagccccagagccgtgtggcagttcagaaagatgatcaagtgcgtgatccccggcagcgaccccttcctggagtacaacaactacggctgctactgcggcctgggcggcagcggcacccccgtggacgagctggacaagtgctgccagacccacgacaactgctacgaccaggccaagaagctggacagctgcaagttcctgctggacaacccctacacccacacctacagctacagctgcagcggcagcgccatcacctgcagcagcaagaacaaggagtgcgaggccttcatctgcaactgcgacagaaacgccgccatctgcttcagcaaggccccctacaacaaggcccacaagaacctggacaccaagaagtactgccagagctag

SEQ ID NO: 17218 - DNA, 447 bp, Artificial Sequence
  derived and/or modified sequence
atgaaactgttggtcttggccgtgctgctgactgtggctgcagccgattcgggaatatctcccagagccgtgtggcagttcaggaagatgattaagtgtgttataccaggcagtgaccctttcttggagtacaataattacggctgttactgcggcttgggtgggtcagggacaccagtcgatgagcttgacaagtgctgccagacacatgacaactgctacgatcaggccaaaaagctggacagctgtaagttccttttggataacccatatacgcatacttatagctattcatgtagtggtagtgctataacctgctccagcaaaaacaaggagtgtgaggcctttatttgcaactgcgatcggaatgctgctatttgtttttctaaggccccatataataaggcacataaaaatctcgacacgaagaagtactgtcagtcatag

SEQ ID NO: 17219 - DNA, 447 bp, Artificial Sequence
  derived and/or modified sequence
atgaagctgctggtgctggccgtgctgctgactgtggccgctgctgacagcggcatcagccccagggctgtgtggcagttcaggaagatgatcaagtgtgtgattcctggcagtgaccccttcctggagtacaacaactacggctgctactgcggcctgggcggcagcggcacccctgtggatgagctggacaagtgctgccagacccatgacaactgctatgaccaggccaagaagctggacagctgcaagttcctgctggacaacccctacacccacacctacagctacagctgcagcggcagcgccatcacctgcagcagcaagaacaaggaatgtgaggccttcatctgcaactgtgacagaaatgctgccatctgcttcagcaaggccccctacaacaaggcccacaagaacctggacaccaagaagtactgccagagctag

SEQ ID NO: 17220 - DNA, 447 bp, Artificial Sequence
  derived and/or modified sequence
atgaagctgctggtgctggccgtgctgctgaccgtggccgccgccgactctggcattagtcctagagcagtgtggcagttcaggaagatgatcaaatgtgtgattcccgggagtgatccattcctcgagtacaataactatggatgttattgcggcctgggggggtctggtaccccagttgacgaactcgataagtgctgccagacacatgataattgctatgaccaagcgaagaagctcgatagctgcaaatttctcttggacaacccttacacgcacacctattcctactcatgctcaggctctgcaattacatgttcatctaagaacaaggagtgcgaagcctttatttgcaattgcgacagaaacgctgccatctgtttctctaaggccccatacaacaaggcacataaaaatcttgacacaaagaaatactgccaaagctag

SEQ ID NO: 17221 - DNA, 447 bp, Artificial Sequence
  derived and/or modified sequence
atgaaactgcttgtcttggccgtgttgctcaccgttgccgctgcagattcaggcatcagccccagagcggtgtggcagtttaggaagatgatcaagtgtgtaattccaggtagcgatcctttcctggaatataacaactacggttgctactgcgggctgggcggaagcggaacccccgttgacgaacttgacaaatgctgtcaaacgcacgataactgttacgaccaggccaaaaaattggacagttgtaaatttctcctggataatccttatacacacacctattcgtactcctgttctggttcggctatcacgtgttctagtaagaacaaggagtgtgaagcgtttatttgtaactgcgacaggaacgcagcaatatgtttttcaaaggcaccatataataaggctcataaaaacctggacaccaaaaaatattgtcaaagctag

SEQ ID NO: 17222 - DNA, 565 bp, Artificial Sequence
  derived and/or modified sequence
tggtcatctcagttcttttctcaccttgactgcaagatgaaactccttgtgctagctgtgctgctcacagtggccgccgccgacagcggcatcagccctcgggccgtgtggcagttccgcaaaatgatcaagtgcgtgatcccggggagtgaccccttcttggaatacaacaactacggctgctactgtggcttggggggctcaggcacccccgtggatgaactggacaagtgctgccagacacatgacaactgctatgaccaggccaagaagctggacagctgtaaatttctgctggacaacccgtacacccacacctattcatactcgtgctctggctcggcaatcacctgtagcagcaaaaacaaagagtgtgaggccttcatttgcaactgcgaccgcaacgctgccatctgcttttcaaaagctccatataacaaggcacacaagaacctggacaccaagaagtattgtcagagttgaatatcacctctcaaaagcatcacctctatctgcctcatctcacactgtactctccaataaagcaccttgttgaaagacctca

SEQ ID NO: 17223 - protein, 562 aa, Artificial Sequence
  derived and/or modified sequence
MDAMKRGLCCVLLLCGAVFVSPSQEIHARFRRGARSYQVICRDEKTQMIYQQHQSWLRPVLRSNRVEYCWCNSGRAQCHSVPVKSCSEPRCFNGGTCQQALYFSDFVCQCPEGFAGKCCEIDTRATCYEDQGISYRGTWSTAESGAECTNWNSSALAQKPYSGRRPDAIRLGLGNHNYCRNPDRDSKPWCYVFKAGKYSSEFCSTPACSEGNSDCYFGNGSAYRGTHSLTESGASCLPWNSMILIGKVYTAQNPSAQALGLGKHNYCRNPDGDAKPWCHVLKNRRLTWEYCDVPSCSTCGLRQYSQPQFRIKGGLFADIASHPWQAAIFAKHRRSPGERFLCGGILISSCWILSAAHCFQERFPPHHLTVILGRTYRVVPGEEEQKFEVEKYIVHKEFDDDTYDNDIALLQLKSDSSRCAQESSVVRTVCLPPADLQLPDWTECELSGYGKHEALSPFYSERLKEAHVRLYPSSRCTSQHLLNRTVTDNMLCAGDTRSGGPQANLHDACQGDSGGPLVCLNDGRMTLVGIISWGLGCGQKDVPGVYTKVTNYLDWIRDNMRP

SEQ ID NO: 17224 - protein, 293 aa, Artificial Sequence
  derived and/or modified sequence
MDAMKRGLCCVLLLCGAVFVSPSQEIHARFRRGARSYQVICRDEKTQMIYQQHQSWLRPVLRSNRVEYCWCNSGRAQCHSVPVKSCSEPRCFNGGTCQQALYFSDFVCQCPEGFAGKCCEIDTRATCYEDQGISYRGTWSTAESGAECTNWNSSALAQKPYSGRRPDAIRLGLGNHNYCRNPDRDSKPWCYVFKAGKYSSEFCSTPACSEGNSDCYFGNGSAYRGTHSLTESGASCLPWNSMILIGKVYTAQNPSAQALGLGKHNYCRCRTGRSVSSPATASMRPCLLSIRSG

SEQ ID NO: 17225 - protein, 436 aa, Artificial Sequence
  derived and/or modified sequence
MDAMKRGLCCVLLLCGAVFVSPSQEIHARFRRGARSYQVICRDEKTQMIYQQHQSWLRPVLRSNRVEYCWCNSGRAQCHSVPVKRNSDCYFGNGSAYRGTHSLTESGASCLPWNSMILIGKVYTAQNPSAQALGLGKHNYCRNPDGDAKPWCHVLKNRRLTWEYCDVPSCSTCGLRQYSQPQFRIKGGLFADIASHPWQAAIFAKHRRSPGERFLCGGILISSCWILSAAHCFQERFPPHHLTVILGRTYRVVPGEEEQKFEVEKYIVHKEFDDDTYDNDIALLQLKSDSSRCAQESSVVRTVCLPPADLQLPDWTECELSGYGKHEALSPFYSERLKEAHVRLYPSSRCTSQHLLNRTVTDNMLCAGDTRSGGPQANLHDACQGDSGGPLVCLNDGRMTLVGIISWGLGCGQKDVPGVYTKVTNYLDWIRDNMRP

SEQ ID NO: 17226 - protein, 499 aa, Artificial Sequence
  derived and/or modified sequence
MDAMKRGLCCVLLLCGAVFVSPSQEIHARFRRGARSYQVICRDEKTQMIYQQHQSWLRPVLRSNRVEYCWCNSGRAQCHSVPVKSCSEPRCFNGGTCQQALYFSDFVCQCPEGFAGKCCEIDSKPWCYVFKAGKYSSEFCSTPACSEGNSDCYFGNGSAYRGTHSLTESGASCLPWNSMILIGKVYTAQNPSAQALGLGKHNYCRNPDGDAKPWCHVLKNRRLTWEYCDVPSCSTCGLRQYSQPQFRIKGGLFADIASHPWQAAIFAKHRRSPGERFLCGGILISSCWILSAAHCFQERFPPHHLTVILGRTYRVVPGEEEQKFEVEKYIVHKEFDDDTYDNDIALLQLKSDSSRCAQESSVVRTVCLPPADLQLPDWTECELSGYGKHEALSPFYSERLKEAHVRLYPSSRCTSQHLLNRTVTDNMLCAGDTRSGGPQANLHDACQGDSGGPLVCLNDGRMTLVGIISWGLGCGQKDVPGVYTKVTNYLDWIRDNMRP

SEQ ID NO: 17227 - protein, 178 aa, Artificial Sequence
  derived and/or modified sequence
MDAMKRGLCCVLLLCGAVFVSPSQEIHARFRRGARSYQVICRDEKTQMIYQQHQSWLRPVLRSNRVEYCWCNSGRAQCHSVPVKSCSEPRCFNGGTCQQALYFSDFVCQCPEGFAGKCCEIDTRATCYEDQGISYRGTWSTAESGAECTNWNSSALAQKPYSGRRPDAIRLGLGNHNY

SEQ ID NO: 17228 - protein, 157 aa, Artificial Sequence
  derived and/or modified sequence
MDAMKRGLCCVLLLCGAVFVSPSQEIHARFRRGARSYQVICRDEKTQMIYQQHQSWLRPVLRSNRVEYCWCNSGRAQCHSVPVKSCSEPRCFNGGTCQQALYFSDFVCQCPEGFAGKCCEIDTRATCYEDQGISYRGTWSTAESGAECTNWNSSALA

SEQ ID NO: 17229 - protein, 16 aa, Artificial Sequence
  derived and/or modified sequence
VYTAQNPSAQALGLGK

SEQ ID NO: 17230 - protein, 22 aa, Artificial Sequence
  derived and/or modified sequence
YIVHKEFDDDTYDNDIALLQLK

SEQ ID NO: 17231 - protein, 21 aa, Artificial Sequence
  derived and/or modified sequence
IKGGLFADIASHPWQAAIFAK

SEQ ID NO: 17232 - DNA, 1686 bp, Artificial Sequence
  derived and/or modified sequence
atggacgccatgaagcgcggcctgtgctgcgtgctgctgctgtgcggcgccgtgttcgtgagccccagccaggagatccacgcccgcttccgccgcggcgcccgcagctaccaggtgatctgccgcgacgagaagacccagatgatctaccagcagcaccagagctggctgcgccccgtgctgcgcagcaaccgcgtggagtactgctggtgcaacagcggccgcgcccagtgccacagcgtgcccgtgaagagctgcagcgagccccgctgcttcaacggcggcacctgccagcaggccctgtacttcagcgacttcgtgtgccagtgccccgagggcttcgccggcaagtgctgcgagatcgacacccgcgccacctgctacgaggaccagggcatcagctaccgcggcacctggagcaccgccgagagcggcgccgagtgcaccaactggaacagcagcgccctggcccagaagccctacagcggccgccgccccgacgccatccgcctgggcctgggcaaccacaactactgccgcaaccccgaccgcgacagcaagccctggtgctacgtgttcaaggccggcaagtacagcagcgagttctgcagcacccccgcctgcagcgagggcaacagcgactgctacttcggcaacggcagcgcctaccgcggcacccacagcctgaccgagagcggcgccagctgcctgccctggaacagcatgatcctgatcggcaaggtgtacaccgcccagaaccccagcgcccaggccctgggcctgggcaagcacaactactgccgcaaccccgacggcgacgccaagccctggtgccacgtgctgaagaaccgccgcctgacctgggagtactgcgacgtgcccagctgcagcacctgcggcctgcgccagtacagccagccccagttccgcatcaagggcggcctgttcgccgacatcgccagccacccctggcaggccgccatcttcgccaagcaccgccgcagccccggcgagcgcttcctgtgcggcggcatcctgatcagcagctgctggatcctgagcgccgcccactgcttccaggagcgcttccccccccaccacctgaccgtgatcctgggccgcacctaccgcgtggtgcccggcgaggaggagcagaagttcgaggtggagaagtacatcgtgcacaaggagttcgacgacgacacctacgacaacgacatcgccctgctgcagctgaagagcgacagcagccgctgcgcccaggagagcagcgtggtgcgcaccgtgtgcctgccccccgccgacctgcagctgcccgactggaccgagtgcgagctgagcggctacggcaagcacgaggccctgagccccttctacagcgagcgcctgaaggaggcccacgtgcgcctgtaccccagcagccgctgcaccagccagcacctgctgaaccgcaccgtgaccgacaacatgctgtgcgccggcgacacccgcagcggcggcccccaggccaacctgcacgacgcctgccagggcgacagcggcggccccctggtgtgcctgaacgacggccgcatgaccctggtgggcatcatcagctggggcctgggctgcggccagaaggacgtgcccggcgtgtacaccaaggtgaccaactacctggactggatccgcgacaacatgcgcccc

SEQ ID NO: 17233 - DNA, 879 bp, Artificial Sequence
  derived and/or modified sequence
atggacgccatgaagcgcggcctgtgctgcgtgctgctgctgtgcggcgccgtgttcgtgagccccagccaggagatccacgcccgcttccgccgcggcgcccgcagctaccaggtgatctgccgcgacgagaagacccagatgatctaccagcagcaccagagctggctgcgccccgtgctgcgcagcaaccgcgtggagtactgctggtgcaacagcggccgcgcccagtgccacagcgtgcccgtgaagagctgcagcgagccccgctgcttcaacggcggcacctgccagcaggccctgtacttcagcgacttcgtgtgccagtgccccgagggcttcgccggcaagtgctgcgagatcgacacccgcgccacctgctacgaggaccagggcatcagctaccgcggcacctggagcaccgccgagagcggcgccgagtgcaccaactggaacagcagcgccctggcccagaagccctacagcggccgccgccccgacgccatccgcctgggcctgggcaaccacaactactgccgcaaccccgaccgcgacagcaagccctggtgctacgtgttcaaggccggcaagtacagcagcgagttctgcagcacccccgcctgcagcgagggcaacagcgactgctacttcggcaacggcagcgcctaccgcggcacccacagcctgaccgagagcggcgccagctgcctgccctggaacagcatgatcctgatcggcaaggtgtacaccgcccagaaccccagcgcccaggccctgggcctgggcaagcacaactactgccgctgccgcaccggccgcagcgtgagcagccccgccaccgccagcatgcgcccctgcctgctgagcatccgcagcggc

SEQ ID NO: 17234 - DNA, 1497 bp, Artificial Sequence
  derived and/or modified sequence
atggacgccatgaagcgcggcctgtgctgcgtgctgctgctgtgcggcgccgtgttcgtgagccccagccaggagatccacgcccgcttccgccgcggcgcccgcagctaccaggtgatctgccgcgacgagaagacccagatgatctaccagcagcaccagagctggctgcgccccgtgctgcgcagcaaccgcgtggagtactgctggtgcaacagcggccgcgcccagtgccacagcgtgcccgtgaagagctgcagcgagccccgctgcttcaacggcggcacctgccagcaggccctgtacttcagcgacttcgtgtgccagtgccccgagggcttcgccggcaagtgctgcgagatcgacagcaagccctggtgctacgtgttcaaggccggcaagtacagcagcgagttctgcagcacccccgcctgcagcgagggcaacagcgactgctacttcggcaacggcagcgcctaccgcggcacccacagcctgaccgagagcggcgccagctgcctgccctggaacagcatgatcctgatcggcaaggtgtacaccgcccagaaccccagcgcccaggccctgggcctgggcaagcacaactactgccgcaaccccgacggcgacgccaagccctggtgccacgtgctgaagaaccgccgcctgacctgggagtactgcgacgtgcccagctgcagcacctgcggcctgcgccagtacagccagccccagttccgcatcaagggcggcctgttcgccgacatcgccagccacccctggcaggccgccatcttcgccaagcaccgccgcagccccggcgagcgcttcctgtgcggcggcatcctgatcagcagctgctggatcctgagcgccgcccactgcttccaggagcgcttccccccccaccacctgaccgtgatcctgggccgcacctaccgcgtggtgcccggcgaggaggagcagaagttcgaggtggagaagtacatcgtgcacaaggagttcgacgacgacacctacgacaacgacatcgccctgctgcagctgaagagcgacagcagccgctgcgcccaggagagcagcgtggtgcgcaccgtgtgcctgccccccgccgacctgcagctgcccgactggaccgagtgcgagctgagcggctacggcaagcacgaggccctgagccccttctacagcgagcgcctgaaggaggcccacgtgcgcctgtaccccagcagccgctgcaccagccagcacctgctgaaccgcaccgtgaccgacaacatgctgtgcgccggcgacacccgcagcggcggcccccaggccaacctgcacgacgcctgccagggcgacagcggcggccccctggtgtgcctgaacgacggccgcatgaccctggtgggcatcatcagctggggcctgggctgcggccagaaggacgtgcccggcgtgtacaccaaggtgaccaactacctggactggatccgcgacaacatgcgcccc

SEQ ID NO: 17235 - DNA, 534 bp, Artificial Sequence
  derived and/or modified sequence
atggacgccatgaagcgcggcctgtgctgcgtgctgctgctgtgcggcgccgtgttcgtgagccccagccaggagatccacgcccgcttccgccgcggcgcccgcagctaccaggtgatctgccgcgacgagaagacccagatgatctaccagcagcaccagagctggctgcgccccgtgctgcgcagcaaccgcgtggagtactgctggtgcaacagcggccgcgcccagtgccacagcgtgcccgtgaagagctgcagcgagccccgctgcttcaacggcggcacctgccagcaggccctgtacttcagcgacttcgtgtgccagtgccccgagggcttcgccggcaagtgctgcgagatcgacacccgcgccacctgctacgaggaccagggcatcagctaccgcggcacctggagcaccgccgagagcggcgccgagtgcaccaactggaacagcagcgccctggcccagaagccctacagcggccgccgccccgacgccatccgcctgggcctgggcaaccacaactac

SEQ ID NO: 17236 - DNA, 471 bp, Artificial Sequence
  derived and/or modified sequence
atggacgccatgaagcgcggcctgtgctgcgtgctgctgctgtgcggcgccgtgttcgtgagccccagccaggagatccacgcccgcttccgccgcggcgcccgcagctaccaggtgatctgccgcgacgagaagacccagatgatctaccagcagcaccagagctggctgcgccccgtgctgcgcagcaaccgcgtggagtactgctggtgcaacagcggccgcgcccagtgccacagcgtgcccgtgaagagctgcagcgagccccgctgcttcaacggcggcacctgccagcaggccctgtacttcagcgacttcgtgtgccagtgccccgagggcttcgccggcaagtgctgcgagatcgacacccgcgccacctgctacgaggaccagggcatcagctaccgcggcacctggagcaccgccgagagcggcgccgagtgcaccaactggaacagcagcgccctggcc

SEQ ID NO: 17237 - DNA, 1832 bp, Artificial Sequence
  derived and/or modified sequence
gggaaataagagagaaaagaagagtaagaagaaatataagagccaccatggatgccatgaaacgggggttgtgttgcgtacttcttttgtgcggagcggtgttcgtgtccccgtcgcaagagatccacgcgcgattcagaaggggtgcgcggagctaccaggtcatctgccgagatgagaaaactcagatgatctaccaacagcatcagtcctggctgcggcctgtactgcgctccaaccgagtggaatactgctggtgtaatagcggcagggcccagtgccattcagtaccggtaaagtcgtgctcggaaccgcgctgctttaatggcgggacatgtcagcaggcgctttacttctccgatttcgtgtgtcagtgcccagaagggttcgcgggcaaatgctgcgaaatcgacacacgggcgacgtgttatgaagatcagggaattagctaccggggtacgtggtcgacggccgagtcgggggcagagtgtaccaactggaacagctcggcgctggcgcagaagccctattcgggacgaaggccggacgccatcagattgggacttggaaatcacaactactgtcgcaaccctgacagagactcaaaaccctggtgttatgtctttaaggcggggaaatactcatcggagttctgctcgacccccgcatgctcagagggtaactcggattgctattttggaaatggttccgcctaccgcggaacgcactccttgactgaatcgggtgccagctgtctgccctggaactcaatgatcctgatcggaaaagtgtacaccgcgcagaacccaagcgcacaggcacttggactcggtaaacacaattactgccgcaatcccgacggggatgcgaagccctggtgtcacgtcttgaagaatagaaggctcacgtgggagtattgtgacgtccccagctgctcaacgtgtgggctcaggcagtattcacagccgcagttccggatcaagggtggactttttgcagacatcgcatcgcacccctggcaggctgccatctttgcgaagcatcgacggagcccgggagagcgcttcttgtgtggcgggattctcatttcatcatgctggattctctcggcggctcactgctttcaagaacgatttcccccgcaccatttgacggtcattctcgggagaacgtaccgcgtagtgccgggagaggaagaacaaaagttcgaggtggagaagtatatcgtgcataaagagttcgacgacgacacgtatgacaacgatatcgctctgctccagttgaagagcgattcatcgcggtgtgcacaagagtcatccgtagtcagaacggtatgcctgccccctgctgacttgcagctgccagattggacagaatgcgagctttcgggatatggaaagcatgaagccttgagcccgttctattcggagcggttgaaagaggcccatgtgcgcctgtacccatcgtcacgctgtacatcccagcaccttctcaaccggaccgtgaccgacaacatgctttgtgcaggggatacaaggagcgggggaccccaggcgaatttgcacgatgcctgtcaaggtgattcgggtggcccgcttgtctgcctgaacgatgggagaatgacactggtgggaatcatttcgtgggggttggggtgtgggcaaaaggatgtcccgggtgtctacactaaagtgacaaattaccttgactggattagagacaatatgaggccatgataagctgccttctgcggggcttgccttctggccatgcccttcttctctcccttgcacctgtacctcttggtctttgaataaagcctgagtaggaag

SEQ ID NO: 17238 - DNA, 1686 bp, Artificial Sequence
  derived and/or modified sequence
atggacgccatgaaacgcggtctgtgctgtgttttactcctgtgcggtgcagtgttcgtgagccccagtcaggaaatacacgcacggtttaggaggggagcacggagctaccaagtgatctgtagggatgagaagacacagatgatttaccaacagcaccagtcctggctgagacccgtgctcagatcgaatcgagttgagtattgttggtgcaattccggtagggctcagtgtcacagcgtcccagtgaagtcatgttctgaacccaggtgcttcaatggtggaacttgccagcaggccctgtactttagtgattttgtttgccagtgcccggagggcttcgctgggaagtgctgtgaaatagatacaagggcaacctgctacgaagaccaggggatctcataccgcgggacttggtccaccgccgagagtggagctgagtgcactaactggaacagtagtgcgttagcgcaaaagccctatagtggtcgccgaccagatgcgatccgattgggacttgggaaccataattactgtagaaatccagaccgagattcgaaaccctggtgctacgtgtttaaggctgggaagtacagtagcgagttctgctctaccccagcttgctcggagggcaacagtgattgttactttggaaatggctcggcctaccggggcactcactcacttacggagtcaggagccagctgcttgccgtggaacagcatgattttaattggcaaggtctacaccgcccagaatccaagtgcgcaggccttaggtttggggaaacataactactgccggaatcccgacggggatgcaaaaccctggtgtcatgtgctcaagaacaggaggttaacttgggaatactgtgatgtgccatcttgcagcacatgtggattacgccagtacagtcagccgcagtttaggatcaaggggggtctgttcgccgacatagcctcacacccgtggcaggcagccattttcgccaagcatagacgcagtccaggagagcggtttctgtgtggaggcattctgatatccagttgttggatattgtccgccgcacattgctttcaggaacggttcccgccccaccacctcacagttatactggggcgcacctatcgcgtggtgccgggagaagaggaacagaagttcgaggtggaaaaatacattgtgcataaggagttcgatgatgatacttacgataacgacatcgctttactccagctcaagagcgactcttcccggtgcgctcaagaatcttcggtggtgcgaactgtctgcttgcctcccgccgacctgcagctgcccgactggacagagtgtgagctgtcaggatatggaaagcatgaagccttaagtcctttctactccgagagactaaaagaggctcacgtgcggctgtacccctcaagtaggtgtacaagccagcatctcctcaatcgtaccgtgactgataatatgctatgcgcgggagatacccggagcggggggcctcaggcaaacctgcacgacgcttgtcaaggcgattcagggggccccctcgtctgtctaaacgacggcaggatgacactcgttgggattatctcttgggggcttggctgcgggcaaaaggatgtgcctggcgtttacacaaaggtgactaattatctagattggatccgagacaacatgaggcct

SEQ ID NO: 17239 - DNA, 1686 bp, Artificial Sequence
  derived and/or modified sequence
atggatgcaatgaagcggggactgtgttgcgtgcttcttctgtgtggagccgtgtttgtgtcccctagccaggaaattcatgcacgattccggagaggtgcacgctcataccaagtgatttgtagggacgagaaaactcagatgatctatcaacagcatcaatcgtggcttcggcctgtgctcagatctaatcgcgtcgaatactgctggtgcaattctggccgcgcccaatgccattcagttcctgtcaaatcctgttcggaaccgcgttgctttaatggcggcacgtgtcagcaagcgctttacttttccgatttcgtgtgtcaatgtccagaagggttcgccgggaagtgttgcgagattgacacgcgtgcaacgtgctacgaagatcagggtatttcataccgtggtacgtggagcacggctgagtcgggagcagaatgtactaactggaattcatcggcactggctcaaaagccctacagcggaagaaggccggacgcgataagacttgggctgggcaatcacaactactgcagaaaccctgatcgagatagcaagccatggtgttacgtgtttaaagcaggtaaatactcctcagagttctgttcaaccccagcatgttcggagggtaactcagactgttactttggaaacggctcggcttacagaggcactcatagccttaccgagagtggagcctcgtgtttgccttggaactcgatgatcctcattgggaaggtgtacaccgcgcagaacccatctgcacaggcactcggactcggtaagcacaactattgcagaaacccagatggggacgctaagccttggtgtcatgtccttaagaataggagactgacttgggaatactgtgatgtgccaagttgctctacttgcggcctgagacagtactcacaaccccagtttcgaatcaagggtggtctgtttgcagatatcgcaagccacccctggcaagcagcaattttcgcaaagcatagacgctcccctggagaaagatttctgtgtggtggaatcctgatatcgtcatgttggattctgtccgccgctcattgctttcaagaacggttccctccccatcaccttacggtcatacttggccgtacctacagagtagtgccgggcgaagaggaacagaagtttgaggtggagaaatacattgtccataaagaattcgacgatgatacctatgataatgacatcgcattgctgcaactcaagtcggattccagcaggtgtgcccaagaatcctcagtcgtgagaactgtgtgcctcccacctgcagatcttcaactgccagattggaccgaatgcgaactttcgggatacgggaagcatgaagcgctgtccccgttttacagcgagagactgaaagaagcccatgtgagattgtacccctcttcccgctgcactagccaacacctgcttaacagaactgtcactgataacatgttgtgtgctggtgatacccgctcgggaggaccccaggcgaatctgcacgacgcctgtcaaggcgatagcggggggccccttgtgtgtcttaacgatgggcgcatgacccttgtcgggataatctcctggggcctgggttgtggtcagaaggatgtgccaggagtgtatactaaggtaaccaattacctggactggattcgagacaacatgcgaccg

SEQ ID NO: 17240 - DNA, 1686 bp, Artificial Sequence
  derived and/or modified sequence
atggatgccatgaagcgaggtctgtgctgcgtgcttctcttatgtggggcagtattcgtctcaccgagccaagagattcatgctagattccgcagaggagctcgctcatatcaagtgatctgtagagatgaaaaaacacagatgatttaccaacaacatcagtcttggctccggccagttcttagatctaaccgagtagaatattgttggtgcaattcaggacgggcgcagtgccattcagtcccggtcaaatcatgcagtgaacctaggtgttttaacgggggtacctgtcagcaggccctgtattttagtgactttgtatgtcagtgccctgagggttttgcgggcaaatgctgcgaaattgatacaagagcgacatgttatgaagaccaaggtatttcgtatcgtggcacttggagcacagcagagtctggtgctgaatgcactaattggaattctagtgcacttgctcaaaaaccctattctggccggcgcccagatgcaattcgtcttggacttgggaatcataactattgtcgtaatcccgatagagattcaaagccgtggtgctatgtattcaaggcaggcaagtatagtagcgaattctgcagcactcccgcgtgctcagaagggaactcagattgttactttggcaatgggagcgcataccggggcacgcacagcttaaccgagtctggagcgagttgcttaccctggaactccatgattctgattggcaaagtatataccgcacaaaatccttcagcgcaagcactgggtctgggcaaacataattactgccgaaaccccgatggagatgcgaaaccttggtgtcatgttctgaaaaatcgccgcttgacatgggaatattgtgacgtccctagctgttctacatgtggattgagacaatattctcaacctcagttccgcataaaaggaggcctgtttgctgatattgcgtctcacccgtggcaagccgcaatctttgctaaacatcgtcgttctccgggagaaagatttctgtgtggaggcattcttatatctagttgctggatattaagcgcggctcattgctttcaggaaagatttccgccgcatcatctgacagtcatactaggacgaacctatagagtagttccgggggaggaagaacaaaaattcgaagtagagaaatatattgtgcataaagaatttgatgacgatacttacgacaacgatattgcgcttttacaattaaaaagcgattcatctagatgtgcgcaagaatcatctgtggtacgaactgtgtgcttaccgcccgcagatctccaactgccagactggacagaatgtgaattgtctggttatggtaaacacgaggcactgtcaccgttttattcagagcgtctaaaagaggcgcatgtgcgcttatatcctagttctcgatgcacgtctcagcacctgcttaataggacagttacggataatatgttatgcgcgggcgatactcgtagcggagggcctcaggctaacctccacgacgcatgccaaggagattcgggagggccgttagtctgcttgaatgatggacgcatgacacttgtcggaattatctcttggggattggggtgtggacagaaagacgtccctggtgtgtatacgaaagtgacaaattatctggattggatccgggataatatgcgacct

SEQ ID NO: 17241 - DNA, 1686 bp, Artificial Sequence
  derived and/or modified sequence
atggacgccatgaaacgtggtttgtgttgcgttctgctgctctgtggagccgtgttcgtgagtccctcccaggagatccacgcgaggttcagaagaggtgctaggagctaccaagtgatctgtagggacgagaagacgcagatgatctatcagcagcatcagtcgtggctcaggcccgtgctgcgaagtaaccgggttgaatactgctggtgcaactcaggacgggcccaatgtcattccgtgccagtgaagagctgttcagaaccaaggtgttttaacgggggtacttgtcagcaggctttgtatttctccgatttcgtctgtcagtgtcctgaagggtttgctggtaagtgttgtgagattgatacgcgggccacctgttacgaggaccagggaatcagctatcgcggcacttggtccacggcagaatcgggagcagagtgcacaaactggaattcgtcagcactggcccagaaaccctacagcggaagacgtcccgacgccattcgcctgggattgggtaatcacaactattgccgcaatcccgacagggactccaagccatggtgttacgtgtttaaggccggcaagtatagttcagagttttgttctacacccgcttgttctgagggaaactcagattgctatttcggcaacggctccgcttatcgtgggacacactcgcttacagaatccggcgcttcatgcctgccatggaactcaatgattctcatcggcaaggtgtacaccgcgcagaatcccagtgctcaggccttaggactaggcaaacacaactactgcaggaatccagacggcgatgctaagccatggtgtcacgtacttaagaatcggagattaacctgggagtactgtgacgtaccttcgtgcagcacctgcggactgcggcagtattcccagccacagttccgcatcaaaggcggactgtttgccgacatcgcctctcacccttggcaggctgccatatttgctaagcacaggaggagcccaggagagaggttcttgtgcggcgggatccttatctcctcttgttggattctctctgcagcccattgctttcaggaacgttttcctccacaccacctcacagtcatcttagggagaacataccgggtagtgcccggggaagaggagcagaaatttgaggtggagaaatatattgttcacaaagagttcgatgatgacacatatgataacgatattgccctgctgcagctgaagtcagactccagccggtgtgcgcaggaatctagcgtggtgagaacagtgtgtctgcctcccgccgacctacagctgccagattggaccgagtgcgagctttctggctatggcaaacatgaggctctgtctccgttttactctgaacgactcaaggaggcacatgttcggctgtacccgtcttctcggtgtacgagccagcacctactaaacaggacagtcaccgacaatatgttatgcgccggggacacacggtccggcggtccacaagccaatctgcacgacgcatgtcagggcgactctggaggccctctggtgtgccttaacgacggcaggatgaccctggtgggcattatcagctgggggctgggatgtggacagaaagatgtcccgggagtctataccaaagtaacaaactacttggactggatcagagacaatatgcgacca

SEQ ID NO: 17242 - DNA, 1686 bp, Artificial Sequence
  derived and/or modified sequence
atggatgccatgaagcggggactgtgttgtgtgcttttgctttgcggggccgtctttgtctcaccatctcaagaaatccatgcaaggttcagaaggggcgcgaggtcctaccaggtgatctgtcgggatgagaaaacccagatgatctaccaacagcatcagtcctggctgaggccggtgcttagatccaacagggtggaatactgttggtgcaattcgggccgcgcacaatgtcattccgtccccgttaagtcgtgtagcgaaccccgttgcttcaacggaggaacctgccagcaggccctctacttttcagactttgtgtgccaatgtcctgaaggttttgcgggaaagtgctgtgaaattgacactagggcaacctgttacgaagatcagggtatctcctaccgcggtacctggagcactgcagaaagcggagcagaatgcactaactggaattcatcggccctcgcccagaagccctatagcggtaggaggccagatgcaattagactgggcctgggtaaccacaattactgcagaaatcctgatagagattccaaaccatggtgttacgtgttcaaagctggaaagtattcgtcggagttctgctcaacccctgcgtgttcggaggggaacagcgattgctattttggaaatgggagcgcataccgcgggacccactcccttactgaaagcggagcctcatgccttccgtggaactcgatgattcttattggaaaggtctacactgcccagaatccatcggcccaagcactgggactcggcaaacacaactactgtaggaaccctgatggtgatgcaaagccttggtgtcatgtgctgaaaaaccggcggctcacgtgggaatactgcgacgtgccttcctgctccacttgcggactgcggcagtactcgcagcctcaatttaggatcaagggagggctttttgctgatatcgcttcccatccatggcaggcagccatctttgcgaagcatagacgatcccctggagagcgctttctttgtggaggaatcctgatttcatcctgctggattttgtcggcagcccactgcttccaagaacgttttcctccacatcatctgaccgtgattcttggacggacttatagggtggtgcccggggaggaagaacagaaattcgaggtggagaaatacattgtccacaaggaatttgatgacgatacttacgataatgatattgcacttctgcaacttaagtcggattcatcaaggtgtgcacaggagtccagcgtcgtgaggaccgtgtgtctcccacctgccgaccttcaactgccagactggaccgagtgcgagcttagcggatacggtaagcatgaagccctctctcccttttactcggaacgcctgaaagaggctcacgtcagattgtaccccagctccagatgcacctcgcagcatcttctgaatcgtactgttacggacaatatgctgtgtgcaggtgacactcgatcgggaggaccacaagccaacctgcatgatgcatgtcaaggtgattcaggggggcccctcgtgtgccttaatgatggaaggatgactctggtcggaataatcagctgggggctgggatgtggtcaaaaggacgtcccgggagtgtacacgaaagtgaccaactacttggattggatccgggacaatatgcgtcct

SEQ ID NO: 17243 - DNA, 1686 bp, Artificial Sequence
  derived and/or modified sequence
atggatgcaatgaagagaggcctgtgttgtgtcctgcttctctgtggagctgtgtttgtttcaccttcacaagagatccacgcacggtttcggagaggagcaagaagctaccaagtgatctgccgtgatgaaaagacgcaaatgatttaccaacagcatcaatcgtggcttcgacctgtgctgagaagcaaccgcgtggaatactgttggtgtaacagcggtcgcgcgcaatgccactccgtccctgtcaagagctgttccgaacctcgctgtttcaacggagggacttgtcagcaagcgctttacttctcagattttgtctgccaatgccctgagggattcgccgggaagtgctgcgagattgatactagagccacctgttacgaggaccagggaatttcctaccggggtacttggtccactgcagaaagcggtgcagaatgtaccaattggaattcgtcagcccttgcacagaagccatactcaggtagacgtccagatgccattcggctgggactcggtaaccataactactgtaggaatcctgatagggattcaaagccttggtgctacgtgtttaaggccggcaagtacagctcagagttctgctccactccagcatgtagcgagggtaatagcgattgttactttggcaatggttcagcatacaggggtacccattcactcactgaaagcggagcaagttgccttccttggaactccatgattctcatcggtaaggtctacactgcacaaaatccctcagcacaggcactcgggcttggaaaacacaactactgtagaaacccagatggtgacgctaaaccatggtgtcacgttctgaagaataggcgactcacttgggaatactgtgatgtgccgtcgtgtagcacttgcggactgagacagtactcgcaacctcagtttcgcataaagggaggccttttcgctgacatcgcatcgcatccttggcaggccgcgatattcgcaaagcacagaagaagccccggtgaaagattcctgtgtggggggatactgatatcgtcctgttggattctgagcgcggcccattgctttcaagaacggtttcctccacatcaccttaccgtcattctcggacgtacttaccgcgtggtgcctggggaagaagagcagaaatttgaggtcgaaaagtacattgtgcataaggagttcgacgatgatacttacgataatgacattgcacttctgcaattgaagtcggattcgtcgcgctgcgcacaggaatcatccgtggttcgaactgtgtgtctgccacctgcagatcttcaacttcctgactggaccgaatgtgaactctcaggatacggaaagcacgaggcactttcacctttttactctgaaagacttaaggaagcacacgtcaggctctatccttctagcagatgtacgtcccaacaccttctgaaccgcactgtgactgataacatgctctgtgcgggcgatactcggtccggaggtccacaggcaaacctccatgatgcgtgtcaaggagattcgggcggacctctcgtctgtctgaacgatggtaggatgaccctcgtgggaattatctcatgggggttgggatgcggacagaaggatgtgcctggagtgtatactaaagtaaccaactaccttgactggattagggataacatgcgtccc

SEQ ID NO: 17244 - DNA, 1686 bp, Artificial Sequence
  derived and/or modified sequence
atggacgcaatgaaacgcggcttgtgctgtgtccttcttctgtgtggtgctgtgtttgtttcaccgtctcaggagatccacgcgaggtttcgtcgcggcgcgagaagttaccaggtcatttgtcgagatgaaaagacacagatgatataccagcaacatcagtcatggctccgaccagttctccggagcaatagagtggagtactgttggtgcaactctgggcgggctcaatgtcacagcgtccctgtgaaatcgtgcagcgaacctcggtgcttcaacgggggcacctgtcagcaggctttgtattttagcgattttgtctgtcaatgcccggagggcttcgcgggaaagtgctgtgaaattgataccagagcgacttgctatgaagatcagggtatatcttataggggcacctggagtacggcggaatcgggtgccgagtgtacgaattggaattctagcgcattagctcagaaaccctattccggtcgccggccggacgcaatccgcttgggcttagggaaccataattactgtcgcaatcctgatcgcgattcgaagccctggtgttatgtgttcaaagcgggtaaatatagctcagagttctgttctacccccgcctgcagtgaagggaattcggattgttattttggaaatggatccgcttaccgaggcacccactccttgactgagagtggagcatcctgcctcccatggaactctatgatcctaattggcaaggtttataccgcacaaaacccgtccgcccaagcgctgggtctgggaaagcataattactgcaggaatccggatggggatgccaagccctggtgccacgtgctgaaaaacagacgtctgacatgggagtactgcgacgtccctagttgcagtacttgtggattacggcagtacagccagccacaatttaggatcaagggaggactgtttgccgacatcgctagccacccgtggcaagctgccatctttgccaaacatcggcggtctccaggcgaacggttcctgtgcggagggatcctgatatcctcctgctggatcctgagtgctgctcattgcttccaggaacggttccctccacaccacctgactgtgattttgggccggacctacagagttgttcccggggaggaggagcagaagttcgaggtcgagaagtatattgtgcacaaagagttcgatgatgacacatatgacaacgacattgcactgctacaactgaagtccgactcttcgagatgcgcccaagagtcatcagtcgtccgcaccgtgtgcctgccccctgccgacttacagctgccagattggactgaatgtgaactgtcggggtatggaaaacacgaagccctgagcccattttatagtgagaggctgaaggaagctcacgtgcgtctgtatccctcatccagatgcaccagccaacacctgctgaaccggacagtaaccgataacatgctttgtgctggtgacacccgctcagggggcccacaagccaatttacacgacgcatgtcagggggacagtggaggacctctggtgtgtctaaatgatgggaggatgacacttgtcggaattatcagttggggactgggatgcggccagaaagacgtacccggcgtttacaccaaggtcactaactacctagactggattcgcgataacatgcgacca

SEQ ID NO: 17245 - DNA, 1686 bp, Artificial Sequence
  derived and/or modified sequence
atggacgccatgaagaggggactgtgctgcgtgctgcttctgtgcggcgccgtgtttgtttcaccgagtcaagaaatacatgcacggtttagacgcggagcgcgcagctaccaggtcatctgccgcgacgagaagacccaaatgatctatcagcagcaccaatcctggcttagacctgtcctgcgaagcaaccgagtcgagtattgctggtgtaactcaggtagagcacaatgtcactcggtgcccgttaaatcctgctcagagccccgttgttttaatggtggcacttgtcagcaggctctatacttttctgacttcgtctgccagtgtccagaaggatttgcaggtaaatgctgcgagatagatacccgggcgacctgttacgaggatcagggaatttcttacagaggaacatggagcaccgccgagtcaggtgcagagtgcacaaattggaatagttctgcactggcgcagaagccttattcaggccgcagacctgacgccattagacttggcctggggaatcacaattattgtagaaatccggatagagactctaagccctggtgctatgtattcaaggccggaaagtactcttcagagttttgctcaacgcctgcctgtagcgagggaaattctgactgctactttggaaatggctctgcatatagggggacgcattccctcaccgagtctggggcttcctgtctgccttggaattctatgattttaatagggaaggtttacaccgcgcaaaatcctagtgcacaggccctgggcctaggcaagcacaactattgccgcaaccccgacggcgacgctaagccgtggtgccatgtcctcaaaaacagacggctgacttgggaatactgtgacgtcccttcatgctctacctgtggactcagacagtactcccagcctcagttccggatcaaaggagggctatttgccgacattgcttcacatccgtggcaggcggcaatttttgccaagcacaggcggagcccgggagaaagatttctgtgcggcggaatactgatttcttcttgctggatcttgagtgctgctcactgttttcaggaaagatttccaccacatcatcttaccgtaattttgggccgtacataccgcgtggttccgggagaagaagagcagaaatttgaggttgagaaatacatcgtccacaaagagttcgacgacgatacctatgacaacgatatcgccttgctgcaactgaaatcagacagcagcagatgcgcacaggagagttcagtagtgcgaacagtgtgtttgccacccgccgacttgcagctgcccgactggaccgaatgcgaactgtctggatatgggaagcacgaagctttatcacctttctattcggaaaggctgaaagaggctcacgtgcggctgtatccatcttcgcgatgtacttctcagcacctgctgaatcgcaccgtaaccgataacatgttgtgtgcaggcgataccagaagcgggggcccccaggctaacctgcacgacgcctgccagggcgatagtggtgggcctctagtctgtctgaatgacggtcgtatgacactggtggggattatctcatggggcctaggctgtggccagaaagacgtaccaggtgtctacaccaaggtgactaattacctggactggattcgagataacatgcggccc

SEQ ID NO: 17246 - DNA, 1686 bp, Artificial Sequence
  derived and/or modified sequence
atggatgcgatgaaacggggtttgtgttgtgtgctcctgctgtgtggcgcggtgtttgtgtcaccatcccaggagatccatgcacgcttccggcgcggggcccgctcctaccaagtgatctgtcgggatgaaaagacccagatgatctaccagcagcaccagtcctggcttcgccctgtgctgcgctcaaacagggtcgaatactgctggtgcaattcgggacgcgcccaatgccactcagtgccagtgaagtcgtgctcagaaccgcgttgtttcaatggcggaacttgccagcaggcgctgtatttctccgatttcgtgtgccagtgtccggaagggttcgccgggaagtgctgcgaaatagacacccgggccacctgttacgaggaccaaggtatctcctaccggggaacttggagcaccgccgagtcgggagccgaatgcacgaactggaactccagcgccctcgcccagaaaccctactccggccgcagaccagacgcaatccggctgggactcggaaaccacaattactgccgtaacccggacagggacagcaaaccgtggtgttacgtgttcaaagcgggaaagtactcgagcgagttttgctcgaccccagcctgcagcgagggaaatagcgattgctactttggcaacggcagcgcttaccgcggaacgcattcgctcaccgaatccggagcctcatgcctcccgtggaactcgatgatcctcatcgggaaggtgtacaccgcacagaacccgagcgcccaggccctgggcttgggtaagcacaactactgcaggaacccggacggtgatgctaagccttggtgccacgtgctcaagaaccggcgcctgacttgggaatactgtgatgttccgagctgctcgacctgcggccttcggcaatattcgcaaccccaatttaggatcaaaggtggcctgttcgctgacatcgcctcacacccctggcaggcagccatcttcgcaaagcacagacggagcccgggagaaaggtttctttgcgggggcatactcatctcctcctgctggatcctctcggcggctcattgtttccaagaacgcttccccccgcatcacctcactgtgatccttggacggacttatcgcgtggtgcctggcgaagaggaacagaagtttgaggtggagaagtacattgttcacaaggagttcgacgacgatacgtatgacaacgacatcgctctgttgcaactgaagtccgactcctcccggtgcgctcaggagtcgtcagtcgtcagaaccgtttgcttgcctccagccgatctgcaactgcccgattggaccgaatgcgagctgtcgggctacggcaagcatgaggcactgagccctttctactcagaacggcttaaagaggctcatgtcaggctgtacccgtcgtcgagatgcacttctcagcacctcctgaatcggaccgtcactgacaatatgctgtgcgctggagatactcggagcggaggcccgcaagcgaatcttcatgacgcatgccagggagatagcggaggaccattggtttgtctgaatgacggacgaatgacgctggtcgggatcatctcatggggactgggatgcggtcagaaagacgtgcctggcgtctatactaaggtgactaattaccttgactggatccgcgacaacatgcgccct

SEQ ID NO: 17247 - DNA, 1686 bp, Artificial Sequence
  derived and/or modified sequence
atggacgccatgaagaggggtctctgttgtgtgctcctgctgtgcggggcagtattcgtttcccctagccaagagatacatgcaagattccgccgcggtgcccgctcctaccaggtgatctgcagggatgaaaaaactcagatgatctatcaacagcaccagtcttggctgcgaccagtcctacggtctaaccgcgtggaatattgctggtgcaattccggcagagctcagtgccattcagtgcccgtgaaatcttgttcagagccccggtgcttcaacgggggcacgtgtcagcaggctctgtatttcagcgacttcgtgtgtcaatgcccagagggttttgcaggaaagtgttgcgaaatagacacccgcgcaacctgttacgaagatcagggcatctcttacagaggtacctggtctacagccgagtcgggagcggagtgcaccaactggaactcgtcagccttggctcagaagccgtactctggaaggcgaccggacgctattcgtctggggcttggaaatcataactattgcagaaacccagatagagattccaagccgtggtgctatgttttcaaagcggggaagtacagttcagagttttgctctacgcccgcatgttccgaaggcaatagcgactgttatttcggtaatgggtctgcttatcgtggcacccactctttaactgagagcggggcttcctgcctcccatggaacagcatgattctcattggcaaggtgtatacggctcagaacccgtctgctcaggctttgggcctgggaaaacataattattgtcgaaaccccgatggcgatgcaaagccctggtgccatgtgctgaagaatagaaggttgacttgggagtactgtgatgttcctagttgctccacttgtggtctccggcagtatagccaacctcagtttcgcatcaaaggcggactgttcgccgacatcgctagccatccttggcaagccgcgatctttgctaagcaccggcgatcaccgggggaaagattcctgtgcggagggatactcatctccagctgctggatcctgtctgccgcgcattgtttccaagagagattcccaccgcatcatctgaccgttattctgggccgaacctacagagtggtgcctggcgaggaagagcagaagttcgaggtggagaagtatatcgtgcataaagagttcgatgatgatacgtacgataatgatatcgctctgctgcagctgaagtcagattcttccaggtgcgcccaggaatcttccgtcgtccgtacggtgtgcctgcctcctgccgaccttcaactccctgattggactgagtgtgagctgagtggatacggaaagcacgaagctctgtcccccttctactccgagcggctgaaggaggctcacgtgagactgtatcctagctctcgctgcactagtcagcatctcctgaaccggacagtgacagataacatgttgtgtgctggtgacacacggagtggaggcccgcaggctaacctgcacgacgcgtgtcagggtgactcgggcgggccattggtgtgtctcaatgacggcagaatgaccctggttggtatcatttcctggggactaggatgtggccagaaagacgtcccgggggtctacacaaaagtgacaaactatttggactggataagggacaacatgaggcca

SEQ ID NO: 17248 - DNA, 1686 bp, Artificial Sequence
  derived and/or modified sequence
atggatgcgatgaagagaggattgtgttgtgtacttttgttgtgcggagctgtatttgtctcgccgtcccaggaaattcacgctagattcagacgtggagcacggtcttatcaagtcatttgcagagatgagaagactcaaatgatttaccaacagcatcaaagttggctaagaccagtgctccgatccaatagagttgaatactgttggtgcaattctggacgagcacagtgtcatagtgttccagttaaatcctgctctgaaccaagatgttttaatggaggaacttgtcaacaggcgctttacttttcggactttgtatgtcaatgtccagaaggctttgctggcaaatgctgcgaaatagataccagagccacttgttatgaagatcagggaatctcttaccgcggcacatggtcaacagcggaatcgggtgcagaatgcactaattggaattcgtccgccttggcccaaaaaccttactcgggacgtcgaccagatgctataagacttggactaggaaatcacaattattgccgaaatccagatcgagattccaaaccatggtgttacgttttcaaagccggaaagtattcatctgagttctgttctacccctgcatgctcggagggaaattccgattgttacttcggaaacggatcggcttatagagggactcactcactcacagagtcgggagcatcatgccttccatggaattcaatgattttgatcggaaaagtatatacggcacagaaccccagcgctcaagccctgggcctgggaaaacataattattgtagaaatccagatggtgacgcaaaaccatggtgccacgtcctgaaaaatcgccgactcacatgggaatattgtgatgttccaagttgttcaacctgtggtttgcgtcaatactctcaaccgcagtttcggatcaagggcggattgtttgctgatattgcctctcatccttggcaagctgcaatctttgcaaaacaccgtcgctcaccaggagaacgatttctctgcggtggaattttgatctcgtcttgctggattctttcagcggctcattgctttcaggagcgattcccaccacatcatctaactgttattctgggacgtacttatagagtagtcccaggtgaagaagagcagaaattcgaagtcgagaaatacattgtccataaggaatttgacgatgatacttatgacaacgatattgctctattacagcttaaaagtgactcctcgcgatgtgcacaagagagctctgtcgtacgaaccgtttgtttacccccggcagaccttcaactgccagattggacagaatgcgaactttctggatatgggaaacatgaagcattgagtcccttctactccgaaagactgaaggaagcacacgtacgtctctacccttcttcgcgctgcacttcacagcatttgcttaaccgaacagtaactgataatatgctctgtgctggagacacgcgttcaggtggaccgcaagctaatcttcatgatgcttgccaaggcgattcaggtggtccgttggtttgtcttaatgatggacgaatgactctggtcggcatcattagttggggcctaggatgtggacaaaaggatgtgccaggagtctacactaaggttaccaactaccttgactggatacgtgataatatgcgtcca

SEQ ID NO: 17249 - DNA, 1686 bp, Artificial Sequence
  derived and/or modified sequence
atggatgctatgaaaaggggactatgctgtgtgctacttctgtgcggagctgtgtttgtttctccttcacaggaaatacacgcccggttcagaagaggggcacggtcttatcaagtcatctgtcgggacgaaaaaacacagatgatttaccagcaacaccagtcctggctgcgacctgtactccgttctaaccgagtggaatattgttggtgtaattccgggcgggcgcaatgtcatagtgtcccagtaaaatcctgttccgaacctagatgttttaacggagggacttgccagcaggcactatacttctctgatttcgtgtgtcagtgtcctgaaggatttgccggaaaatgctgtgagattgatactcgggccacatgctacgaagatcagggaatctcctataggggaacttggtctacagcagaaagtggggcagaatgtactaattggaactcttctgccttggcccagaaaccatacagtgggcggaggccagatgctatccgcctcggactcggaaaccacaattattgtagaaatcccgaccgtgactcaaaaccctggtgctacgtgttcaaagccgggaaatattcttccgaattctgctccactcctgcatgcagtgaagggaactcagattgctattttgggaacgggtccgcctaccgcggaacacattccctgacagaatccggggcatcctgcctcccttggaattcaatgatcctaatcgggaaagtttacactgctcagaacccatccgcccaggcactggggctcgggaaacataactattgccggaaccctgatggggatgctaaaccctggtgccatgttctaaaaaacaggcggctgacttgggagtattgcgatgtgcctagttgttcaacttgtggacttcggcagtacagtcagccccaattcaggataaaaggggggctcttcgccgatattgcttcacacccctggcaggctgctatctttgctaagcaccggcggtctccaggggagcgctttctttgcgggggaatacttatctcttcttgttggatactatcagctgctcattgcttccaggaaagattccctccacaccaccttactgttatcctcgggaggacatatagagtcgtaccaggggaagaagagcagaaatttgaagttgaaaagtacattgtgcacaaggagttcgatgatgatacttatgataacgatattgccttactccagctcaaatccgattcttcacgttgtgctcaggaaagttcggtcgtgaggactgtctgcctgccaccggctgatctgcagttaccagattggactgaatgtgaattgagtgggtatgggaaacatgaagcactgtcccctttttatagtgaaagactcaaagaagctcacgtgaggctgtatccctcttcaaggtgcacttctcagcatcttctaaacaggacggtcacagataatatgctctgcgcaggggatacaaggtctgggggaccacaggcaaatctccacgatgcatgtcagggagattccggagggcctcttgtttgtctaaacgatggaagaatgactctggtggggattatctcatggggattaggatgcggacaaaaagatgtccccggagtatatactaaagtgacaaattatctcgattggatccgcgataatatgagaccc

SEQ ID NO: 17250 - DNA, 1686 bp, Artificial Sequence
  derived and/or modified sequence
atggacgctatgaaacgagggctttgctgtgtcctgctgttgtgcggagctgtgtttgtcagcccatcacaggagatccatgcacgctttcgacggggtgctaggtcttaccaggtcatctgcagagatgaaaaaacacagatgatctatcaacagcaccagtcctggctacggcccgtgctgagatcgaaccgcgttgagtattgctggtgcaattcaggtcgagcccagtgtcactctgtgcctgtgaagagttgctctgaaccaaggtgcttcaatggtggcacctgccaacaagccctgtacttcagcgactttgtctgccagtgtccggaggggttcgcagggaaatgctgtgaaatagatacacgagccacctgctatgaggatcagggaatttcataccgcggcacttggtcaaccgccgagtctggagccgagtgtacaaactggaacagctcggcgcttgcgcagaagccttacagcgggaggagaccggacgccatccgcctggggttgggcaatcacaactattgccggaatccagaccgggacagcaagccctggtgctacgtgttcaaggcggggaagtactcatctgaattttgctccacccccgcctgctctgaaggcaactcggattgctacttcggcaacggatcagcttatagggggacccactccctcaccgagagcggcgcgagctgtctcccttggaatagcatgattcttatcggcaaagtttacacagcacaaaatccgagcgcacaggctttgggtctgggaaagcacaattactgtaggaaccccgacggagacgcgaagccctggtgtcatgtgctgaagaatagaaggctgacttgggaatactgtgacgtgccttcttgtagcacatgcgggttgaggcaatactcccagccccagttccgaattaaaggaggactgtttgcagacattgcatcacacccatggcaggctgcaatcttcgcaaagcaccggagatccccaggggagcgttttttgtgtggcgggatcctgatatcgtcctgctggatcctatctgccgctcattgcttccaagaaagattcccaccgcatcaccttacagtgatccttggacggacatacagggttgtgcccggagaggaggagcagaagttcgaagttgagaagtatattgtccataaggagtttgatgacgatacatatgataatgacatagcactacttcagctgaagtccgatagctcaaggtgtgcccaggagtctagcgtcgtaagaacagtgtgtctgccccctgcagacctccagctacccgactggactgagtgtgaactttccggctatgggaaacacgaggccctatcccctttctattcagagagactgaaggaagcccatgtgcggctttatcccagcagcaggtgtactagccaacacttgctgaatcgtacggtgacagataatatgttgtgtgctggggataccagatcaggtggtccccaggccaaccttcacgatgcctgccagggagattctggtggcccgcttgtgtgtctgaatgacgggcggatgaccctggtgggaataattagttgggggttagggtgtggacagaaggacgtgccaggagtctatacgaaagtgaccaactatttggactggatccgggacaacatgagaccc

SEQ ID NO: 17251 - DNA, 1686 bp, Artificial Sequence
  derived and/or modified sequence
atggacgcgatgaaacgcggcctgtgctgcgtcctcctgctgtgcggtgccgtgtttgtgtccccttctcaggaaatccacgcacgcttccgccggggagccagatcataccaggtgatctgccgagacgaaaagacccaaatgatctaccagcagcatcagtcctggctccggccagtgctgagatcgaatcgggtggaatactgctggtgcaactccggtcgggcccagtgccactcggtgccggtgaagtcgtgctcggaaccgcggtgcttcaatggaggcacctgtcagcaagcactctacttcagcgacttcgtgtgtcagtgcccagaaggattcgcaggaaaatgctgcgagattgatacccgggccacttgctatgaggatcagggaatcagttaccggggaacctggtcaactgcggagtcgggcgcagagtgtactaactggaacagctcggcgctggcccagaagccatactccggcagacgacccgacgccatccggctgggcctcgggaatcacaactactgccggaatccagaccgggactccaagccttggtgctacgtgttcaaggccggaaaatactccagcgaattctgttccaccccggcctgttcagaaggcaactccgattgctacttcggaaacgggtccgcctatagaggcactcacagtctgaccgagtcaggagcctcgtgcctgccatggaacagcatgatcctgatcggtaaggtgtacactgctcagaatcctagcgcgcaagcactgggcctcggcaagcacaattactgccgaaatccagatggggacgcaaaaccgtggtgccatgtgctgaagaacaggcgccttacctgggagtactgcgacgtgccctcgtgctcgacctgcggcctgagacaatactcgcagccccagttccgcatcaagggcggacttttcgccgatatcgcgtcccatccgtggcaggcagccatcttcgccaagcatcgccgcagccctggagaacgctttctgtgcggaggaatcctcatctcgtcatgctggattctctccgcagctcactgcttccaggaaagatttccaccgcatcacctgacggttatcctcggccgcacttaccgggtggtgcctggagaggaagaacaaaagttcgaggtcgagaagtacatcgtccacaaggagtttgatgacgacacctacgacaacgacatcgctctgctgcagcttaagagcgattcgtcccggtgcgcccaggagtcctcggtggtgcgcaccgtgtgcttgccaccggcggatctccagctgccagattggactgagtgtgaactgtccgggtacggaaagcacgaggcgctgtcgccgttctactcggagcggctgaaggaggcccatgtgcggctgtatccgtcgtcacggtgtacctcgcagcatctcctgaacaggacggtcactgataacatgctttgcgccggagacactcgctcaggaggaccgcaggctaacctccacgatgcctgtcagggggactccggtggaccgctggtttgcctcaacgacggtcgcatgaccctcgtgggcatcatcagctgggggctgggttgcggacagaaggacgtgccgggagtgtacaccaaggtgactaactacttggactggattagagacaacatgcgcccg

SEQ ID NO: 17252 - DNA, 1686 bp, Artificial Sequence
  derived and/or modified sequence
atggacgccatgaagagaggcctgtgctgcgtgctgctgctgtgtggagccgtgtttgtgtctccttcccaagaaatccatgcacgattcaggcggggcgccagaagctaccaagtgatttgtcgggatgagaagacccagatgatctatcaacagcatcagagttggctgcgaccggtgctgcgaagcaatcgcgttgagtattgctggtgtaactccgggagagctcaatgccactctgtcccagtgaaatcttgtagcgagccccgctgttttaacggaggtacttgccagcaagccctgtactttagtgactttgtgtgtcagtgcccggaaggttttgcaggaaaatgctgtgagatcgacacccgcgccacctgctacgaggatcaaggcattagttatcggggcacatggagcaccgcagagtctggtgcggagtgcacaaactggaactcaagcgcactggcacagaagccttacagcggtcgcagaccggacgcaattcgcctgggcctgggtaaccacaactactgccgcaacccagatcgggacagtaagccctggtgctatgtcttcaaggctggtaaatattcctcggagttttgcagtacccctgcttgcagcgaaggcaactcagactgctacttcggtaacggtagtgcataccggggtacccacagtcttactgagtcgggtgcgtcatgtttgccctggaacagcatgattcttatcggcaaggtctacactgctcagaatccctcggctcaggctttaggccttggaaagcacaattattgccggaatccagacggcgacgccaaaccttggtgccatgtgctgaagaatcggagactcacgtgggagtattgcgatgtgccatcttgctcaacctgcgggctgagacaatactcccagcctcagtttagaataaaaggaggtctgttcgccgacatcgcttcccacccgtggcaggctgccatcttcgcaaagcataggcgatctcctggcgagcgcttcctatgtgggggaatcctgatatcttcttgttggatcttgtccgcggcccactgttttcaggagcgcttccctccccatcacttaacagtaatcctcggcagaacttatcgcgtggtcccaggtgaagaggagcagaaatttgaagtcgagaagtatatcgtccataaagaattcgatgatgacacctatgacaacgacatagcactcctgcagttgaagtccgatagttctagatgcgcccaggaatcctcggtggtgcgcaccgtgtgtctaccacccgcggatctacagctgcctgactggactgagtgtgaactatcagggtacggaaagcacgaggccctgtctccattttacagcgagcggctcaaagaggcgcacgtccggttgtacccctcttctcgatgcacctcacagcacttgctgaatcggaccgtgactgacaacatgctctgtgcaggggatactagatccggggggccccaggcaaacctgcacgatgcttgccaaggagactccgggggcccactagtatgcctgaatgatgggcgaatgacacttgtaggaatcatttcctggggtctgggctgtggacaaaaagacgttcctggggtgtatacaaaggtcaccaactatctggactggatccgggataatatgcgtccc

SEQ ID NO: 17253 - DNA, 1686 bp, Artificial Sequence
  derived and/or modified sequence
atggatgccatgaagaggggtctgtgctgcgtccttcttttgtgtggagcggtgttcgtcagtccgagtcaggaaatacatgccaggtttcgtcgcggagctcggtcttatcaggttatttgccgggacgagaagactcagatgatctatcagcaacaccagtcatggctgcggcctgttttgcgctccaacagagttgagtactgctggtgcaactcaggtcgagctcagtgtcattcagtgccagtgaagagctgctcagaaccaagatgttttaacggggggacctgtcagcaggccttgtatttcagcgactttgtgtgtcagtgcccagagggctttgcaggtaagtgctgtgaaatcgacactcgagccacttgctatgaggatcagggaatcagctaccgcggaacctggtcaaccgctgagagcggggctgaatgtacgaattggaattcgtcggccttggcccagaagccatactctggaaggagacctgatgctatccggcttgggctcgggaatcataactactgtaggaatcccgatcgtgatagtaagccatggtgctacgttttcaaagcaggcaagtactccagtgagttttgtagcacgcctgcatgttcagaggggaatagcgactgctatttcggtaacggtagcgcatatagaggcacgcactcgctcacagagtcgggagccagttgtctcccctggaatagcatgatccttatcgggaaggtatacaccgctcagaacccatccgctcaggcgctgggactggggaaacataactactgtagaaatcctgatggcgacgccaagccctggtgccatgtactgaaaaatagacggctcacctgggaatattgcgatgttcccagctgcagcacctgtggccttcgccagtacagtcagcctcaattccgcatcaaaggcggactgttcgcggacatcgccagccacccctggcaggcagcgattttcgctaagcacaggagatctcccggggaacggttcctatgcggcggtatcttaatcagcagctgctggattctgagcgctgcacattgtttccaggagagattccccccccaccacctcacagttatcctcggtcgcacctatagggtggtaccgggagaagaggaacagaagtttgaggttgagaaatacatagtccataaggagttcgacgacgacacatatgacaatgatatcgctctgttgcaactgaagtcagatagttcacgctgtgcacaggagtcatcagttgtaagaactgtgtgcctcccccccgctgacctgcagctgcctgattggaccgagtgtgagctgtctggctatgggaagcacgaggctctgtcaccgttttattcggagcggttaaaagaagcccacgtgaggctgtacccgtcgtctcggtgtacctctcagcacctgttgaatcgaacagtaacagataatatgctatgtgctggggatacccgcagcggtggcccacaggcaaacctacacgacgcctgccagggcgactccggggggcctttggtctgcctcaatgacgggcgcatgactctagtgggcattatctcttggggcttgggttgcggtcagaaggacgtaccgggggtgtatacaaaagtgacaaactatctggactggattcgggataatatgcgtcct

SEQ ID NO: 17254 - DNA, 1686 bp, Artificial Sequence
  derived and/or modified sequence
atggatgccatgaaacgcgggttgtgttgcgtgctgctgctgtgcggagccgtgtttgtttcaccgtcccaagaaatacacgcccggttccggcgaggagctcgcagctaccaggtgatttgcagggacgagaaaactcagatgatctaccagcaacatcagtcctggctgcggcccgtgctgcggtcgaaccgcgtcgaatactgttggtgtaactccggaagagcccaatgtcattccgtgcctgtgaagtcctgctccgagccccgttgctttaacggtgggacttgccaacaggcactgtacttctcagactttgtgtgtcagtgcccagagggattcgctggtaaatgttgtgagattgatactagagctacgtgttacgaagatcagggcatctcgtaccgcggaacctggtccacggcggaatccggtgccgaatgcaccaactggaattcatcagcccttgcccaaaagccatactcaggccggcgccccgacgccatacgcctgggactcggaaaccataactactgccggaatccagatcgcgattcaaagccatggtgctacgtgttcaaagcaggcaagtatagctccgaattctgctcgacccctgcttgctccgagggaaacagcgattgctactttgggaatggatcagcttaccgcggcacgcactccctcactgaatccggcgcctcgtgcctgccgtggaacagcatgatccttatcggcaaggtctacaccgctcagaacccctccgctcaggccctgggacttggcaagcataactattgccgcaatccggatggagacgcgaagccctggtgtcatgtcctcaaaaaccgtaggctcacgtgggagtattgcgatgtcccgtcatgttcaacctgtggattgcgacagtactcacagccgcagtttagaatcaagggcggactgttcgcggacatcgcatcgcacccgtggcaagcggccatcttcgcgaagcatcggcgcagcccaggagaacgcttcctctgtggcggcatcctgatctcgtcctgctggatcttgtccgccgcgcattgcttccaggagcggttcccaccccatcatcttactgtgatccttggacggacttaccgcgtcgtgcctggcgaagaagagcagaagttcgaggtggagaagtacatcgtgcacaaggaatttgatgacgacacttatgacaatgatatcgccctcctgcaactgaagtcggactcctcaagatgtgcacaagagtccagcgtcgtcaggaccgtgtgtctcccacccgcagacctgcaactgccagattggaccgaatgcgagctgtcggggtacgggaagcacgaagcgctgtcaccgttttactccgagagattgaaagaagctcatgtgcgcctgtacccttcgtcgagatgtacgtcccaacacctgctcaatagaactgtgaccgacaatatgctgtgcgcaggcgacacccgctcaggaggaccgcaggcaaacctgcacgatgcatgccaaggtgattcgggaggtccgctcgtgtgcctgaacgatggccgcatgaccctcgtgggaattatctcgtgggggttgggatgtggacagaaagacgtgccgggtgtgtacactaaagttactaactacctggattggatccgggataacatgcgcccg

SEQ ID NO: 17255 - DNA, 1686 bp, Artificial Sequence
  derived and/or modified sequence
atggatgccatgaagaggggcctgtgctgcgtcctgctcctatgcggagcggtgttcgtgagcccttcccaagagatacacgcaaggtttcggcgaggagcaagaagctaccaagtgatctgcagagatgagaaaacacagatgatctatcagcagcatcagagttggctgaggcctgttcttaggagtaatcgcgtagaatattgttggtgcaatagtggacgtgcacaatgccattctgtccccgtcaaatcgtgctctgaaccgcgctgttttaacggcggcacctgccagcaggcactgtatttttccgacttcgtctgccagtgccccgaagggtttgcgggcaaatgctgcgagatcgacactcgggcaacttgttacgaggatcaaggaattagctaccgaggcacctggagtaccgccgaatcaggggcagaatgtactaattggaatagttcggcactggcccagaagccatactctggtcgccgcccagacgctatccgcctgggccttggtaaccataactactgtcgtaaccccgaccgagactcgaagccatggtgctatgtgtttaaggccgggaaatattcttctgaattttgctccaccccagcctgttccgagggtaattcagattgctacttcgggaacggatcagcctatcgcggaacacactctctcacagagtcaggcgcaagttgtctgccttggaacagtatgattcttattgggaaagtttacactgctcagaacccgagtgcccaggcattagggctggggaagcacaattattgtcgaaaccccgacggcgacgcgaagccgtggtgtcacgtgttgaaaaatcgtcgtttgacctgggagtattgcgatgtcccctcctgctctacgtgtggacttaggcagtactcccaaccccagtttaggatcaaaggggggttgttcgctgatatagccagtcacccctggcaggccgcaatattcgccaagcatcggcgaagccctggtgagcggttcctatgtgggggcattctgatttctagctgttggatattgtccgccgctcattgcttccaggaacggttcccgccacaccacttaaccgtgatcctgggaagaacgtacagggtagttcctggggaagaagagcaaaaatttgaagtggaaaagtacattgtgcacaaagagtttgatgatgacacatacgacaacgacattgccctcctgcagctaaagagcgattcttcaagatgtgctcaggagagctctgtggtgagaacagtgtgcctgccaccggcagacctccaactccccgattggacagaatgcgaacttagcgggtatggaaagcacgaggccttgtcacctttttactctgaacgactgaaggaggcccacgtgaggctctatcccagctcgaggtgtactagccagcacctgctgaaccgcacagtcaccgataacatgctctgcgcaggggatacgaggagcggtggtccccaagctaacctgcacgatgcctgccagggcgattccgggggccccctagtatgcctcaatgatggccggatgaccctggtcggcataatttcctggggcctgggctgcggccagaaagacgttccgggcgtctacacaaaagtgactaactacctcgattggataagggataatatgcgacca

SEQ ID NO: 17256 - DNA, 1686 bp, Artificial Sequence
  derived and/or modified sequence
atggatgctatgaaaagaggtctctgttgtgtcctcctcctttgcggggcggtattcgtgagcccctcccaggagatccatgcccgctttagacggggcgctcggagttatcaagtcatttgccgggacgagaagacgcagatgatttatcagcagcaccagtcttggctcaggccggtacttcgctctaatcgagtggagtattgctggtgtaattctgggcgcgctcagtgccacagtgtgcccgtgaaatcctgcagcgaacccaggtgttttaacggaggaacctgtcagcaggccttgtatttctccgacttcgtttgtcagtgccctgagggcttcgctggaaagtgttgtgaaatagatacccgggcgacatgttacgaagaccagggaattagttaccgaggcacctggtctaccgcagaatcaggggccgagtgtaccaactggaatagcagcgctcttgcacagaaaccatattccggaaggaggcctgacgctattcggctgggccttggtaatcacaattactgtcggaacccagatcgagattccaagccatggtgctatgtgtttaaagccgggaagtacagcagcgaattctgctctacacccgcttgttccgaaggcaactctgattgttacttcggtaacggtagtgcctacagaggaactcactctcttacggaaagtggggctagctgtttgccttggaatagcatgatactgatcggtaaggtgtacacggcccagaacccctctgcacaagccttgggcctgggcaagcataactattgcaggaatcctgatggtgacgcaaaaccttggtgccacgttcttaaaaaccgacgcctcacctgggagtactgtgatgttccgagctgtagcacatgtgggctgcggcaatattcccagccacaattcagaatcaagggcgggctgtttgccgatatcgcgagtcacccttggcaggccgccatctttgcgaaacacagacgatctcccggggagagattcttgtgtggcggaatcctcatctctagctgttggatactcagcgcggcccattgctttcaggagcgatttcctccacaccatcttacagtcatcctcggccgaacgtaccgagtggtcccaggggaggaagagcagaaatttgaggtagaaaaatacatcgtgcataaggaatttgatgacgacacctacgacaacgatatagcactgctgcaactgaagtccgactcatcccgctgcgcacaagaaagctccgtcgtgcgcacagtttgtcttcctccagccgatctgcaactgcctgactggacagaatgcgagctgagtgggtacggtaagcacgaggccctgtccccgttttacagcgagcgccttaaggaggctcacgtgagactgtatcccagcagcagatgtacaagccaacatttgcttaaccgcacagtgaccgacaatatgctttgtgctggcgacactaggtccgggggaccacaggccaatcttcatgacgcttgccagggtgattccggaggtccactcgtctgtcttaacgatggaaggatgaccctggtaggaattattagctggggcctcggctgcggtcagaaggacgtgccaggcgtgtacaccaaggtaacaaactatctggattggatcagagacaatatgcggcca

SEQ ID NO: 17257 - DNA, 1686 bp, Artificial Sequence
  derived and/or modified sequence
atggacgcaatgaaaagaggattatgttgtgtattgctgctgtgcggggcagtgtttgtgtccccttctcaggagatacatgctaggttccgcagaggcgcaagatcataccaggttatctgtagggacgaaaaaacccagatgatttaccaacagcaccagagttggctgagacccgttctccggtcaaacagagtggaatattgctggtgcaactcagggcgtgcacagtgccattccgtgccggtgaaatcttgctctgagcccagatgttttaacggaggcacctgccaacaggcactgtacttttccgatttcgtgtgccagtgtcctgagggattcgctggaaagtgttgcgaaattgatacacgcgcaacctgctacgaagatcagggcatcagctacaggggcacatggagtactgcggagagcggtgctgaatgcacaaattggaactcaagcgctctcgcacaaaaaccgtactcaggaaggagacctgatgccatccgactgggactgggaaaccataattattgccggaatcccgatagagactctaaaccgtggtgttatgtgttcaaagctggtaagtatagctctgagttctgctccacccctgcctgctctgagggcaattcagattgctacttcggcaatggatcagcttatcgaggcactcacagtctgacagagtcaggagcatcgtgtctgccatggaacagcatgatcctcatcggtaaggtctacaccgcacagaacccctccgcgcaggccctgggattagggaagcacaactactgtcgcaaccctgatggcgacgcgaagccctggtgtcatgttctgaagaatagaaggctgacctgggaatactgcgatgtgccttcttgctccacctgcggcctgcggcagtatagccagccccaatttcgaattaaggggggtctgtttgccgatatcgctagccatccttggcaggccgcaatattcgctaaacaccgacgcagtccaggcgaacggttcttgtgcgggggaatcctcatttcctcctgctggatcctgagtgctgcacactgcttccaggaaagattccctccacatcatttaactgttattctcggcagaacataccgtgtggttcccggcgaagaggagcagaagttcgaagtggagaaatatatcgtgcacaaagagtttgatgacgacacctatgataacgatattgctttattgcaactgaagtcagactccagcagatgcgcacaagagagctctgtcgtgcggaccgtgtgcctccctcccgccgatctgcaactgcccgattggacagagtgcgagctcagcgggtacggcaagcacgaagcactatctcctttttactctgagcgcctgaaggaagctcacgttcgcctctaccctagctctaggtgtacgagtcagcacctcctgaaccggacagtaacagataacatgttatgtgcaggcgacacaaggagtggcgggccacaggcaaatctgcacgatgcctgccaaggagactcgggaggacctctggtttgcctgaacgacggtagaatgactctggtgggaatcataagctggggattaggctgcggccaaaaggatgtgcctggagtctacactaaagtcaccaattaccttgactggatcagggacaacatgagacct

SEQ ID NO: 17258 - DNA, 1686 bp, Artificial Sequence
  derived and/or modified sequence
atggatgccatgaagcgtgggctttgctgcgtgctcctgctgtgcggtgcagtgtttgttagcccatcgcaagaaatccatgcaaggttccgcagaggcgcacgctcgtaccaagtcatttgcagggatgaaaagactcagatgatttaccagcaacatcaatcgtggctgcgccctgtccttagatcgaacagggtggaatactgctggtgcaactccggccgcgcacaatgccatagcgtgcctgtcaaatcatgttccgaaccccggtgttttaacggaggaacctgtcaacaggcactgtacttttccgattttgtgtgtcagtgccctgaagggtttgcagggaaatgttgcgaaatcgacactcgcgcgacttgttacgaagatcagggtatctcctacaggggaacctggtccactgcagaaagcggtgcagagtgtaccaattggaattcctctgcactggcccagaaaccctattcgggtcgcaggccggatgccattcgcctcggacttggaaaccacaactactgtcgtaacccagatcgggatagcaagccttggtgttacgtgtttaaagcaggaaaatactcttcggaattttgctccacccccgcatgtagcgagggtaacagcgattgttactttggaaacgggagcgcataccggggaacccacagtctgactgaatcgggggcatcttgtctcccctggaattccatgatcctgatcggaaaggtgtataccgcccagaacccttcagcacaagcactgggtctgggaaagcacaactactgcaggaatccagacggtgatgccaagccctggtgccacgtgcttaagaaccgcagattgacctgggaatactgcgacgtaccctcatgcagcacctgcggcctccggcagtactcccagccacaattcagaattaagggaggcctgttcgcagacatcgcctcgcatccttggcaggctgcaatattcgccaagcatcgccgaagccccggggagcgttttctttgtggaggaattctgattagctcatgctggatcttgtcggctgcacattgctttcaagagcggtttccgccacaccatctgaccgtgatcctggggcgcacctaccgagtggtcccaggtgaggaagaacagaagttcgaagtggagaagtacattgttcataaagaattcgatgatgatacctacgataatgatattgcactgctccaactgaagagcgacagctccagatgcgcgcaagaaagctcggtcgtgcgcaccgtctgtctccccccggccgatctgcagctccctgattggacggagtgcgaactttcaggttacgggaaacacgaagcacttagccccttctactcggaaagactcaaagaagcacatgtgcgactttacccttcatcccggtgtacctcgcaacatcttctgaatcgtaccgtgacggacaatatgctttgtgctggggatacccggtcaggcggtccacaagcgaaccttcatgatgcctgccagggtgattcaggagggccactggtgtgcctgaatgatggcagaatgactctcgtgggtatcatttcctggggtcttggttgtggtcaaaaggatgtgcccggcgtctacactaaagtgaccaattaccttgattggatccgggataacatgcgtccg

SEQ ID NO: 17259 - DNA, 1686 bp, Artificial Sequence
  derived and/or modified sequence
atggacgccatgaagcgcggtttgtgttgcgtcctgctgctctgcggagccgtatttgtctcacctagccaagaaatccatgctcgcttcagacggggtgcgcgctcttaccaggtgatctgccgcgacgaaaagacccaaatgatataccagcagcaccagagctggctccgcccggtgcttcgcagcaatcgggtcgagtactgctggtgtaactccggacgggcccaatgccacagcgtgccggtgaagtcctgctcggaaccacggtgtttcaacggaggaacctgccagcaggcactttacttctcagactttgtgtgccagtgtcctgagggattcgctggaaagtgctgcgagattgacacccgcgcaacttgttacgaagatcaggggatctcctacagaggtacctggtcgacggccgagtcaggagcagagtgtaccaactggaatagcagcgcgttggcccagaagccgtattccggtcgtcgaccggacgccatcagactcggtctgggcaatcacaactactgccggaacccggatcgcgactcgaaaccttggtgctacgtctttaaggcaggaaagtactcgtcggaattctgctcgacgccggcttgttcagaaggaaattccgactgctacttcggaaatgggtccgcgtacaggggaacccactccctgaccgaaagcggagcatcgtgccttccatggaactcgatgatccttatcgggaaagtgtacactgctcagaacccttccgcgcaagccctcgggctcggcaaacataactactgccgaaacccggatggcgatgcgaagccgtggtgccatgtgctcaagaaccggagattgacttgggaatattgcgatgtccccagctgctcaacttgcggcctgcgccaatacagccaacctcagttccgtatcaaggggggcctgtttgcagacattgcgtcccacccctggcaggccgcaattttcgccaagcatagacgtagcccgggggagaggttcttgtgcggaggcatcctgatctcatcgtgctggatcttgtcagcggcacactgcttccaggaacggttcccaccccatcacctgacggtgatcctgggccgcacgtaccgggtggtgccaggcgaagaagaacagaagtttgaggtcgagaaatacatcgtccataaggaattcgacgacgacacttacgataacgatattgctcttttgcagctgaaatcagactcgtcgcggtgtgcccaggaatcatcggtggtgagaaccgtgtgcctgccgcccgcggatctgcagcttcctgactggaccgagtgcgaactgagtggctatggaaagcacgaggctctgtcgccgttctacagcgaacgcctgaaagaggcgcacgtccgtctgtacccgtcatcccggtgtacttcgcagcacctgctgaaccgcactgtgactgataacatgctctgtgccggagacacgcggtccgggggaccacaagcgaatcttcatgatgcctgccaaggagattcaggaggcccactcgtgtgtctgaatgacggtaggatgaccctcgtaggtatcatctcgtggggactcggttgtggccaaaaggacgtgccgggagtctacaccaaagttactaactacttggattggattagggacaatatgcgtccg

SEQ ID NO: 17260 - DNA, 1686 bp, Artificial Sequence
  derived and/or modified sequence
atggatgccatgaagcgaggactttgttgcgtgctgctgctttgcggcgcagtgtttgtgtcaccatctcaggagattcacgcaagattcagaagaggcgcgcgctcataccaggtgatttgtagggatgaaaaaacccagatgatttaccagcagcaccaatcgtggcttaggcctgtgcttcgatctaaccgtgtggaatactgttggtgcaactcgggaagagcacaatgtcattcggtgcctgtgaagtcctgttcagaacccaggtgtttcaatggtggaacctgtcaacaggccttgtacttttcagattttgtctgccagtgccctgagggattcgccgggaagtgttgtgaaatagacacgcgcgcaacttgttacgaggaccaaggaatttcgtacaggggaacctggtcgactgctgaatcgggagccgaatgtaccaattggaactcgtcggctctggcccaaaagccatactcgggtcgacgtcctgacgcaattaggctcgggcttggtaaccacaactactgtcgcaatcccgatcgcgattctaagccttggtgttacgttttcaaagcagggaaatactcctcagaattttgttcgaccccggcttgttcggaaggtaactcggactgttactttggcaacgggagcgcgtaccggggcacccatagcttgaccgaatcaggtgcctcctgcctgccctggaattcgatgatacttatcggcaaagtgtataccgcgcaaaatcccagcgcccaggcccttggacttggcaaacataactactgcagaaaccctgacggcgacgcaaagccgtggtgtcacgtgctgaaaaatcggcggctgacctgggaatactgcgacgtcccgagctgctccacttgtggtctgaggcagtacagccagccccagtttagaatcaaaggaggtctttttgcagatattgcttcacatccatggcaagcagccatcttcgccaaacataggagatcgccgggagaacgctttctttgtggaggaattttgataagttcgtgctggattctttccgctgcgcattgttttcaagaaagatttcctcctcatcaccttactgtgattttgggtagaacctacagagtggtcccgggagaagaggagcaaaagtttgaggttgaaaagtacatcgtgcacaaagagtttgatgacgatacttacgataatgacatcgcactcctgcaactgaaatcggactcatcaagatgtgcacaagaatcgtcggtggtgcggaccgtgtgcctgccaccagcagaccttcaactccctgactggaccgagtgtgagctcagcggttatggaaagcatgaagccctcagcccattttactccgagcgattgaaagaggcccacgttcggctgtatccatcctcgagatgcactagccaacatcttctgaatcgtactgttactgataacatgctgtgtgcaggtgatacccgttccggaggaccacaggcaaacctgcatgacgcgtgccaaggggattcgggtggaccactggtgtgtctcaatgacggtcggatgactctggtggggatcatctcgtggggtcttggctgcggacaaaaagatgtgcccggagtgtacactaaggtgaccaattacctcgattggattcgagacaatatgaggcca

SEQ ID NO: 17261 - DNA, 1686 bp, Artificial Sequence
  derived and/or modified sequence
atggatgcaatgaagagaggactttgctgcgtcttgctgctgtgtggggctgtgtttgtgtccccgtcccaggagatccacgcgcggttccggcggggagccagatcgtaccaggtgatctgtagagatgaaaagactcagatgatttaccagcaacaccagtcttggctgcgcccggtgctccgctccaatagggtggaatattgctggtgcaactcaggtcgagcccagtgtcactcagtgcccgtcaaatcatgcagcgagccgcggtgctttaatggcggaacttgtcagcaggccctgtacttctctgacttcgtctgccagtgtccagagggattcgcgggaaagtgctgcgaaatcgatacgagagctacttgttacgaagatcaaggaatcagctatcggggaacttggtccaccgccgaatccggggctgagtgcacgaactggaactcatccgcactcgcccaaaagccgtacagcggacggcggcctgacgcgatccggcttgggcttggcaaccacaactactgcaggaatccagaccgcgacagtaagccttggtgttacgtgttcaaggccggtaaatactcatcggaattttgctcgactcccgcttgctccgaggggaactcagactgctacttcggaaacggaagcgcgtaccgcggcacccatagcctgaccgagtcgggggccagctgtctgccgtggaatagcatgattctcatcggcaaagtctacaccgcccagaacccgtcagcgcaggcgcttggcttgggtaagcacaattactgtagaaacccggacggagacgcaaagccgtggtgccatgttctgaagaatcgccgcctgacctgggaatactgcgatgtgccctcctgctccacttgtggccttcgccagtactcgcagcctcagttccgcatcaagggcggactcttcgctgacatcgccagccacccttggcaagcagccatatttgcaaagcatcgacgctccccgggagaacggttcctctgcggaggcatcctgatttcgagctgctggattctgtcggccgcgcattgcttccaagaacgcttcccgccgcaccatttgaccgtgatcctggggagaacttatcgcgtcgtgcccggcgaggaagaacaaaaatttgaggtggagaaatacatcgtccacaaggagttcgacgacgatacctacgacaacgacatcgccctgctgcaactgaaatcagattcgtcgcgctgcgctcaagaaagctcggttgtgaggaccgtctgtctcccaccggccgacctccaactcccagattggaccgaatgcgagctctccggatacggtaagcacgaagcactcagtcctttctactccgagagactcaaggaagcccacgtgcgtctctacccatcgtcgaggtgcacttcacagcatctgctgaaccgcaccgtgactgacaacatgctgtgcgcaggagacactcggtccggtggcccgcaggcaaatctgcatgatgcgtgccagggagactcgggtggacctctggtatgcttgaacgatgggagaatgaccctggtgggcatcatcagctggggactgggatgcggacaaaaagatgtgccaggagtgtacacgaaggtcaccaactacctggactggatcagggataatatgcggcca

SEQ ID NO: 17262 - DNA, 1686 bp, Artificial Sequence
  derived and/or modified sequence
atggatgcaatgaagaggggactctgttgtgtccttctcttgtgtggagcagtgtttgtgtcaccaagccaggagatccatgcaaggtttaggcgaggcgctcgctcgtaccaagtgatttgccgcgacgaaaaaacgcaaatgatttaccagcagcaccagtcgtggttgcgtcctgtcttgcgctcgaatcgggtggagtactgttggtgtaactcgggtcgcgcacagtgtcacagtgtccctgtcaagagctgttccgaacctcggtgtttcaacggtggtacttgtcaacaggccttgtactttagcgacttcgtgtgtcaatgtccagaaggatttgcgggtaaatgctgtgagatcgatacccgggctacctgttacgaggatcaaggaatatcctacagggggacttggtcaactgccgagtcgggagccgaatgtactaattggaatagctcggcactggcgcaaaagccctacagcggaaggcggccagacgcgattcggctgggcttgggtaaccataactactgtcgtaacccagatcgagactcaaaaccttggtgctatgtgtttaaggcgggtaagtactcgagcgaattttgctcgactccagcctgtagcgaagggaactcggactgttacttcggtaatggttccgcttatagaggcacgcatagcttgactgaatcgggcgcaagctgtctgccgtggaactcgatgattctcattggcaaggtctacaccgcacaaaacccttctgctcaagcacttggcctcgggaagcacaattactgcaggaacccagacggagatgcaaaaccgtggtgtcacgtgctcaaaaatcgcaggctcacctgggaatactgcgatgtgcctagttgcagcacctgcggccttagacaatactctcagccccaattccgcataaaaggtgggctctttgcagacatagcatcccacccatggcaagctgcgatctttgcaaagcataggcgttccccaggtgaaagattcctttgcggaggaatccttatttcctcgtgctggatcctttcagcagcacattgcttccaggagcgatttcccccacaccaccttaccgtcatacttggaaggacgtatagagtcgtgccgggagaagaggaacaaaagttcgaagtcgagaagtacatcgtgcataaagaatttgatgatgacacttacgataacgatattgcactgctgcagttgaagtcggattcctcgcgatgtgcgcaggaatcatcagtggtgagaactgtttgtctgcctcctgcggatctgcaacttcccgactggaccgaatgcgagctgtccggctacggaaagcatgaagctctttctccgttttactccgagcgccttaaagaagcacacgtgcgactctacccatcctcaagatgtactagccaacatcttcttaataggactgtgactgataacatgctctgtgcaggtgacactcggtcaggaggaccacaagccaatctgcatgatgcctgccagggagacagcggagggcctctcgtctgtctgaacgatggtcggatgaccttggtgggcataatcagttggggactgggttgtggccaaaaggatgttccaggcgtgtacactaaagtgaccaactaccttgattggattcgggataacatgcgcccc

SEQ ID NO: 17263 - DNA, 1686 bp, Artificial Sequence
  derived and/or modified sequence
atggacgcaatgaaacgcggtctatgttgcgtcctattgctgtgtggggctgtattcgtttcccctagccaggagatccatgctcgttttaggaggggcgctaggtcctatcaagtgatttgccgtgacgagaaaacccagatgatttatcagcaacaccagtcgtggctgagaccagttctgcggtctaatagggtggagtattgttggtgcaactcaggacgtgcccagtgtcactcagttccagtcaagagctgtagcgaaccacgctgcttcaacggcggcacctgccagcaggcgctgtatttcagtgacttcgtgtgccagtgcccagaaggattcgccggtaaatgctgcgagatagacacccgggcaacctgctacgaagaccagggtattagctatcgcggtacatggtcgaccgccgaatcaggcgccgaatgtacgaattggaactcctccgcgctggcacagaagccatatagcggccgacgcccggatgcgattcgcctgggtctcggcaaccacaactactgccgcaatccggaccgcgatagcaaaccatggtgttacgtctttaaggcgggtaagtatagttccgaattctgctccactccagcttgttcggaaggcaactccgattgctacttcggtaatggaagcgcgtaccgcggcacgcacagcctgaccgagagcggcgcgtcgtgtctaccgtggaatagcatgatattgatcggtaaagtgtacaccgcgcagaatcctagcgcacaggcgctcggcctgggaaagcacaattactgcagaaatcctgacggtgatgcgaagccatggtgccatgtgctgaaaaaccgccgcctcacatgggagtactgcgatgttccgtcatgctccacctgtggccttcgccagtacagccaacctcagttccggattaagggcggtctgtttgccgatattgcatctcatccctggcaggccgcgatctttgcaaagcatcgccgcagtccgggcgagcggtttctgtgtggcggcatcctgattagctcgtgctggatcttgtctgcagcccactgcttccaggaacgcttcccgccacaccacctgaccgtgatactgggccgcacgtaccgcgtggtgcccggtgaagaagaacagaaatttgaggtggaaaaatacatcgtgcacaaggagttcgacgacgacacctatgacaacgatatcgcactcctgcaattgaagtctgacagcagcagatgtgcccaagaatccagtgtggttagaacggtgtgtctgccaccagcggacctgcagctgcccgactggaccgagtgcgagttaagcggttatggcaagcacgaagccctaagccctttctacagcgaacgcctaaaagaggcccacgtgcggctgtacccttcttcgcgctgcactagccagcatctgctcaatcgcactgttactgacaacatgctgtgcgcaggtgacacgcgtagcggtggcccacaagccaatctgcacgatgcgtgtcagggtgattccggtggcccgttggtttgtctgaatgacggccgtatgactctggtggggattatctcctggggcctgggttgcggccagaaagatgtgcccggtgtatataccaaggtgacgaattaccttgattggatccgggacaatatgcgtcca

SEQ ID NO: 17264 - DNA, 1686 bp, Artificial Sequence
  derived and/or modified sequence
atggacgctatgaagaggggactctgctgcgtgcttctgctgtgcggcgctgtcttcgtgagcccctcacaggagattcacgctcggttcagacggggggctagatcataccaagtgatatgcagagacgagaagacacagatgatctaccagcaacaccagagctggctgagacctgtgctcaggtccaacagggtggaatactgctggtgtaattccggcagggcccagtgtcactcagtgccagtcaaatcctgctccgagccgagatgcttcaacggcggaacatgccagcaagccttgtacttttcagactttgtgtgtcagtgtccggaagggtttgcaggcaagtgttgtgaaatcgacactagggctacctgctacgaagaccaggggatttcctaccgcggcacatggtccactgctgaatcaggagctgaatgcaccaattggaacagctcagccttggcccagaagccctattctggcaggcggcctgacgccatccgactgggtttgggaaaccacaactattgccgcaacccagatcgagatagcaagccttggtgttacgtgtttaaagctgggaaatattcatccgaattctgttccacacccgcctgttctgaaggaaacagcgattgctactttgggaatggttctgcttaccgcgggacccatagtctcacggagagcggggcctcatgcctcccgtggaatagtatgattctgatcggcaaagtatacactgcacagaatccatccgctcaggcccttggattgggcaagcacaattattgcaggaaccctgacggcgatgctaagccatggtgtcatgtcttgaagaaccgcagattgacctgggaatactgcgatgtgccttcttgctcaacctgcggtctgcggcagtactcccagccgcagttccggatcaaagggggtctgtttgccgacatcgcctcccacccttggcaggccgccatatttgccaaacacaggcggtctccaggcgaaagattcctctgcggcgggattctcatcagcagctgttggattctgtccgccgcccattgtttccaggaaagattccccccacatcacttgactgtaattctgggcaggacatacagagtggtgccaggagaagaagaacagaaattcgaggttgaaaagtacatagtgcacaaggaatttgatgacgacacgtatgacaacgatattgccttgctgcagctgaaaagcgactcctcacggtgcgctcaggaatcctctgtggtgcgaaccgtgtgtctccctcctgctgacctccagctccccgattggaccgaatgtgaactgagtggatatggcaagcacgaggcactctcccctttctatagcgaacgactcaaggaagcgcatgtgaggctttatcccagcagtcgatgtaccagccagcacctgcttaatcgaacagtgacagacaacatgctgtgtgctggcgatacccgaagcggagggcctcaagctaacctgcatgatgcatgccagggagacagcggcggcccgttggtctgtttgaatgatggaaggatgaccctcgtagggattattagctggggtctgggatgcgggcaaaaagatgtccccggggtctacactaaagtgactaactatcttgattggatcagagataatatgagacct

SEQ ID NO: 17265 - DNA, 1686 bp, Artificial Sequence
  derived and/or modified sequence
atggacgcaatgaaaaggggtttgtgttgcgtcttgttactctgtggagcagtctttgtttcgccatctcaggaaatccatgcccgattcaggcgaggtgcccggtcctatcaagttatctgccgcgacgaaaaaacacagatgatttaccagcaacaccaaagctggcttcgtccagtacttcgaagcaatcgagtagagtattgctggtgtaatagtgggagagctcagtgtcatagcgttcccgtgaagagctgtagcgaacctagatgtttcaatggtggcacgtgtcaacaagcactttactttagcgacttcgtctgccaatgtcctgaggggtttgccggaaagtgctgtgagatcgacacccgtgccacctgctatgaggaccaaggaatttcctatagaggtacgtggtccaccgcagaatcaggcgcagagtgcaccaactggaatagctccgcattggctcaaaagccttattctggaagaaggcctgatgctattaggctgggactcggtaatcataactactgtcgtaatcctgatagagactccaaaccctggtgctatgtgtttaaagcgggcaagtatagtagcgaattctgcagcactcctgcttgcagcgaggggaattccgattgctactttggaaacggaagcgcatatcgaggaacgcattccctcacagaatctggtgcttcatgtctcccatggaattcgatgatattgattggcaaggtgtataccgctcaaaatccatctgcacaagcattgggactgggtaagcacaactactgcagaaaccccgatggcgatgcaaagccttggtgccatgttcttaagaatagaagactcacttgggagtactgcgatgtgccgagttgttctacatgtggtttgagacagtactctcagcctcaattcaggattaagggtgggttgttcgcagatatcgctagtcacccatggcaagcggccatattcgctaagcatcgtaggagtccaggtgaacgattcttgtgtggtggtatcctaatctcctcatgctggattctcagtgctgctcactgctttcaagaaagatttcctccccatcatctgactgtgattcttgggaggacctatagagttgtacctggagaagaggaacaaaagtttgaagttgagaaatacatcgttcataaggagtttgatgatgatacctatgacaacgacattgcacttcttcagctaaagtctgattcatccagatgcgctcaagagagtagcgtggttaggactgtttgtctaccaccagcagacctacagctgcctgattggactgaatgcgaactatctggatacggaaagcatgaagctctgtctccattttattctgaacggctgaaggaagctcatgttaggctctatccttcgtcccgttgcacttcgcaacatctattaaatcgtactgttaccgataacatgttatgtgcgggagacactcgttcgggggggccccaagcaaaccttcatgatgcttgccaaggtgatagtggtggccctttggtatgtttaaatgacggtcgtatgacccttgttggaataatttcatggggattagggtgcggacaaaaagatgtgccaggtgtttatacaaaggtcacaaactatctagattggatccgtgacaatatgcgaccg

SEQ ID NO: 17266 - DNA, 1686 bp, Artificial Sequence
  derived and/or modified sequence
atggacgcaatgaaacgcggactgtgctgcgtcttgcttctgtgcggagcagtgtttgtgtccccgtcgcaggaaattcacgcaagattccgacgaggagctaggtcataccaggtcatatgtcgggacgaaaagactcagatgatttaccagcagcatcaatcatggctccggcccgtgttgaggtcgaatagggtggaatactgctggtgcaactcggggagagcacaatgtcactcggtgccggtcaagagctgctcggagcctcggtgttttaacgggggtacttgtcagcaagcattgtacttttcggattttgtgtgtcaatgccccgaagggtttgccggcaagtgctgtgagattgacactagggcaacttgctacgaagatcagggaatttcgtacagaggaacttggtcgaccgcagaatctggagcagaatgtactaattggaattcgtcagccctcgcgcagaagccctactccggccgccgtccagacgccatacggctggggctgggaaatcataactactgtagaaacccagatagagattccaagccttggtgctatgtgttcaaagcagggaagtacagctcggaattctgctctacgccagcctgttcagaaggtaactccgactgttactttggtaatggttcggcataccgaggaacgcattcactgactgagagcggagcatcatgccttccgtggaactcaatgatcctgatcggtaaagtctacactgcacaaaacccctccgcacaggcgctcggactgggtaagcacaactactgccggaaccctgatggcgatgcgaagccgtggtgtcatgtccttaagaacagacgtcttacttgggaatactgcgacgtgccctcgtgtagcacctgcggtctgcgtcaatactcgcagccacagttccggatcaagggtggactttttgccgacatcgcgtcgcatccatggcaggcagctatattcgctaagcacagaagatcacctggggagaggtttctttgcggaggtatactgattagctcatgttggattctgtcggccgcccactgttttcaagaaaggtttcctcctcatcacctgaccgtgattcttgggcgcacttaccgggtcgttcctggtgaggaagaacaaaagttcgaagtggagaagtatattgtgcataaagaatttgatgatgatacctacgataatgatattgcacttctgcaactgaagtctgattcatccaggtgcgcccaggagagttccgtggtgcgcacggtttgtttgccacccgcagacctgcaactccccgattggacggaatgtgagctgtccggatacggaaaacatgaggcactgagtcctttctactcagaaagacttaaggaagcacatgtgcggctctacccttccagcaggtgcactagccaacatctcctgaatcgtaccgtgaccgacaatatgctgtgcgcaggggatactcgttcagggggcccacaagcaaatctgcatgatgcgtgccaaggggatagcggaggcccgcttgtgtgtctcaacgacggtcgtatgacccttgtgggtataatctcgtgggggctgggttgcggacagaaggacgtgccaggagtctataccaaggtcaccaattatcttgactggattagggataacatgaggccg

SEQ ID NO: 17267 - DNA, 1686 bp, Artificial Sequence
  derived and/or modified sequence
atggacgcaatgaaaagagggctttgctgcgtgttgctcctgtgcggagcagttttcgtgtcaccctcccaagaaatccatgccagatttaggaggggggctcggtcataccaggtgatttgcagggacgaaaagactcaaatgatttatcagcagcaccaatcttggctccgcccggtgttgcgctcaaacagagtagagtactgttggtgcaattccggacgggctcaatgccactccgtgccagtgaagagctgctcggagccacgatgtttcaacggcggaacctgccaacaagccctgtatttctcggatttcgtgtgccagtgcccagaagggttcgctggcaaatgttgcgagattgacacccgcgcgacctgctatgaggaccagggaatctcgtaccgggggacttggtcgaccgccgaatccggagcggagtgcaccaactggaatagctccgccctggcgcagaagccttactccggccgcagaccggatgccatccgacttggattgggaaatcacaattactgcaggaacccggaccgggactcgaagccgtggtgctacgtgttcaaggcgggaaagtattcgtcagagttctgctcaacgcccgcgtgctcagagggcaattcggactgctactttgggaatggatcggcataccggggtactcactccctgactgaatcgggcgcctcgtgtctgccgtggaactctatgatcctgatcggaaaagtgtatactgctcaaaatccttcagcccaagccttgggactcggaaaacataactactgtcgcaacccggacggagacgccaagccttggtgtcatgtgctgaaaaaccgcagactgacttgggaatactgtgatgtgccgtcttgctctacctgcggcctgcggcaatactcgcagccgcaatttcggatcaagggaggactgttcgcagacatcgcgagccatccctggcaggcggcgatcttcgctaaacacaggcggtcgccaggcgaacggttcctgtgtggcggcatcctgatctcctcgtgctggatcttgtcggctgcgcactgcttccaggagcgcttcccgccgcatcatctgaccgtcatcctgggacgaacttatagagtcgtcccgggtgaggaagaacagaaattcgaagtggagaagtacatcgtacacaaggagtttgatgacgatacctacgataatgatattgcgctcctgcagctgaagagcgacagctcgcgctgcgcacaggaaagctccgtggtcagaaccgtctgcctgccgccagccgacctgcagctgccggactggaccgaatgcgaactgtccggatacgggaaacacgaagcgctgtcgcccttttactccgaacggctgaaggaagcacacgtccggctgtaccctagcagccgatgcacctcacagcatctgctgaaccgtaccgtgacggataacatgctgtgcgctggagacacccgctcagggggaccacaggcaaatctgcacgatgcctgtcagggtgattccggaggaccgctcgtgtgcctcaatgacggacgcatgactctggttggtataatcagctggggcctcggatgcgggcagaaggatgtccctggggtctacaccaaagtgaccaattacctggattggattcgcgacaacatgcgcccg

SEQ ID NO: 17268 - DNA, 1686 bp, Artificial Sequence
  derived and/or modified sequence
atggacgccatgaagagaggcctctgctgtgtgctccttctgtgcggagcggtgttcgtgtccccgagccaagaaatccacgctcggtttcgcagaggcgctcggtcctaccaggtcatctgtcgggatgaaaaaacccagatgatctaccaacaacaccagtcatggctccggcctgtcctgaggagcaaccgcgtggagtactgctggtgcaattccggaagggctcaatgccatagcgtcccggtgaaatcatgctcggaaccccgctgcttcaacggaggcacctgccagcaagccctgtacttctcggacttcgtctgccagtgcccagaaggattcgcaggaaaatgctgcgagatcgacacccgcgcgacctgttacgaggaccagggcatctcgtacaggggcacttggtctactgcggaaagcggagcagaatgcactaactggaactcaagcgccttggcccagaagccgtactcgggacgccggcccgacgcgatccgcctcggcctcggaaaccataactactgtcgtaaccccgaccgggacagtaagccttggtgttacgtgtttaaagccggcaagtactcgtcggagttctgcagcaccccagcgtgctcagaaggaaactcggactgttacttcggcaacggaagcgcgtaccggggaactcattccctgaccgagtccggcgcctcgtgcctgccgtggaactccatgatcttgatcggcaaggtctacaccgctcagaacccgtcggcccaagcgctggggctgggaaaacacaattactgtcgcaatccagatggagatgctaaaccgtggtgtcatgtgctgaaaaatcgacgcttgacctgggagtactgtgacgtcccgagctgtagcacctgtggactgcgccagtattcccaaccacagtttcgcatcaaggggggcctcttcgccgacattgcgtcacatccgtggcaggcggccatcttcgcgaaacaccgccgctcaccgggagagaggttcctgtgtgggggtattctcatctcatcctgctggatattgtccgcggcacattgcttccaggaaagattcccgccgcatcacctgactgttattctcggaagaacttaccgggtggtcccgggtgaggaagaacagaagttcgaggtggaaaagtacattgtgcataaggagttcgacgacgacacttacgacaatgatatcgccctccttcagttgaagtcggactcgtctcggtgcgcacaagaatcatcagtcgtccggaccgtttgcctgcctccagccgacctccagctgcctgactggactgaatgtgagctgtcgggttacggtaagcacgaggcactcagcccattttacagcgaacgcctgaaagaagctcacgtccggctgtacccgtcgagccgctgcacttcgcagcacctgttgaaccggactgtgactgacaatatgctctgcgctggggacactcgctcgggcggcccccaggccaacttgcacgatgcatgccagggggactccggaggaccgctggtatgtctgaatgacggccggatgactctcgtgggcatcatctcatggggcttgggctgtggccaaaaggatgtgccgggagtctacactaaagtgaccaactacctggactggatccgcgacaacatgcgccca

SEQ ID NO: 17269 - DNA, 1686 bp, Artificial Sequence
  derived and/or modified sequence
atggatgccatgaaacgtggactctgctgcgtgctcctcctgtgcggggctgtgttcgtgtctccctctcaggagatacacgctcgcttccgtcgaggcgctcgctcatatcaagtcatttgccgtgacgagaagactcagatgatctaccagcagcaccagagctggctccgcccagtcctccgctctaacagggtcgagtattgctggtgcaatagcggccgagcccagtgccattcggtccctgtcaagtcctgctctgagcctcgctgcttcaatgggggtacctgccaacaggcactctacttttctgacttcgtctgccagtgccccgaaggctttgccggtaagtgttgtgaaatcgatactagggcaacatgctacgaggaccaggggatttcatatcgcggcacctggtccaccgccgaatctggtgccgaatgcaccaactggaactcatctgcccttgcccaaaaaccttactctgggcggcggcctgacgccattcgcttgggactcggtaaccacaactactgccgtaatcccgaccgagactccaaaccgtggtgctacgtcttcaaggccggtaagtactctagtgagttctgctccacacccgcatgcagcgagggaaactcggactgctattttggtaacggcagcgcgtaccgtggcacccactcccttaccgaaagcggcgcttcctgcttgccttggaacagcatgatcctcatcggcaaggtctataccgcccaaaacccgagtgcccaagctttgggcctcggtaagcacaactactgtcgcaaccccgatggagacgctaagccctggtgccacgtactaaagaatcgtcgtcttacctgggagtactgcgacgtcccctcctgttccacctgcggcttgcgtcagtattcgcaaccccagttccggattaaagggggactgttcgccgacatcgcttctcacccttggcaggctgccatctttgctaagcaccgtaggtccccgggcgaacgtttcttatgtggtggcatcctcatctcgagttgttggattctcagcgctgcccattgctttcaggagaggttcccgcctcaccacctcaccgtcatcctggggcgtacctacagggttgttccaggtgaggaggagcagaagttcgaggttgagaagtatatcgtgcacaaggaattcgatgacgacacatacgacaacgacatcgctttgctccagctcaagtccgactcgtcacgatgcgcccaagagtcctctgttgtacgcacagtctgtttgcctcctgctgatctccagctcccagattggactgagtgtgagctttccggctacggtaagcatgaagccttgtccccattctatagcgagcgccttaaagaggcgcacgtgcgcctctaccccagctcgcgctgcaccagtcagcatctgcttaaccggactgtcaccgacaacatgctctgtgctggtgatacccggtctggaggcccccaggccaacttgcatgacgcctgccagggcgactccggcggccccctggtttgcctcaacgacggacgtatgacactagttggcattatctcttggggactcggttgtggtcagaaggacgtccccggcgtgtacacgaaagtcaccaattatctggattggatacgggataacatgcgtccc

SEQ ID NO: 17270 - DNA, 1686 bp, Artificial Sequence
  derived and/or modified sequence
atggacgcaatgaagagaggactttgctgtgtgcttctactctgtggtgccgtgtttgtgagcccgagccaggagatccatgctcgcttccggcgaggagctagatcctaccaggtgatttgccgcgacgaaaagactcagatgatatatcaacaacatcagagttggctgagacctgtgttgcgaagcaatcgagtggaatattgttggtgtaacagtggcagggcccagtgtcacagcgtgcccgtgaaaagctgcagtgaacctcgttgttttaacggcggcacgtgccagcaggctctgtacttttccgattttgtgtgtcagtgtcctgaaggctttgctgggaaatgttgcgagatagacactagggccacctgctacgaagaccaggggatatcctaccgcggaacgtggagcacggccgaaagcggtgccgagtgtacaaattggaacagtagtgcacttgcccaaaaaccttatagtgggcggcgcccagacgccatccgcctagggttgggcaaccacaactattgccggaatccagacagggactccaaaccatggtgctacgtctttaaggcagggaaatacagtagcgaattttgcagcactcccgcttgctccgagggcaattctgactgctactttgggaacggttcagcctaccggggcactcactcgctgaccgagtctggagcttcctgtcttccatggaatagcatgattcttataggcaaagtctacaccgcccagaacccttcagcccaagcgctcgggctaggaaagcacaactattgccggaatccggatggtgacgcgaaaccgtggtgtcacgttttgaagaaccgacgactcacatgggaatactgcgatgtgcctagctgcagtacttgcggactacggcagtacagtcagccccagtttagaattaaaggcggactcttcgcggacatcgccagtcacccctggcaggcggccatcttcgcgaaacatcggagatccccgggcgagaggttcctctgcggtggcatcctgatcagctcctgttggattctgtcggccgcccactgttttcaggagagatttccacctcatcacctgacagtgattctcggcaggacctaccgggtagtgccaggggaggaagaacagaagttcgaagtggagaaatacatcgttcacaaggaattcgacgatgacacctacgacaacgacatcgccctgctacagcttaagtctgattcaagccgctgcgcccaggaatcctcagtcgtgcggacagtttgtcttcccccagccgatctacagctacctgattggacggaatgtgagctgtctggctatggaaagcacgaggcactgagcccattttacagcgagagactcaaagaggcacacgttcggctgtatcctagctctcggtgtacatctcagcatctgttgaaccggaccgtaacggacaatatgctctgcgccggtgatacaagatctgggggccctcaggccaatcttcatgacgcctgtcagggagattctggaggtccattagtatgcctgaacgacggcagaatgacgttggtggggattatatcatggggcctcgggtgcggccagaaggatgtccctggggtgtatacaaaggtcacaaattatctcgattggatccgagacaacatgagacct

SEQ ID NO: 17271 - DNA, 1686 bp, Artificial Sequence
  derived and/or modified sequence
atggatgcaatgaaacgcgggttgtgctgcgtactactgctgtgtggagccgtgttcgtatcgccgagccaggagatccacgcgagatttcgccggggggccagatcctaccaggtgatctgtcgggacgaaaagacccaaatgatttaccagcagcaccagtcatggctgaggcctgtgcttaggagcaaccgggtggaatattgctggtgcaatagcggaagggcccagtgtcatagtgtgcctgtcaaatcctgctctgaaccacgttgcttcaacggagggacgtgccagcaggccttgtatttttcagactttgtgtgtcagtgtcccgaaggctttgccggaaagtgttgcgagatcgacacccgagccacctgttatgaggaccagggaatctcctatcggggtacatggagcaccgccgagagcggcgccgagtgtaccaactggaattccagcgctcttgctcagaaaccttacagcgggaggaggccagacgccatccgcctgggattgggcaaccataactactgtcggaacccagatcgggactcaaaaccctggtgctacgtcttcaaagccggcaaatacagctcagaattttgttcaactcccgcgtgcagtgaaggcaactcggactgctactttggcaatggaagcgcctacaggggaacccacagcttaaccgagagcggagcctcctgcctgccctggaacagcatgatcctgatcggtaaagtctatactgctcagaacccgtccgctcaggcgctgggtctaggaaaacataactactgtcgcaatcctgatggcgatgccaagccttggtgtcacgtcctcaagaaccgacgtctgacctgggaatactgcgatgtgccatcctgcagtacttgtggtctgcgccaatattcacagccacagttccgtatcaaggggggattattcgctgatatagcaagtcacccctggcaggctgctatatttgctaagcaccggcgcagccccggcgagcggttcctatgtgggggcatcctcataagttcctgctggatattaagcgcggcgcattgcttccaagagcgatttccccctcatcacctcacagtgatattgggaagaacataccgggtggtgcccggcgaagaggaacagaaattcgaggtggagaaatatatcgtgcacaaggagttcgacgacgatacctatgacaatgacatcgccttgttgcagctgaagagtgactcaagtaggtgtgcgcaggagtccagcgtggtcagaacagtatgcctgcctcccgcagacttgcagcttccagattggactgagtgtgaactgtctgggtatgggaaacatgaggctcttagccccttctactccgagcggctcaaagaagcacatgttcgactgtatccgtctagccgctgcacctcccagcatctgctcaaccgcacggttactgataatatgctgtgtgccggcgatacccgaagcggggggccacaggctaaccttcatgacgcctgccagggagactccggtggcccgctggtgtgcctgaacgatggccgcatgacgctagtgggcattatcagctggggactcggctgcggccagaaggacgttcctggtgtatacaccaaggtcacaaattatctggattggatcagggacaacatgagacca

SEQ ID NO: 17272 - DNA, 1686 bp, Artificial Sequence
  derived and/or modified sequence
atggacgctatgaaacgcgggctgtgctgcgtcctgctcctttgcggcgctgtctttgtgagcccgtcacaggagatccacgcgagattccgccggggagcacgctcataccaggtgatctgtcgggacgaaaaaactcaaatgatctaccagcagcatcaatcgtggctcaggccggtgctgcggtccaaccgcgtcgagtactgctggtgcaactcaggacgggcacagtgtcactccgtcccggtgaagtcatgctccgagccgcgctgctttaatggaggaacctgccaacaggccctctacttttcggatttcgtgtgccaatgccctgaaggattcgccggaaaatgctgcgaaatcgatacccgagcaacctgctacgaggaccagggcatttcctatcggggaacttggtcaaccgcagaatccggagctgaatgtactaattggaattcgtcagccctcgcccaaaagccgtactccggccgccgccctgacgctatccgcctgggcctggggaaccacaactattgtcgcaaccccgatagggattcgaaaccatggtgctacgtgttcaaagccggaaaatacagctcagaattctgcagcaccccagcatgctcggaaggcaactccgactgctacttcggaaacggatcggcctaccggggaactcactcgttgacggagtcgggtgccagctgcctcccctggaacagtatgatcctgatcggaaaggtgtacaccgctcagaacccgtccgcccaagcactggggctgggaaagcacaattactgccgcaatccagacggcgatgccaagccttggtgccacgtgctgaagaaccgcagactgacttgggaatattgtgacgtccctagctgctcgacctgcggactccgacagtactcgcaaccgcagttccggatcaaagggggcctgttcgccgacatcgcgagtcacccgtggcaagctgccatttttgcaaaacaccgccggagcccaggcgagaggttcctttgcggtggtattctgatttcgagctgctggatcctttctgcggcgcattgtttccaggagagattcccgccacaccatttgactgtgatcctgggtcggacctacagagtcgtgccgggcgaagaagagcaaaagtttgaagtggagaagtacatcgtgcacaaggaattcgatgacgatacttacgataatgatatcgccctgcttcagctcaaaagcgactcgtcaagatgcgcccaggaatcttccgtcgtcagaaccgtgtgcctgccgcccgctgaccttcagctgccggattggactgagtgcgaactgtccggctacggtaagcacgaagccctgtcgccattctactccgaacggctcaaggaagcgcatgtccgcctgtacccctcgagccggtgcacttcccagcatctcttgaacagaactgtgacggacaacatgctgtgcgccggagatactcggtcgggaggcccacaagcaaacctgcatgatgcctgccagggagattcaggtggcccattggtgtgtttgaacgacggccgcatgaccttggtggggatcatctcgtgggggctgggttgcggccaaaaagatgtgccaggcgtgtacactaaagtcacgaattacctcgactggatcagggacaatatgcgcccg

SEQ ID NO: 17273 - DNA, 1686 bp, Artificial Sequence
  derived and/or modified sequence
atggacgcaatgaaacggggtctgtgttgcgttctgctgctttgtggcgcagtctttgtctccccctcgcaagagatacatgcacgttttcgcaggggtgcccgctcataccaagtcatttgtagagatgaaaaaacccagatgatataccagcaacaccaatcgtggttgaggcctgtgcttaggagcaacagggtggagtactgttggtgcaattcgggccgtgcgcagtgccatagcgtcccagtgaaatcctgctccgaacctcggtgctttaacggcgggacctgccaacaagcactctatttctcagattttgtgtgtcagtgccccgaagggttcgcaggaaaatgttgtgaaatcgacactcgagcaacttgttatgaagatcaagggattagctataggggcacctggtccaccgcggaatccggagcagaatgcaccaattggaactcctccgcccttgctcaaaagccctactcggggcgccggcctgatgctattcggcttggcctcggtaaccataactactgtaggaatcccgatcgcgattcgaaaccttggtgttatgtgtttaaagcaggaaagtactcgtcggaattctgttcaacccccgcatgtagcgagggcaacagcgattgctatttcgggaacggtagcgcgtacaggggaacccatagcctcaccgagtcgggtgcgagctgtctgccatggaactcaatgattcttatcggaaaggtgtacactgcacagaatccctcggcccaggcgctcggtttgggaaaacacaattactgtcgtaacccggatggcgatgcaaagccctggtgtcatgtgctgaaaaacagacggcttacttgggagtactgcgacgtcccttcgtgttcgacgtgtggtctgagacaatactcacagccacaatttcgcatcaagggcggtttgtttgcagacattgcgtcacacccatggcaggcagcaattttcgcaaaacataggagaagccctggagagcgttttctctgtggcggtattctgatctcctcatgttggattctgagcgcagcgcattgctttcaagaaagatttccaccacatcacctgaccgtgatcctgggtaggacttaccgggtggtgccaggagaggaggaacagaagttcgaagttgagaagtacattgtgcataaggagttcgatgacgatacttacgataacgacatagcacttctccagcttaagtcggattccagtcggtgtgcacaagagtcatcagtggtgcgaactgtgtgtctccctcccgcagacctgcaactgcccgactggactgagtgcgagctctccggctacggaaaacacgaagccctttctcctttttacagcgaacggctgaaggaggcacatgtccggctttacccctcctcacggtgcactagccagcaccttttgaatcggactgtcaccgataacatgctctgtgccggagatacgagatcaggaggaccacaagcaaaccttcatgatgcatgtcagggagattcaggtggtccgcttgtctgcctgaatgatggtagaatgacgcttgtgggaattatctcctggggacttggttgtggtcaaaaagacgtgcccggcgtgtacactaaagtgaccaattacttggattggattcgtgataacatgcgccca

SEQ ID NO: 17274 - DNA, 1686 bp, Artificial Sequence
  derived and/or modified sequence
atggacgcaatgaagagagggctctgttgcgtcttgcttctgtgtggtgcagtgttcgtcagcccctcgcaggaaatccacgcaaggttccgcaggggcgccagaagctaccaggttatttgtcgggatgaaaagacccagatgatatatcagcagcatcaatcctggcttagacctgtcttgagatcaaaccgggtggaatactgttggtgtaattccggacgagcccagtgccacagcgtgcccgttaaatcttgctctgaaccacgttgctttaacggtgggacgtgtcagcaggcactgtatttcagcgattttgtttgccaatgtccggaaggttttgctggtaagtgctgcgagatagacaccagggcaacttgctacgaggatcagggtatttcttatcggggaacttggtccaccgctgaatctggggccgagtgcactaattggaactcctccgccctagctcagaagccgtatagcggtcgaagacctgatgccataaggctgggtctgggtaatcataattactgtcgtaaccccgacagggatagtaagccctggtgttacgtattcaaggccgggaagtacagcagcgagttctgctccaccccagcctgtagcgagggcaattctgactgctacttcggcaatggcagcgcctatcggggcacccactccctgaccgagtctggcgctagctgtcttccgtggaattccatgatcctgatcgggaaggtgtatactgcacaaaacccctcagcacaggccttgggcctagggaaacacaattattgccggaatccagacggagatgcaaaaccatggtgccacgtcttgaaaaaccgccggttgacttgggagtactgcgacgttccctcctgtagtacctgcggactgaggcagtattcacagccccagtttagaatcaaaggcggactgttcgctgacattgcctcccacccctggcaggccgctattttcgcaaaacatcgtagatctccaggtgagcgattcctgtgtggaggaatacttatctcttcatgctggattctatctgcagcccattgcttccaggaaagattccccccacaccatctgaccgtgatccttgggaggacctatagagtggtccccggggaggaggagcaaaagttcgaggtggagaagtatatagtccacaaagagtttgatgatgatacatacgacaacgacatcgccttgctccaactcaaaagtgatagcagccgttgtgcccaggagagtagcgtggtgaggactgtttgccttcctcccgcagatctgcagcttcctgattggactgaatgtgagttaagcggctacggcaagcatgaggccctgtcaccattttacagcgaaagactgaaggaggctcacgtacggctttaccccagctctcgctgcacctcacaacatctattaaacagaacggtcaccgataatatgctgtgcgcaggtgacaccagatccggagggccacaggccaacctgcacgacgcctgtcagggagattctggcggtccgctggtatgtctaaacgatggacggatgactctggtggggattattagttggggcctcgggtgcggacagaaggatgttccaggtgtttacacaaaggttacaaattacttggattggataagagataacatgaggcct

SEQ ID NO: 17275 - DNA, 1686 bp, Artificial Sequence
  derived and/or modified sequence
atggacgccatgaaaagaggactctgctgtgtgttgctcctgtgcggcgcggtgttcgtctcgccgtcacaggagatccacgcccggttcagacggggagcccgcagctaccaggtgatttgcagagacgaaaagactcagatgatctaccagcaacaccagtcctggctgaggcccgtcctgcgatcgaatcgcgttgagtactgttggtgcaactcaggcagagcccagtgccattccgtgccggtcaaatcatgctcggagcctcggtgcttcaacggtggaacttgtcaacaagccctgtacttctcggatttcgtgtgtcagtgccccgagggattcgcagggaaatgctgcgaaatcgacaccagagcgacttgttacgaggaccaaggaatctcctaccggggaacctggtcgactgcggaaagcggtgcagagtgcaccaactggaactcgtcagcgctcgcccaaaagccctactccgggcggcggccagacgcaatccggctggggctggggaatcataactactgtagaaatcctgaccgggacagcaaaccttggtgctacgtgttcaaggccggaaagtactcatcggagttttgctcgaccccggcctgtagcgaaggaaactcggattgctacttcggtaacggaagcgcctaccgcggcactcactcgctgactgaaagcggtgcttcctgcctcccatggaactcaatgatcctgataggtaaagtgtacactgcccagaacccgtccgcgcaggccctgggactcggcaagcacaactactgcagaaatccagatggtgacgcgaagccttggtgccatgtcctgaagaatcggcgcctgacctgggagtactgcgacgtgccgtcgtgctcaacctgtggacttcgacagtacagccagccgcagttccggatcaagggcgggctgttcgccgacatcgcctcccacccttggcaggccgctatctttgccaaacatcggcgctcgcctggggagcgcttcctgtgcgggggaatcctcatcagctcgtgctggatcctctccgcggcgcactgtttccaagaaaggttccctccacatcacctgactgtgatcctcggacggacttaccgcgtggtccctggagaagaagagcagaagttcgaagtggagaagtacattgtccacaaggagttcgacgacgatacgtacgataacgatatcgccctgttgcagctgaagtccgacagctcaaggtgtgctcaggagtcatccgtggtgaggaccgtctgcctcccgccggcggatctgcagctgcctgactggactgaatgtgaactgagcggatacggcaaacacgaggccctcagcccgttttactcagagcgcctgaaggaagcacacgtcagactctacccgtcatcgcgctgcaccagccagcacctcctgaaccgcaccgttaccgacaacatgctgtgcgcaggagacactcgctccggaggcccgcaggccaacctgcacgacgcatgccaaggggattcgggcggacccctggtctgcctgaacgatgggagaatgactctcgtgggaatcatctcctggggacttggctgcggacaaaaggatgtcccaggagtctacaccaaggtgaccaattacctcgattggatccgcgacaacatgcgcccg

SEQ ID NO: 17276 - DNA, 1686 bp, Artificial Sequence
  derived and/or modified sequence
atggacgccatgaagagagggctttgctgtgtgctccttctgtgtggtgctgtttttgtaagtcctagccaggagatacatgctcgatttcgtcggggcgcacgaagttaccaggtgatctgtagagatgagaaaactcaaatgatctatcagcagcatcagagctggcttcgcccggtgctccgctccaacagagtggaatactgttggtgtaactccggaagggctcagtgccactctgtgccggtcaagtcctgcagtgaaccccgctgtttcaacggaggcacctgccaacaagccctgtacttttctgattttgtgtgtcagtgccccgagggcttcgcagggaagtgctgcgagatagacacccgggctacctgctatgaggatcagggcattagctatcgcggaacatggtcgacagctgagagtggagccgaatgcacaaactggaattcctctgccttggcccagaaaccttacagcggcagacggccagacgccatcaggctggggctcggaaatcacaattactgcaggaaccctgaccgggacagcaagccttggtgctatgtttttaaggctggtaagtacagctcagagttttgctctacccctgcctgttccgaaggcaattcagattgctactttggaaatggcagcgcctatagaggtacccatagcttgacggaatctggcgcgtcgtgccttccttggaatagtatgatcctcatcggaaaagtgtataccgctcagaaccctagcgcccaagccttgggactgggaaagcacaactattgtaggaatcctgacggtgacgcgaagccatggtgtcatgtccttaaaaaccggaggctaacatgggagtactgtgacgttccaagctgttctacgtgtggattaagacagtactcccagccacaatttcgcatcaagggagggctgttcgccgacattgcttcccacccttggcaggccgctatctttgccaaacacaggaggtcacctggggagagatttctatgcggcggtatactgattagctcctgttggatcctgagcgccgcccactgttttcaggagagattcccgcctcaccatctgacggtgatccttggaagaacctatcgcgtggttcctggggaagaggagcaaaagttcgaggtggaaaaatatattgtccacaaggagttcgacgatgatacttatgataacgacatcgcgctgcttcagttgaagtccgatagcagcagatgtgcccaggagtcttccgtggtgcggacagtctgcctgccaccagccgacctgcagctgcctgattggactgaatgcgagctctctgggtatggcaagcacgaggctctttctcctttttattctgaacggttgaaggaagcccacgttcgtctgtaccccagttcgcggtgcactagtcagcacctcctgaataggacagttactgataatatgctgtgcgcgggagacacacgctccgggggaccacaagcgaatctgcatgacgcttgccaaggggactccggtggtcctctagtatgcttgaacgacggcaggatgaccctcgtgggaataatatcgtggggcttaggctgcggccagaaggatgttcccggagtgtacactaaagtcaccaattatttagactggatcagggataacatgcgccct

SEQ ID NO: 17277 - DNA, 1686 bp, Artificial Sequence
  derived and/or modified sequence
atggatgccatgaagcggggtctgtgctgtgtccttctcctttgtggagctgtgttcgtctcgcctagccaagagattcatgcaaggttcaggagaggtgcacgctcctaccaagtgatctgtcgggatgaaaagacccagatgatataccagcaacaccagagctggctccggcctgtgctgagatccaacagggtggagtactgttggtgtaattccggtcgtgcacaatgtcatagcgtcccagtcaagtcatgtagcgagccacggtgttttaacggaggaacttgtcagcaggcactgtacttcagcgacttcgtctgccaatgtccagaaggttttgctggtaagtgttgcgagatcgatacccgtgcgacttgttacgaggaccaaggaatctcgtacagaggaacttggtccactgcagaatccggagcggaatgtaccaactggaattcaagcgcccttgcacaaaagccttacagcgggcgtcgacctgatgcaattcgcctgggtctgggcaaccacaactactgtcgcaaccctgacagagattcgaagccgtggtgctacgtgtttaaagcaggtaaatacagcagcgagttttgttcgactcctgcatgttccgagggaaattccgactgctactttggaaatgggtccgcataccgtggtacccactcccttactgagtcgggagcaagctgcctgccttggaattcgatgatcctgatcggtaaggtgtacaccgcgcaaaacccttcggcacaagcccttggactcggaaagcataactactgcagaaaccctgatggtgacgcgaagccatggtgtcacgtcctcaaaaaccggagactgacttgggagtactgtgacgtgccctcgtgtagcacctgcggtctgaggcaatactcgcagccacaatttcgcattaaagggggactttttgcagatatagcatcccatccttggcaagccgctattttcgcgaaacatcgacggtcccccggagaacgatttctttgtgggggtatacttatctcgagctgttggattctgtccgcagcacactgctttcaggaacgatttcctcctcatcatctcaccgtgattcttgggcgcacctacagagtggtgccaggagaagaagaacagaagttcgaagtcgagaagtacattgtgcacaaggaattcgacgatgatacctatgacaacgacatcgcactcctgcagcttaaaagcgactcatcccgatgcgcacaggagagctccgtggtgcgtaccgtctgtctgccccctgcagatctccaacttccagattggaccgaatgcgaactgtccggatacggaaagcatgaggcactttccccattctactcggaacgcctgaaagaggcgcacgtgagactctacccatcgagccgatgtacctcgcaacacctgcttaacaggacggtcacggacaatatgctttgcgcgggcgataccaggtcaggtggtcctcaggcaaatctccacgatgcatgccaaggcgacagcggcggcccgctggtgtgtctcaatgatggtagaatgactcttgtgggcattatctcctggggactgggttgtggacagaaggatgtcccaggtgtctacactaaagtgaccaattaccttgattggataagagacaatatgcgcccg

SEQ ID NO: 17278 - DNA, 1686 bp, Artificial Sequence
  derived and/or modified sequence
atggatgccatgaagagggggctctgttgtgtcctgttgctttgtggtgcagtcttcgtctccccatcacaggagatccacgcacgcttcaggcggggagcgcggtcctatcaggttatctgcagagatgagaagacccagatgatctaccagcagcatcaatcctggttgcgccctgttctgcgaagtaatcgcgtggagtactgttggtgcaactctgggagagcgcagtgtcactccgtcccagtgaagtcctgctctgagccacgatgctttaatggtggcacctgccagcaggccttgtatttttcagatttcgtctgccagtgccccgaaggcttcgccggcaagtgctgtgagatcgacacacgcgcgacttgttatgaagaccagggcatatcatacaggggtacatggtccacagccgagtcgggagcggagtgcaccaactggaactcttcagccttggctcaaaaaccctactcgggacgacgcccagacgcgataagactggggttgggcaaccataactactgtagaaatcctgacagggacagcaagccgtggtgctacgtgtttaaggccggaaagtactcttccgagttctgttccactcccgcatgttccgaagggaatagcgactgttacttcgggaatggttccgcctaccggggtacccactcactgactgaaagtggtgcttcttgtctgccttggaactcaatgattctgattggtaaggtctacacggcccagaatcccagcgcgcaggcgctggggctgggaaaacataactattgtcgcaatccagacggcgatgcaaagccctggtgccacgttttaaaaaatcggaggctgacttgggaatactgtgacgtgccttcctgctcaacctgtggattgaggcaatactcccagcctcaatttcgtataaaggggggactgttcgccgatatcgcgagtcacccttggcaggcggccatttttgcgaaacacagaagaagcccaggcgaacggttcctttgtggaggcatcctgatctcctcctgctggatcctcagcgctgcccattgcttccaggagagattcccaccacatcatctgactgttattcttgggcgcacgtatcgagtcgtgccaggtgaggaggagcaaaaattcgaggtggagaagtatatcgttcacaaggaatttgacgatgatacctatgacaatgacattgctctgttacagctgaaatccgactcctctaggtgcgcgcaggagtcatcggttgttcggacagtgtgcctgccccccgccgacctgcaactgcctgattggacggagtgtgaacttagcggctatggcaaacacgaggctttaagccctttttattccgaacgtttgaaagaggcccacgtcagactgtacccgtccagccgctgcaccagccagcatctgcttaatcggaccgtaacagacaacatgttgtgcgcaggcgatacaagatccggaggccctcaggctaacctccatgatgcttgccagggagatagtggggggcccctggtctgtctgaatgacggacgaatgacgctggtggggattatctcttggggtttagggtgtggccagaaagacgtgcccggcgtgtataccaaagtgacgaattacttagactggattcgggataatatgagaccc

SEQ ID NO: 17279 - DNA, 1686 bp, Artificial Sequence
  derived and/or modified sequence
atggatgcgatgaaacgtggtttatgttgtgtattactattatgtggtgcggtttttgtttcgccgtcgcaagaaatacatgcgcgttttcgtcgtggtgcgcgttcgtatcaagtaatatgtcgtgatgaaaaaacgcaaatgatatatcaacaacatcaatcgtggttacgtccggttttacgatcgaatcgtgttgaatattgttggtgtaattcgggtcgtgcgcaatgtcattcggttccggtaaaatcgtgttcggaaccgcgatgttttaatggtggtacgtgtcaacaagcgctatatttttcggattttgtatgtcaatgtccggaaggttttgcgggtaaatgttgtgaaatagatacgcgtgcgacgtgttatgaagatcaaggtatatcgtatcgaggtacgtggtcgacggcggaatcgggtgcggaatgtacgaattggaattcgtcggcgttagcgcaaaaaccgtattcgggtcgacgtccggatgcgatacgtctaggtctaggtaatcataattattgtcgaaatccggatcgtgattcgaaaccgtggtgttatgtttttaaagcgggtaaatattcgtcggaattttgttcgacgccggcgtgttcggaaggtaattcggattgttattttggtaatggttcggcgtatcgtggtacgcattcgttaacggaatcgggtgcgtcgtgtttaccgtggaattcgatgatattaataggtaaagtatatacggcgcaaaatccgtcggcgcaagcgttaggtttaggtaaacataattattgtcgtaatccggatggtgatgcgaaaccgtggtgtcatgtattaaaaaatcgtcgtttaacgtgggaatattgtgatgttccgtcgtgttcgacgtgtggtctacgtcaatattcgcaaccgcaatttcgtataaaaggtggtctatttgcggatatagcgtcgcatccgtggcaagcggcgatatttgcgaaacatcgtcgttcgccgggtgaacgttttttatgtggtggtatactaatatcgtcgtgttggatattatcggcggcgcattgttttcaagaacgttttccgccgcatcatctaacggtaatactaggtcgtacgtatcgtgtagtaccgggtgaagaagaacaaaaatttgaagtagaaaaatatatagtacataaagaatttgatgatgatacgtatgataatgatatagcgttactacaactaaaatcggattcgtcgcgatgtgcgcaagaatcgtcggtagtacgaacggtatgtttaccgccggcggatttacaactaccggattggacggaatgtgaattatcgggttatggtaaacatgaagcgttatcgccgttttattcggaacgtttaaaagaagcgcatgttcgattatatccgtcgtcgcgatgtacgtcgcaacatttattaaatcgtacggtaacggataatatgttatgtgcgggtgatacgcgttcgggtggtccgcaagcgaatctacatgatgcgtgtcaaggtgattcgggtggtccgctagtttgtctaaatgatggtcgtatgacgttagttggtataatatcgtggggtctaggttgtggtcaaaaagatgtaccgggtgtatatacgaaagttacgaattatctagattggatacgtgataatatgcgtccg

SEQ ID NO: 17280 - DNA, 1686 bp, Artificial Sequence
  derived and/or modified sequence
atggatgccatgaagagaggcctgtgttgcgttcttctgctgtgcggtgctgtgttcgtttccccgagccaggaaatacatgctagattcaggagaggagccagatcctatcaggttatctgcagggacgaaaagacacagatgatttatcagcaacaccagtcatggctcagaccagtgctgagaagcaacagggtcgagtactgttggtgcaactctggacgcgcccagtgccattcagtacctgttaagtcatgttccgagccaagatgttttaatggcggcacctgccagcaggcgctgtatttctccgacttcgtatgtcagtgtcctgagggcttcgcgggaaaatgctgtgagatcgacaccagggccacatgttacgaagaccaaggcatttcttatcgcggaacctggagtacggctgagtctggcgcggaatgtacaaactggaactcttctgccttggcgcaaaagccatatagcggccgccgccccgacgccataaggttgggcttgggcaaccataattattgtagaaatcccgatcgcgactctaagccgtggtgttatgtgtttaaggcgggtaagtatagttcagagttctgctctacaccagcatgctccgagggtaacagtgattgctacttcggcaacggttctgcctacaggggcacgcattctttgaccgaatcaggagcgtcctgcctgccttggaatagcatgatccttattggcaaggtgtacactgctcagaacccctccgctcaagcactgggactgggtaagcataattattgcaggaatccggatggtgacgccaagccttggtgccatgtactgaaaaacaggcgcctcacctgggaatactgtgacgtgccctcctgcagtacctgtggactgcgccagtacagtcagccccagttcagaattaagggcggcctgttcgccgatattgccagtcacccctggcaggctgctatctttgccaaacaccgccgcagtccgggcgagaggttcctttgcggcggtatcctcatctcatcctgttggatcttgagcgcggcccattgtttccaggagaggttcccaccccatcacctgactgtcatccttggaagaacatatagggtcgtgcctggtgaggaggagcagaagttcgaagtagagaagtatatcgtgcacaaggaattcgatgatgacacctacgacaatgatatagcacttctgcagctgaagtctgactcttctcgctgcgcccaagaaagctccgtcgttcgcaccgtctgcttgcctcctgcggatctgcagctgcccgactggaccgagtgtgaactgagcggatacggcaaacacgaggcgctgtcccccttttacagtgaacgccttaaggaagcccacgttagattgtatccttctagtcgctgcacaagtcaacatttgcttaaccgcaccgtgaccgataatatgctgtgtgccggtgacacgcgctcaggcggacctcaagccaacctgcacgacgcctgccagggtgattcaggaggccctctggtctgtctgaacgatggaaggatgactttggtgggcatcatttcctggggactgggatgcggacaaaaggatgttcctggtgtgtacacaaaggtgaccaactacctggattggatcagggataacatgagacct

SEQ ID NO: 17281 - DNA, 1686 bp, Artificial Sequence
  derived and/or modified sequence
atggacgccatgaagagaggcctgtgctgcgtactactgctgtgtggggccgtgttcgtatccccaagtcaagagattcatgcccgatttcggcgaggagcccggagctatcaggtgatttgtcgggacgaaaagacccagatgatctatcaacaacaccagagctggctacgacccgtcctgcggagcaaccgtgtggagtactgctggtgtaactctggccgagcacagtgccactccgtaccggtgaagagctgtagtgaaccaagatgttttaatggagggacttgtcagcaggccctctacttttcagacttcgtgtgccaatgcccagaaggattcgccggaaaatgttgtgagattgacacacgggcaacctgctacgaggatcaaggtatttcatatcgcggtacgtggtctactgcagaaagcggtgcggaatgcactaattggaatagcagcgccctcgctcagaaaccttattctggaaggaggcccgacgccatcaggcttgggctgggaaatcacaattactgtaggaatccggatcgggattctaagccctggtgttatgtttttaaagccgggaagtatagcagtgagttttgcagcacccctgcctgttccgagggcaactctgactgttactttggaaacggttcagcctatcgaggcacacattctcttaccgaatccggtgctagctgcctcccctggaattctatgattctgatcgggaaggtatatacggcccaaaatccttctgctcaggcactgggactgggaaagcataattattgcagaaatcctgacggtgacgcaaaaccctggtgtcatgtgctgaagaaccggaggctgacctgggagtactgtgacgtaccttcatgttctacgtgcgggctgcggcagtacagccagccccagttccggattaaaggcggtctgttcgctgatatcgcatcccatccctggcaagccgccatcttcgcaaagcatcgtagaagtcccggagaacgcttcctgtgtggaggtatcttgatttcttcttgctggatactcagcgccgcccactgttttcaggagcgttttcccccacaccacttgacagttattctcggaaggacctaccgggtagttccaggtgaggaagaacaaaagttcgaggtcgagaagtacatagttcacaaggagtttgacgacgacacctacgacaacgacatagccttattgcaactcaagtctgattcttccaggtgcgctcaggagtcatcagtcgtgcgtaccgtctgtttgccccccgcagacctgcagctccctgactggactgagtgtgaactctccgggtacggaaagcatgaagccctgtcacccttctattcagaacggttgaaggaagcccacgtccggctgtacccctcaagcagatgcacgagccaacatctactgaaccgaacagttacggataacatgctttgcgccggagacacaaggagtggcggacctcaggccaacctgcacgatgcctgtcagggagactcaggaggcccactcgtgtgtttaaatgatggtcgcatgacacttgtgggcatcatttcatgggggctgggctgcgggcagaaggatgtgcccggcgtatacaccaaggttacaaactatctcgattggatccgcgataacatgaggcct

SEQ ID NO: 17282 - DNA, 1686 bp, Artificial Sequence
  derived and/or modified sequence
atggatgctatgaagaggggcctctgttgcgtgctgctgctgtgcggggccgtgttcgtgagcccatcacaagaaatccatgcacgctttaggaggggcgctcggtcctaccaggttatctgccgggacgagaaaacgcagatgatttaccaacagcaccagagctggctgcgtccagttctcagaagcaatagggtggagtactgttggtgtaactcgggacgggcacagtgccatagcgtgccggtgaagtcttgcagcgagcctagatgcttcaatggtggaacttgccagcaggctctctatttctcagatttcgtgtgccaatgtcccgaaggattcgcgggaaagtgttgcgaaatcgacactcgcgccacctgttacgaggatcagggaatatcgtacagaggtacttggagcaccgcggagagcggcgccgagtgtacgaactggaattcatccgctctggcacagaagccgtactcggggcggcgccctgatgctattagattgggactcggtaatcacaactactgccgaaacccggatcgcgattcgaagccatggtgctacgtgttcaaggcaggaaagtacagctcagagttctgcagcactccagcctgctccgaaggcaattcagactgctactttggcaacggatcggcctacagaggtacccattcacttactgaatcgggagcctcctgcctcccttggaattccatgattctgatcgggaaggtgtacaccgcacaaaatccgtccgctcaggcactggggctgggtaaacataactactgccgcaacccggacggagacgccaagccctggtgccatgtgctgaagaaccggcgcctgacctgggaatactgcgacgtcccgagctgctcaacttgcggactccggcaatactcccagccgcaattccgcatcaagggcggattgttcgccgacatcgcttcacacccgtggcaggccgccatctttgctaagcatcgtcgaagcccaggcgaacgcttcctgtgcggcggcatcctcatctctagctgctggatcctgtccgctgctcactgcttccaagaacggtttcctccccaccacttgaccgttatcctgggaaggacctacagagtcgtgcctggagaagaggaacagaaattcgaagtggaaaagtacatcgtgcataaggaattcgatgacgatacctacgacaacgacatcgctctcttgcagctgaaatcggactcgtcgcgctgcgcacaagagtcctcggtggtgcgcaccgtgtgcttgccaccggccgacctccagctgcctgattggaccgagtgcgaactgtcaggttacggaaaacatgaagcgctgagcccgttttactccgagagactgaaggaggctcatgtcagactgtatccgagctcacggtgcacttcacagcatctgctcaacagaaccgtcacggacaatatgctgtgtgccggagataccagatcaggagggccgcaggccaacttgcacgatgcctgtcagggcgattctggtggaccgctcgtgtgcctcaatgacggccgcatgactctcgtgggaatcatcagctgggggttgggatgtggacagaaggacgtgccgggagtgtacactaaggtgaccaattacctggactggatcagagataacatgcgcccg

SEQ ID NO: 17283 - DNA, 1686 bp, Artificial Sequence
  derived and/or modified sequence
atggacgccatgaaaaggggactttgctgtgtgttgctgctctgcggagcagttttcgtttccccctcacaggagatccatgcacggtttcgcagaggagcaagaagctaccaggtcatctgcagggatgaaaagactcaaatgatctaccagcaacaccagtcctggctgcgtccagtgctccggtcaaaccgtgtggagtactgctggtgtaactcggggcgtgcacaatgtcactcggtgccggtgaagtcctgtagcgaacctagatgtttcaacgggggtacctgccaacaggcactctacttttctgattttgtctgtcaatgtcccgaagggttcgccggaaaatgttgcgagatcgacacgagggcaacctgctacgaggatcaagggatctcgtaccgcgggacttggtccactgcagagtcgggagcagaatgtaccaattggaactcgtccgcactcgcacagaagccatactcgggacgaaggccagatgcgatccgactgggcctcgggaatcacaactactgtcgtaaccctgaccgcgattcgaagccttggtgttacgtgttcaaagccggtaaatacagctccgagttctgttccactcctgcgtgctccgagggcaactcagactgctattttggaaatggaagcgcataccgtggcacgcattcacttaccgaatccggcgcatcgtgccttccttggaatagcatgatactgattggcaaggtgtacactgcgcagaacccttcagcacaggcccttgggctggggaagcataactattgccgaaaccctgacggtgatgccaaaccatggtgccatgtcttgaagaaccgtagactgacttgggagtactgtgacgtcccctcatgttcgacctgtggtctgcgccaatattcacagccacagtttagaattaagggaggactttttgcagacattgcctcgcatccttggcaagcagccatctttgcaaagcacagaaggtccccaggagagagatttctctgcggaggaattctgatttcctcatgttggattctttctgcagcacactgcttccaggaacgctttccaccacatcacctgaccgtgatcctcggcagaacgtacagagtggtaccaggagaggaagaacaaaagtttgaagtggaaaagtacatcgtccataaggagtttgacgatgacacttacgacaacgacatcgctcttctgcaacttaagtccgacagctctaggtgtgcccaagaatcgtccgtggtgcggaccgtgtgccttcctcctgccgacttgcaacttccagactggacggaatgtgagcttagcggctacggaaaacacgaagccctttccccattctactcggagagacttaaggaggcacacgtccgcctctatccttcgagccgctgtacttcgcagcacttgcttaatcggaccgtgactgacaacatgctctgcgcgggagacactaggtcgggaggacctcaagcaaacctgcatgatgcttgccagggtgattccggcgggccacttgtgtgcctgaatgacggacgcatgactctggtcggaattatctcgtggggtcttggctgtggccagaaggatgtgccgggagtgtacaccaaggtgaccaactacctggattggattagggataacatgcggcca

SEQ ID NO: 17284 - DNA, 1686 bp, Artificial Sequence
  derived and/or modified sequence
atggacgcaatgaagaggggactgtgctgtgtgctgcttttgtgtggagccgtcttcgtttccccttcgcaagagatccacgctcgtttccgccggggagcacgcagctatcaggtgatttgcagagatgaaaaaacacagatgatctatcagcagcatcagtcgtggttgcggccagtcctgagaagcaaccgcgtcgagtattgctggtgcaacagtggcagggcccagtgccactctgtcccggtgaaatcttgttctgagcctcgctgcttcaatggcgggacatgccagcaggcactgtacttcagtgactttgtctgtcagtgtcccgagggatttgccggcaagtgttgtgaaattgatacacgagccacttgctatgaggaccagggaatttcgtatcgcgggacctggagcacagccgagtccggagccgagtgtacaaactggaacagcagcgccctcgcccagaaaccctatagcggtcggcgccctgacgcaattaggctcggcctcggtaatcacaattattgccgcaatcccgaccgggattctaagccgtggtgttacgtgtttaaggctgggaagtacagctcagagttctgctcaacgcctgcatgcagtgaaggcaactccgattgttactttgggaacggaagcgcttataggggtacacattcccttacagaatcgggcgcatcatgcctaccctggaactccatgatcctgataggcaaggtttacactgcacagaacccctcagcccaggcactgggtttaggaaagcacaattattgcagaaatcccgatggggacgccaaaccatggtgccatgtgttgaagaataggcggctgacatgggaatactgcgatgtaccttcatgcagtacgtgcggactaagacagtactcacagcctcagttccgcattaagggggggttgttcgccgatatcgcttctcacccgtggcaggctgccatattcgcaaagcatcgcagatcaccaggcgaacggttcctgtgtgggggcatcctcatctcctcctgttggatcctctcggcagcccactgttttcaagagagattccctccgcaccatcttacagttatcctggggagaacatacagagtggtgcctggcgaggaggagcaaaagtttgaggtggagaaatacatagtacataaggaattcgatgacgacacctacgataatgatatagctctgctgcagctaaagagcgattcttcccggtgcgcccaggagtcttccgtggtccggaccgtgtgtctacctcccgcggatttgcagctgcccgattggaccgagtgcgaacttagtgggtacggtaaacacgaggctctcagtcctttctattccgagaggttaaaggaagctcacgtccgcctgtacccatcaagtaggtgtacatcacagcacctgctgaatcgtaccgtgaccgacaatatgctctgcgcaggcgacacaagatctggcgggcctcaagctaatctgcatgatgcatgccagggggactccggaggccctctcgtttgtcttaacgatggacggatgacgctggtggggattatctcctgggggctcggatgtggacaaaaagacgtgcctggtgtctataccaaggtgaccaactacctggactggatccgcgataacatgagacca

SEQ ID NO: 17285 - DNA, 1686 bp, Artificial Sequence
  derived and/or modified sequence
atggacgcgatgaagaggggcctttgctgtgtgctgctgctgtgcggtgccgtctttgtcagcccgtcgcaggagattcacgctcgctttcggcgtggcgcccgttcctaccaggtgatatgccgagatgagaagacccaaatgatttatcaacagcatcagtcctggttaaggccagtgttgcgctccaaccgggtcgagtactgttggtgcaacagcggacgtgctcagtgccacagtgtgccagttaagtcctgcagtgaaccccgctgcttcaacggcggaacatgccagcaagctctgtatttcagcgacttcgtgtgccagtgcccggagggcttcgctggcaagtgttgcgaaatagacacccgggcaacctgctacgaggaccagggtataagctacaggggtacctggtctactgcggaatccggtgctgagtgtactaactggaattcctcggctctggcacagaaaccatatagcggaaggcgtcctgacgctattcgcttgggactgggtaatcataattactgccgaaacccagaccgcgatagcaagccttggtgctacgtattcaaggccggcaaatatagtagtgagttctgtagcacaccagcctgcagtgaaggaaactccgattgttatttcggcaatggctcggcttatcgaggcacccactctttaacggagtccggcgccagctgcctgccatggaattcaatgatattgattggcaaggtgtatacggcgcaaaacccatcggcgcaggctctgggactgggtaagcacaactactgccgcaacccggacggcgatgcgaagccctggtgccatgtcttgaaaaaccggcgattgacttgggagtactgcgatgttcccagctgttccacatgcggccttcggcagtatagccagcctcagttccgaattaagggggggctatttgcagacattgccagccatccctggcaggcagccatttttgccaagcaccgtcgtagccctggcgagcggttcctgtgcggtggaatcctgatttcgagttgctggatcctatcggcggcccactgtttccaagagcgattcccaccacatcatttaacagtcattctgggacggacctatcgggtggtaccgggagaggaggagcagaagttcgaggttgagaagtacattgtgcataaggagttcgacgacgacacgtatgacaatgacatcgcgctgctgcagctgaagtcggattcgagccggtgcgcgcaagagtcctcagtggtccgaacggtctgcctccctcctgccgacctgcaactgcctgattggactgaatgcgaattgagcggatatggaaagcacgaggccctaagccccttctactccgagcggctcaaggaagcccacgtgcgcctgtaccccagcagtcgttgcacgtcccagcatttgttgaaccgcacagtcacagataacatgctgtgtgcaggagatacgaggtccggcggcccgcaggccaacctgcacgatgcctgccaaggcgattccggaggtccgctagtatgcctaaacgatggaaggatgacacttgttggcattatcagttggggcctgggctgtggtcagaaggacgttccaggagtctacacaaaagtaacgaattacttggactggatccgcgacaatatgcgtcct

SEQ ID NO: 17286 - DNA, 1686 bp, Artificial Sequence
  derived and/or modified sequence
atggatgcgatgaagaggggattgtgttgcgtactactcctctgtggagcagtttttgtgtcaccaagccaggaaattcacgcgagattccgacgcggagcccggtcctaccaggtaatctgcagggacgaaaaaactcaaatgatatatcaacagcaccaatcctggctcagacctgtccttcggtcaaaccgcgttgaatattgctggtgcaattcagggcgcgcacaatgccactccgttcccgtaaagagctgttccgaaccccggtgcttcaatggcggtacctgtcagcaggcgttatatttctctgatttcgtgtgtcagtgcccagagggctttgctggcaaatgttgtgaaattgatacgagagccacatgttatgaagaccagggtatcagctatcggggaacctggtccacagcggaaagcggtgccgaatgtaccaattggaactcttccgcccttgctcagaagccctacagcgggcgtaggccagacgccatacgactggggttgggcaatcacaactattgcagaaatcctgatcgcgactccaaaccttggtgttacgtgttcaaagctggcaaatactcctcagaattttgttctactcctgcctgtagcgaaggcaacagcgattgctacttcggcaatgggtccgcatacagaggcactcattctctcactgagtccggagcctcttgtctgccctggaattcaatgatcctaatcggtaaggtgtacaccgcgcaaaacccttcagctcaggctctaggactcgggaagcataattactgtcggaacccggatggagatgcgaagccatggtgtcacgtgctcaagaatcgacgactgacatgggaatactgcgatgtgccgagctgctccacatgtgggcttagacagtatagccaaccccaattcagaatcaagggcgggctctttgctgatatagcttctcatccgtggcaggcagctatctttgcaaagcatcgccgaagtccaggagaacggtttctgtgtggaggaattttgatctcttcatgttggattctgagtgcagcgcactgcttccaggaacgatttcccccccatcacctcaccgtcatcctcggaaggacctacagagtcgtgcccggtgaagaggagcaaaaattcgaagtagaaaaatacattgtccataaggagtttgacgacgacacttacgataatgacattgcccttctgcagctgaagagcgactcttctaggtgtgcccaagaaagcagtgtagtccgtactgtgtgtctgccacctgcggaccttcagctgccagattggacggaatgcgaattgtcaggatacggtaagcacgaagctctgagtccattttacagcgagagactgaaggaggcacatgtcagattatatcccagttcaagatgcaccagtcagcaccttctcaaccggacagtgacagataacatgctgtgcgctggggacacaaggtctggtggccctcaggccaatctgcacgacgcctgccagggagattcaggcggtcctctggtctgcctaaacgacggccggatgacgttggtggggatcatctcttgggggctgggctgtggccaaaaagacgtgcctggtgtgtataccaaggttactaactatttggattggatccgggacaatatgcgtccc

SEQ ID NO: 17287 - DNA, 1686 bp, Artificial Sequence
  derived and/or modified sequence
atggatgcaatgaaacggggtctttgttgcgtgcttcttctttgcggagccgtgttcgtgtccccctcgcaggaaattcacgcgcgcttccgtcgcggcgctaggtcttaccaagtgatctgtcgcgatgaaaagacgcaaatgatttaccaacagcatcagagctggctgcggcctgtgctcagatcgaatagagtggagtactgttggtgtaattccggacgtgctcagtgccatagcgtgcccgtgaaatcctgtagcgaaccgcgctgtttcaatggagggacgtgtcaacaggcactgtactttagcgatttcgtctgtcagtgccccgaaggattcgccggcaagtgttgcgaaattgatacccgggctacttgttacgaagatcagggaatttcctacaggggaacttggtcaactgcagaatccggcgcagagtgtaccaattggaatagctcggccctcgctcagaagccttacagcggacgtcgaccggacgcaatccggcttgggctcggcaatcataactactgtagaaaccccgaccgggattcgaaaccatggtgttacgtgtttaaggcaggcaagtactcaagcgaattctgttcgacccccgcatgctccgagggaaactcagattgctattttggtaatgggtcggcttaccgcggaacgcattcccttactgaatcaggagccagctgcctgccctggaatagcatgatattgattggtaaggtgtataccgcacaaaacccttctgctcaggcacttggactgggtaaacacaattactgtaggaacccggacggagatgcaaagccttggtgtcacgtcctcaagaaccgcaggcttacgtgggaatattgtgacgtgccaagctgctcgacttgcggacttcgtcaatactctcagccccaattcagaatcaaaggcggtctgttcgccgatatcgcgtcgcatccatggcaagcggcaatctttgccaagcatagacggagccctggagaacgattcctttgtggtgggattctgatctcgtcctgctggattttgtccgccgctcactgttttcaggaacggtttcctcctcaccaccttactgtgatacttggacgcacttacagggtggtccctggagaggaagaacaaaagttcgaagtggagaagtacattgtccacaaagaattcgacgatgatacctacgacaatgacattgcccttctgcagcttaaatcggactccagcagatgcgcacaggaatcatccgtggtgagaacggtgtgtctgccacctgctgatcttcaactgcctgactggactgagtgtgagctttcaggttacgggaagcatgaagcactgtccccattttactccgaacgcttgaaggaggcacatgtgaggttgtacccttcctccaggtgtaccagccagcatctcctgaaccgaactgtgaccgataacatgctttgtgcaggagacacgagatcaggtgggccacaggcgaaccttcacgatgcatgtcaaggtgactcaggtgggcctcttgtctgccttaacgatggtcgaatgactttggtcggtatcatttcctggggccttggatgtggtcaaaaggatgtgcctggtgtctacactaaggttaccaattatcttgattggattagagacaatatgcggcca

SEQ ID NO: 17288 - DNA, 1686 bp, Artificial Sequence
  derived and/or modified sequence
atggatgcaatgaagcggggactctgctgcgtgcttctgttatgtggagcagtgtttgtgtctcccagtcaggaaattcatgccaggttccgccgcggcgccagatcgtatcaggttatctgccgggacgaaaaaacccaaatgatttatcagcaacatcagagctggctgagacccgtcttgaggagcaatagagtcgaatactgctggtgtaattccggtcgggcacaatgccattctgtgccagtgaaatcctgtagcgagcctagatgctttaacggagggacttgtcaacaggcgctgtacttttcggacttcgtgtgccagtgccctgagggtttcgctggtaagtgttgcgaaatcgacacaagggctacctgctacgaggaccagggcatctcctacagaggtacctggtccaccgccgagagcggtgccgagtgcaccaactggaatagctccgctctggcccagaaaccttactccggtaggcgccctgatgcaatacgtctgggcttgggtaaccataattattgtagaaaccccgatagagacagcaagccctggtgctacgtcttcaaagctggaaaatactccagtgaattctgctccactcccgcctgttctgagggcaacagcgactgctatttcggcaacggctcagcttaccgggggacgcattcattgaccgaaagcggagcaagctgcctcccttggaacagcatgattctcattggaaaggtttacacagcccaaaacccctctgctcaagccctggggctcggaaagcacaactattgcagaaacccagacggagatgcaaagccatggtgtcacgtgctgaagaacagacgcctgacctgggaatattgcgacgtgcctagttgcagcacctgcgggctcaggcaatatagccagccacaatttcggatcaagggagggttgttcgcagatattgcatcccatccttggcaggcagctatttttgcaaaacacagaagatcacctggcgaaagatttctgtgtggagggatcctgatcagctcctgttggatcctctctgctgcacactgctttcaggaacgctttcctccgcaccatcttaccgtgatcctgggccgcacctatagggtggtgcccggcgaggaagaacaaaaatttgaagtggaaaagtacattgtgcacaaagaatttgatgatgatacttacgataatgatatcgcactgctgcagctgaaatctgatagcagcaggtgcgctcaggagagctccgtggtgcgtactgtgtgcctccctcctgctgacctgcagttgcccgactggaccgagtgcgaattgagtggatatgggaaacatgaggcactgagccccttttactcagaacggctgaaggaagcccacgtgaggttgtacccttcaagtagatgcactagccaacatttactgaacaggaccgtaaccgataatatgctgtgtgctggagatacgcggagcggaggaccccaagccaatctgcacgacgcttgtcagggggacagcggcggccccctggtttgtctcaatgacggaaggatgaccctggtaggcataatcagctggggactcggttgcggccagaaggatgtgcctggagtctacaccaaggtgaccaactaccttgactggattagagacaacatgagacct

SEQ ID NO: 17289 - DNA, 1686 bp, Artificial Sequence
  derived and/or modified sequence
atggacgctatgaaaaggggcttgtgttgcgtattgctactatgcggcgccgtcttcgtatccccctctcaggaaatacatgctcggttccgccgaggggcacgatcataccaggtgatttgtagggacgagaaaacgcagatgatttatcagcagcaccagagttggctcagacctgtgctcaggagcaaccgtgttgaatattgctggtgtaattccgggcgggctcaatgtcattccgtgcccgttaagtcttgcagtgagccgcgatgctttaacggagggacctgccagcaggcactttacttttctgacttcgtatgtcaatgccctgaagggtttgccggcaaatgttgtgaaatcgacacccgggctacgtgttatgaggaccagggaatatcttatcgcggaacttggtctaccgccgagtcgggtgccgagtgcaccaactggaacagtagcgcactggcacaaaaaccctactccggacgaaggcccgacgcgatccgactgggtctgggtaatcacaattattgccgaaaccccgacagagacagtaagccatggtgctacgttttcaaagctggcaagtatagctccgagttctgtagcactcccgcgtgcagtgagggcaactccgattgctacttcggcaatggctccgcctacaggggcacccattcacttactgagtccggagcctcatgtctgccgtggaattcaatgatcctgattggcaaagtgtacaccgcccagaacccatcagcgcaggcactgggcttaggtaagcacaattactgtagaaatcctgatggcgatgctaaaccttggtgccacgtgcttaaaaatcgccggctgacatgggaatattgcgatgtgccatcctgctcaacatgcgggctaaggcagtactcccagccacagtttcgtatcaaaggtggtctcttcgccgacatcgcaagtcacccctggcaagcagcaatctttgccaagcatagacgttcccccggggagcgcttcctgtgcggagggattctgatcagttcatgctggatactgtccgccgctcattgctttcaggagcgcttccccccccatcatttgactgttattctaggccgaacctatcgggtggtcccgggggaggaagagcagaaattcgaagttgaaaagtatattgtgcataaagagtttgatgacgatacttacgataacgacatcgctttattgcagctaaagtctgacagctctcgctgtgcacaggaaagtagtgtagtcaggacagtatgcctgcctcctgccgatttgcagctacctgactggaccgagtgtgagttgagtgggtacggcaaacacgaggctctgtctcccttctattccgagagactgaaggaagcccacgtgagactatatccatcttcaaggtgcacaagccagcacctgctcaacaggaccgtaaccgacaacatgctgtgcgctggtgacacccgatccggggggccacaggcaaatttgcacgacgcttgtcagggcgacagtgggggccctctggtctgcctcaatgatgggagaatgaccttggtgggcattatcagctggggtctcggttgcgggcagaaggacgtgccaggcgtctacacaaaagtgactaattatctggactggattcgggacaatatgagacca

SEQ ID NO: 17290 - DNA, 1686 bp, Artificial Sequence
  derived and/or modified sequence
atggatgcaatgaaacgagggctgtgctgtgttttgcttctgtgcggggcagtgtttgtgtctcctagccaggagattcacgcaagattccgaaggggagctaggtcataccaagtaatatgtcgagatgaaaagacgcagatgatctatcagcagcatcaatcatggctgcgacccgtgctgagatcgaaccgggtagaatactgttggtgcaactccggaagggcccaatgccactctgtccccgtgaaaagttgcagcgagcctcgatgctttaacggcggcacctgtcagcaagccctctatttcagcgacttcgtctgtcaatgtcccgagggctttgcaggcaagtgttgtgagattgataccagggcaacatgctacgaagatcagggcatctcgtacagagggacctggagtactgctgagagcggcgctgaatgcacgaactggaattcctcggctttggctcagaagccctattccggacggaggcctgacgcgatccgactaggactcggaaaccacaattactgcaggaaccccgatagggatagcaagccctggtgttacgtcttcaaagccggcaaatattcgtccgagttttgctctacgcccgcttgttccgagggcaatagtgattgttacttcgggaatggaagcgcctatcgtggaacgcactcccttactgaatctggagccagttgtttgccctggaacagtatgatcctgatcggaaaggtctatactgctcagaatccatcagcacaggccctgggactcggcaaacacaactattgtcgaaatcctgatggtgatgccaaaccctggtgccacgttttaaaaaatcgaaggctaacctgggaatactgcgacgtgccctcctgctctacctgcgggctcaggcaatacagccagccacaattcagaattaagggaggtctgtttgccgatatcgcatcacatccatggcaggctgcaatttttgcaaagcacagaaggagccccggagagcgattcctgtgtggtggcatactgatttcatcctgttggattctctcggctgcacactgtttccaagagcgtttccctccccatcatcttaccgtgattctcggcagaacttatcgagttgtgcctggtgaggaagaacagaagtttgaggtcgaaaagtacatcgtgcataaggaatttgatgacgatacttacgacaacgatatcgcgctactgcagttaaaatctgactcgtccagatgtgcacaagaatcttccgttgtgcgcaccgtgtgtctcccccctgcagacctccagctgcctgactggactgagtgcgaactcagcggttacggaaaacacgaagccctctcgcctttctactctgaacgcctgaaagaggctcatgttcgactctacccttccagcaggtgcacatcacagcacctgttgaacaggactgtcaccgataatatgctatgcgccggcgatactcgatctggtggaccacaagcaaatctgcacgacgcctgccagggtgattcgggcggccccctggtgtgccttaatgacgggaggatgacccttgtcggcatcatcagctggggcttgggctgtggccagaaagatgtgcccggagtgtataccaaggtaaccaattatctggactggataagagataacatgcgacca

SEQ ID NO: 17291 - DNA, 1686 bp, Artificial Sequence
  derived and/or modified sequence
atggacgccatgaagagagggctttgttgcgtgctgctgctctgtggggccgtgtttgtgtctccaagccaggagattcatgcacgtttcagacggggtgcacgctcttaccaagtcatttgtcgcgacgagaaaactcagatgatctatcagcagcaccagtcctggctgagacccgtgttacgttctaacagagtggagtattgctggtgcaactctggcagggcccagtgtcactctgttcccgttaaatcatgtagcgagcctcggtgttttaacggaggcacctgccagcaggctctgtacttttctgattttgtctgccagtgccctgaggggttcgcgggaaaatgttgtgaaatcgatacgcgcgccacatgttacgaagaccagggtatttcttaccgtggcacatggtccaccgccgaaagcggcgctgagtgcactaattggaactcgagtgctctggcccagaagccatactcagggaggaggcccgacgcaatccgcttggggttaggtaatcacaactattgcagaaacccggaccgtgatagcaagccgtggtgttatgtctttaaggccgggaaatacagcagcgagttttgctccacccctgcatgtagcgagggcaactctgactgctactttggtaatggatcagcttataggggaacacattccctgactgagtcgggggcgtcttgtctgccctggaattccatgattctcataggtaaggtgtatactgcccagaatcccagtgcccaggcacttggactagggaagcataattactgccggaaccctgacggagacgccaagccatggtgccacgttctgaaaaacagaaggctcacatgggaatattgtgacgtcccttcttgctctacttgtggtttaaggcagtactcacagcctcagtttcggataaagggcgggctgttcgcggacattgcctcgcatccttggcaggcggctatttttgccaaacatagaagatcccctggtgaacgctttttgtgtggtggcatcctgatttccagctgttggatattgagcgccgcacactgctttcaggagagatttccaccacatcatttgaccgtgattctgggaaggacctatagagtggtacctggagaggaggaacaaaaatttgaggtcgagaaatacatagtgcacaaggaattcgacgacgatacctacgacaacgacattgcgcttctgcagctgaagtccgattcctcccgctgcgcccaggaaagctctgtggtccgtactgtttgcctgcccccggccgatttacagctgccagattggaccgagtgcgaattgtctggatatggtaagcatgaggctttgtcacccttttatagcgagcgcttgaaagaggcccacgtgcgtctataccccagttcacgttgtaccagccagcacctgttgaaccggacagtcactgataacatgttgtgtgccggcgatacccggtccggcggcccccaggctaacttacatgacgcttgtcagggagatagcggtggacccctcgtatgcttaaacgacgggcgtatgaccctggtcggcatcataagctgggggctgggatgcggacagaaggatgtgcctggggtgtacaccaaggtgactaactacctggattggattcgcgacaatatgaggcct

SEQ ID NO: 17292 - DNA, 1686 bp, Artificial Sequence
  derived and/or modified sequence
atggatgctatgaagcgcggactttgctgtgtccttctgctctgtggtgcagtctttgtctccccttcccaggagatccacgccagattcaggcgtggtgcacgttcctaccaggtgatctgcagggatgaaaagacccagatgatctaccagcaacatcagtcctggctcaggcccgtgctgcgcagcaaccgtgtggaatactgctggtgcaactctggtagagctcagtgtcactccgttcctgtcaagagttgcagcgagcctcgctgctttaacggtggcacttgtcagcaggccctctacttcagcgactttgtgtgccagtgccccgagggcttcgcaggtaagtgttgcgagatcgatactagggctacctgttatgaggatcagggcattagttataggggcacctggtccactgctgagtccggtgctgagtgcaccaattggaatagttccgccctggcccagaagccctactccggtcgtagacctgacgcaatcaggcttggtttgggtaatcataattattgccgtaaccccgatcgtgattccaagccctggtgctacgtgttcaaagctggaaaatactcttccgagttttgcagcacacccgcatgcagcgaaggtaactccgattgctactttggaaacggatcagcctacagaggtactcactctctcacagagagcggcgcatcctgtctcccctggaactctatgattctgatcggtaaagtgtacactgcacagaacccctctgctcaggccttgggcttgggaaagcataactactgccgcaacccagatggagatgccaaaccctggtgccacgttctgaagaatagacgtctgacctgggagtattgcgatgtaccttcttgcagtacttgtggtcttcgccaatacagccagccacagtttcgtataaagggaggtctgtttgccgatatcgcttctcacccttggcaggctgctatctttgctaaacacaggaggtcacctggcgaaagattcctgtgtggtggaattttgatctcttcttgttggatcctgtcagctgcccattgtttccaggagcgtttccccccacaccatctgaccgtgatccttggaagaacttacagggtggtgccaggtgaagaagaacaaaagtttgaggtcgaaaaatacattgtgcacaaggaattcgatgacgatacctatgacaatgatattgccctgttgcagctgaaatcagattcttctcgctgcgcccaggagtctagtgtggtgcgcacagtttgtctgcccccagccgatctgcagctccccgattggactgagtgcgaactcagcggatacggcaaacacgaggcattgtcccccttttattctgagcgtctgaaggaggctcacgtgcgtctgtatcccagctcacgttgcacctcacagcaccttctgaaccgtactgtgacagacaatatgttgtgtgctggagacaccagatcaggcggacctcaggcaaatctgcacgatgcctgtcagggcgattctggaggccctttggtttgcctgaacgacggtcgtatgacccttgtgggtataatctcatggggcctgggctgcggccagaaggatgttcctggtgtttacaccaaggtgaccaattacctcgattggatccgcgataatatgagaccc

SEQ ID NO: 17293 - DNA, 1686 bp, Artificial Sequence
  derived and/or modified sequence
atggatgccatgaagcgtggcctctgctgcgtcctcctgctctgtggagccgtgtttgtgtcgccgtcccaggagattcacgcaagatttcggaggggcgctaggtcctaccaagtgatctgccgagacgagaaaacccagatgatctaccaacagcaccagtcatggcttcggccggtgctgaggtccaatcgcgtggaatactgctggtgtaacagcgggcgggcacagtgtcattccgttcccgtgaagtcgtgcagcgaaccacggtgtttcaacggcgggacttgccagcaagccctctatttcagcgatttcgtttgtcagtgcccagagggcttcgctggtaaatgctgtgagattgatacccgcgcgacctgctacgaggaccagggaatctcataccgcggaacttggtccaccgcggaatcgggcgccgaatgcactaactggaactcctcggctctggctcagaaaccgtacagcggcaggcggccagacgctatcagacttgggcttggaaatcacaactactgtaggaacccggaccgcgactccaagccgtggtgctacgtgtttaaagcaggaaagtactcgtcggagttctgcagcacccctgcttgctccgaaggcaactctgattgctacttcggtaatggctctgcctaccgcggaacccattccctgactgaatcaggcgcgtcgtgccttccgtggaacagcatgattctcattggaaaggtctacactgcccaaaacccgtcagcccaggcgcttggattgggtaaacacaactactgccgcaatcctgatggagacgcgaagccgtggtgtcacgtgctgaaaaatcggcggctcacgtgggagtactgcgacgtcccttcatgctccacgtgtgggctcagacaatacagccaaccccagtttcgaatcaagggcggcctcttcgccgatatcgcgtcacacccttggcaggcggctatcttcgcgaaacatcgcagaagccctggcgaacgctttctgtgcggaggcatcctgatctcgtcatgctggatcctgtcggccgcccactgctttcaagagcggtttccaccgcaccacctcactgtcatcctcggacgcacttatcgagtggtcccaggagaagaggagcagaagttcgaggtggagaaatacatagtgcacaaagagttcgacgacgatacctatgacaacgacatcgccctgctgcagctcaagtcggactcgtcgcgatgtgcacaggaatcatctgtggtgcgaactgtgtgcctgccaccggcagatctccagcttccagactggaccgaatgcgaactgagcggatacggaaagcacgaagcgctgtccccattctactctgaacgcctcaaggaagcgcatgtgcgcctctacccgtcatcgcggtgcacttcccagcacttgctcaacagaactgtcaccgacaatatgctgtgtgcaggggacacccggtcaggtggcccacaagccaatctgcacgacgcctgtcaaggtgattcaggagggccgctcgtctgcctcaacgatggacgcatgaccctggtgggaatcatctcctggggcttgggatgcgggcagaaggacgtcccgggcgtgtacactaaggtgaccaactacctggactggatccgcgacaatatgaggcct

SEQ ID NO: 17294 - DNA, 1686 bp, Artificial Sequence
  derived and/or modified sequence
atggatgctatgaagaggggtttatgttgcgttttgcttttgtgtggagccgtcttcgtctccccatcccaagaaattcacgcccgattccgaaggggcgctagaagttatcaagtcatctgtagggacgagaagacccagatgatatatcaacaacaccagtcctggctccgacctgtgctgcgaagtaacagagttgagtattgttggtgcaactctggacgagcccagtgccatagtgttccagtgaagagttgtagcgagccccggtgctttaacggggggacatgtcagcaggccctctactttagcgacttcgtgtgccagtgtccggaggggtttgcaggtaagtgctgcgaaatagatactcgggcaacatgttatgaagatcagggcattagctaccgaggtacctggagtactgctgagagtggcgccgaatgtacaaactggaacagctccgctttggcccagaaaccctattcgggtcgtaggcctgatgctatcagactggggctggggaaccataactactgtaggaaccctgacagggactcaaagccatggtgttacgtgttcaaggctggtaagtactcttcggaattctgttcgacacctgcctgctcagagggtaactcggactgttattttggtaatggcagtgcatacagaggcacccactctctgaccgagtctggggcttcatgtttaccctggaacagcatgattctgatcggcaaagtatacacagcccagaacccctctgcacaggcactcggactcggtaagcacaattattgtaggaaccctgacggggacgctaaaccttggtgtcatgtgctgaagaataggcgcttgacgtgggagtattgtgacgttccctcatgctcaacatgtgggctcaggcagtactctcagccccaatttagaataaagggagggctctttgctgacattgcctcacacccctggcaggctgccatctttgcaaaacatcgacgatcacccggcgaacgatttttgtgcggtggcatattgatctcttcctgctggatcctctctgctgcacattgcttccaggaacgattcccgccccatcatttgacggtcattctggggcggacgtacagagtggtgcctggagaggaggagcagaagttcgaagttgaaaagtacatagttcataaagagtttgatgatgacacctacgacaatgatatcgcgctcctccagttaaagagcgacagctctcgttgtgctcaagaaagctctgtggtaaggaccgtgtgcctgccccctgcagatttgcagttgcccgattggactgaatgcgaactttccggttatggaaagcacgaagcactatctccattttactcggagagactcaaggaagctcacgttcggttgtatccatcctctcgatgtactagtcagcacctgctaaaccgaaccgtaacagacaatatgctgtgcgccggcgatacacggtcaggcggtccacaagccaacttgcacgacgcttgtcagggcgattccgggggtccgctggtgtgtctgaacgatgggagaatgaccctggtgggcattatttcttggggactcggctgtggacaaaaagatgtgcccggggtgtataccaaagttaccaattatctggattggattcgtgataacatgcgtcca

SEQ ID NO: 17295 - DNA, 1686 bp, Artificial Sequence
  derived and/or modified sequence
atggatgccatgaagagaggcctgtgttgtgtcttgctactctgtggggcagtgtttgtaagcccgtcccaagaaattcatgcgcgcttccgtcgcggggcccgcagttatcaggttatttgtagagatgagaaaacccagatgatctatcagcaacatcagtcctggctaagacccgtccttagatcaaatcgcgtggaatactgctggtgcaactcgggcagagctcagtgccactcagtgccagtaaagagctgctccgagcctagatgcttcaatgggggcacctgccagcaggccctatatttttccgatttcgtctgtcagtgccctgaggggtttgctggaaaatgctgtgaaatagacactagagcaacatgttacgaagaccaaggtatcagctatcgtggaacatggtccaccgcggaatccggggccgagtgcacgaattggaactcatctgcccttgcgcagaaaccctactcggggagacgaccagatgccatccgattgggtctaggcaatcataactactgccgcaaccccgatcgggactctaaaccctggtgctacgtgtttaaggccggcaagtactcctcggagttctgcagcacccccgcctgttcggagggcaacagcgactgttattttgggaatggctccgcataccgcggtacgcactcattgacagagtctggagccagttgtctgccatggaactcaatgatactaatcgggaaggtgtacaccgcccagaacccctcagcccaggccctaggattggggaagcataattattgcaggaatcccgatggcgacgccaagccatggtgccacgtgctgaagaatcggcggctgacgtgggagtactgcgatgttccaagttgttcaacttgtggcctgagacagtattcccaacctcagttcagaattaagggaggccttttcgccgacattgcgtcccatccctggcaggcagctattttcgcaaaacaccgtcggtcccccggtgaacgctttctgtgtggaggcatcctgatctcatcatgctggatcctcagcgccgctcactgctttcaggaacggttcccacctcatcacctcaccgtgattttgggccgtacttacagggtggtgcctggtgaggaggaacagaagttcgaggtagagaagtacatcgtgcataaggagtttgatgatgatacgtacgataacgacattgctctcctgcaattgaagtcagattcttctagatgtgctcaagaaagctcagtcgttagaacagtctgcctgccccctgccgacctgcagttacctgattggaccgaatgtgagctttccggatatggcaaacatgaagcgctctcccccttttactcagagcgtctaaaggaagcccacgtgaggttgtacccttcctctaggtgcacatctcagcaccttctcaacaggactgtaacagataacatgctgtgcgctggagatacccggtcaggaggccctcaggccaacttgcacgatgcttgtcaaggggacagtggcgggcctcttgtgtgtctcaatgacggccgcatgacactggtagggatcatcagctggggccttggatgcggtcagaaggatgttccaggagtgtatacaaaggtgacgaattacctggactggatcagagacaatatgcgacca

SEQ ID NO: 17296 - DNA, 1686 bp, Artificial Sequence
  derived and/or modified sequence
atggacgccatgaagcgcggactgtgctgcgtgttgctcctgtgcggcgccgtctttgtgtcaccctcgcaggagattcatgccagatttaggcggggcgcgcggtcatatcaggtcatctgtcgggatgaaaagacccagatgatctaccaacaacatcagtcgtggctgcgacctgtcctgcgttcgaaccgggtggaatactgctggtgcaactccgggcgggcacagtgccacagcgtgcctgtcaagtcatgctcagagccgaggtgctttaacggaggaacgtgccagcaggcactgtacttctctgacttcgtctgccaatgcccagaaggattcgcaggaaagtgctgtgaaatcgacacccgagcgacgtgctacgaggaccaaggaatcagctaccgcggcacctggagcaccgccgaatcaggagctgagtgcacgaactggaattcgtcagcgctggctcaaaagccatactcagggcgcagaccggacgcgatcaggctgggactggggaaccataactactgtaggaaccccgatcgcgactcaaagccctggtgctacgtctttaaggcaggtaaatactcgtccgaattctgctcaaccccagcctgttccgagggaaactcagactgttacttcggaaatggttccgcatacagaggaacccactcgctgaccgagtcgggagcgtcgtgtctgccgtggaactcgatgatccttattggcaaagtctacacggcacaaaacccgagcgcccaggctctgggccttggaaaacacaactactgccgcaacccagacggggacgccaagccatggtgccatgtgctgaagaatcgccgcctgacctgggagtactgcgacgtgccaagctgttctacctgcggtttgagacagtactcacagccgcaattccgaatcaaaggtggactgttcgcggatatcgcgtcccacccgtggcaagccgctatctttgccaagcatcgcagatcccctggcgaaagatttctgtgtggaggaatcctgatctcttcatgttggatcctttccgcagctcactgcttccaggagagattccctccccatcatctcactgtcatccttggccgcacctaccgcgtggtaccgggcgaggaggaacagaaatttgaggtcgaaaagtatattgtgcacaaggagttcgacgatgatacttatgacaatgatatcgcgctgctgcagttgaagtcggattcgagcaggtgtgcccaggaaagcagcgtggtgcgcaccgtgtgcttgcccccggcagacctccaactgccagattggaccgagtgtgaattgtcgggatatggaaaacatgaagcgctttcaccgttctactcggaaagactgaaggaagcacacgtccgcctctaccccagctcgcgctgtacttcgcaacacctcctgaacagaaccgtcactgataacatgctgtgcgccggagacacccgcagcggaggaccccaggcaaatctccacgacgcttgtcaaggtgattcaggcggaccattggtctgcctgaacgatggtcggatgaccctggtggggatcataagctggggacttggttgcggccagaaagatgtgcctggagtgtacactaaggtgaccaattacctcgattggatcagagacaatatgaggcca

SEQ ID NO: 17297 - DNA, 1686 bp, Artificial Sequence
  derived and/or modified sequence
atggatgcgatgaaaaggggcctgtgttgtgtccttctcctgtgtggggccgtgtttgtgagccctagccaagaaatacatgctcggttccgcagaggggcacgatcataccaggttatctgtcgagatgagaagacccagatgatttatcagcagcatcagagttggctgcgtccagtactgcggagtaacagggtcgagtattgctggtgcaattccggaagggcccagtgtcactctgtacctgtgaagtcatgctccgaacccaggtgttttaacggcggaacatgtcagcaggccctgtacttctccgatttcgtctgtcagtgccctgagggattcgcaggaaaatgctgcgaaatagacacaagagccacctgctacgaagaccagggtatctcgtatagagggacatggtcaacagcagaatccggggcggagtgcactaattggaactcatccgccctcgcgcagaagccttactcagggcgtagacctgacgctatcaggttgggtcttggaaatcacaattactgccgaaatcccgatcgggactccaagccctggtgttacgtctttaaagccggcaagtactccagcgaattttgttctacccctgcctgttccgaaggcaattcagactgttattttggcaacgggtccgcatatcgcggtacccactcattgaccgaatccggggcctcatgtttgccctggaatagcatgatcctgatcggaaaggtctacaccgcccagaatccttcagctcaggccctggggctgggaaaacacaattactgccggaatcctgacggcgacgccaagccatggtgccatgtgctgaaaaatcggagattaacgtgggagtattgcgacgttcccagctgtagcacatgtggactaaggcagtacagccagcctcaatttcggataaaagggggactgttcgctgacattgcatcgcatccatggcaggccgccattttcgccaaacataggagatccccaggggagcgttttctctgcgggggaattctgatctcaagctgctggatcctctctgctgcccattgctttcaggagcgcttcccccctcaccacctcacagtcattcttggtcgcacttaccgggtggtgccaggggaagaagaacagaaattcgaagtggagaagtacattgtacacaaagaatttgacgacgacacctacgacaacgatatcgcacttctccagctgaaaagtgatagctccagatgcgcccaggagtcctctgtagtgaggaccgtctgcttgcctcctgcagacctgcaactgcctgactggactgagtgcgagttatccgggtacggcaagcatgaggctctctcccccttttactccgagcgactgaaggaggcgcacgtgagactctacccatcttcacgctgtacctcccaacatcttctcaacagaaccgtgaccgacaatatgctgtgcgccggagacactagaagtgggggcccccaggccaatctacacgacgcttgtcagggcgattctgggggccctctcgtgtgcttgaacgacggacgaatgacactagtggggatcatttcctggggactcggatgtggacagaaagatgtaccgggtgtctacactaaggtcaccaattatctagactggattcgggataacatgcgccct

SEQ ID NO: 17298 - DNA, 1686 bp, Artificial Sequence
  derived and/or modified sequence
atggacgccatgaagcgagggttatgctgtgtcctgctcctttgtggcgccgtatttgtcagtccctctcaggagatacatgctcggttcagacggggggctcgcagctaccaggtgatctgccgcgatgaaaagactcagatgatctaccagcagcatcagtcttggctgagacctgtccttcggtctaatagagttgaatactgctggtgtaatagcggacgggcccagtgccacagcgtgccagttaagagttgcagtgagccacgctgcttcaatggtggaacctgtcagcaggccctctacttttccgattttgtgtgtcagtgccccgagggcttcgcaggcaagtgctgcgagatcgatactagggcaacttgctacgaggatcaggggatttcatacagaggcacatggtctaccgccgaatctggggcagaatgcaccaactggaattcaagtgccctggctcagaaaccatacagtggccgtaggccagacgcaattcgactgggcttaggcaatcataactattgtcgaaaccctgatagggacagtaaaccgtggtgctatgttttcaaagcaggtaaatacagctctgagttttgctccactccagcttgtagtgaaggcaattccgactgctatttcggcaacggcagtgcctaccgtggcacccactctctgacagaaagtggagctagctgtctgccctggaatagtatgattctgatcggaaaggtatataccgcccaaaacccgtctgcccaagcgcttgggctggggaagcataattattgccggaacccggacggcgatgctaaaccctggtgccacgtgctgaagaatcggcgcctgacctgggagtattgcgacgtgccctcttgctcaacatgtggtctcaggcagtactcccagcctcagtttcgaatcaagggagggctgttcgccgacatcgcttcacatccgtggcaggctgccatatttgcaaagcaccgccgcagtccgggggagaggttcctgtgcggcgggatactgatttcatcatgttggatcctttcggctgcacattgcttccaggagcgattcccaccacaccatttgactgtgatcttaggtcggacctaccgagtcgtccccggagaggaggaacaaaagttcgaagtagagaagtatattgtccataaggagtttgacgatgatacgtatgacaatgatatcgccctgctacagctgaagagtgacagtagcaggtgtgcacaggaatcctcagtggtcagaactgtctgcctccccccggcggacctgcagcttccagactggaccgagtgtgaactctctggatatggcaaacacgaggctctgtctcctttttatagcgaacgcctgaaggaagctcatgtgaggctgtacccatcatcccgatgtacatcacaacatctcttgaatcgaactgtgacagacaacatgctctgtgccggcgacacccgatcgggcggtccacaagctaaccttcatgacgcatgccagggagactccggagggcccctggtatgccttaacgatggacgcatgactctcgtggggataatctcgtgggggctggggtgtggtcaaaaggatgtccctggggtgtataccaaagtaaccaattacctcgattggatacgcgacaacatgcgacct

SEQ ID NO: 17299 - DNA, 1686 bp, Artificial Sequence
  derived and/or modified sequence
atggatgctatgaagagggggctgtgttgcgtgctcctcttgtgtggggccgtcttcgtaagcccaagccaagaaatacatgcacgtttcagacgaggcgctcgcagttaccaggtgatttgtagggacgaaaaaacacaaatgatataccaacagcaccaaagctggctgagacctgtgcttcgctctaatcgcgtagagtattgctggtgcaactccgggcgcgcccagtgtcatagtgtcccagttaagtcctgttctgagccacgctgcttcaacggcggcacatgccagcaggcactctacttttctgacttcgtctgtcagtgtccagaaggcttcgccgggaaatgctgcgagatagataccagagccacctgttacgaggatcagggaatttcgtaccgaggcacatggagcactgctgagtctggggccgaatgcacaaattggaatagctcagcattggcgcagaaaccctactctggccgccgaccggatgccatccgcctgggactgggaaaccacaattattgtaggaacccagacagagactctaaaccatggtgttacgtcttcaaggcggggaagtactccagcgagttctgctctaccccagcctgctccgaagggaattcagattgctacttcggcaatgggtcagcataccgggggacccactccttaactgagtcgggcgcttcatgcttgccttggaacagcatgatcctgatagggaaagtctataccgctcagaatccaagcgcccaggccctgggtctgggcaagcacaattactgcagaaaccccgatggcgacgccaaaccttggtgccacgtgttgaaaaacagaaggcttacatgggaatattgtgacgtacctagttgttccacctgcggcctgcgccagtattcccagccccagttccggattaaaggagggctctttgctgatatcgcctctcatccttggcaggcagctatcttcgcaaaacaccgcagatctccaggggagagatttctatgtgggggcatcctgatttcctcctgctggatcttgagcgccgcccactgttttcaggagcgtttccctccgcaccacctgactgtaattctcgggaggacctaccgagtggtacccggggaagaggagcagaaatttgaggtggaaaagtatattgtgcacaaggagtttgacgacgatacatacgacaatgatatagccttgctgcagttgaaaagcgattccagccgctgcgctcaggaaagcagtgtcgtgaggactgtctgtctccccccagcggacctccagctgcctgactggacagagtgcgagctgtcggggtacggaaagcatgaggccttgagccccttctacagtgagcgtctcaaagaggcgcatgttagactttaccctagctcacggtgtactagccaacatttgttgaaccgaactgtgaccgataatatgctttgtgctggggatacccgctccggcgggccccaggctaacctccacgacgcatgccagggggattctgggggcccactagtatgcttgaatgatggtaggatgactttggtgggaataatctcatggggcttaggttgcggacagaaggacgtgcccggggtatataccaaagttactaattacctcgactggattagagataatatgagaccc

SEQ ID NO: 17300 - DNA, 1686 bp, Artificial Sequence
  derived and/or modified sequence
atggatgcaatgaaaagaggactttgttgcgtgctgctgctctgtggcgcggtctttgtttctccgtcccaagagatccacgcccggtttagacgtggtgctaggtcctaccaggtaatttgtagggatgagaaaacacagatgatctatcagcagcatcagagctggctccgcccagtattaaggagcaatcgggttgaatattgttggtgcaattcaggccgcgcccagtgccattccgtgcccgtcaaatcctgctctgagccccggtgcttcaatggcggaacctgtcaacaggcgctgtacttctccgacttcgtgtgtcagtgtcccgagggcttcgccggcaaatgttgcgaaatagatacgcgcgccacttgttatgaagaccaaggtatttcctaccggggcacatggagtaccgcagagtctggggcagaatgcaccaattggaacagcagtgccctcgcacagaagccttacagtgggcgacggccagatgccatccgcctgggccttggcaaccacaattattgtagaaatccagatcgcgatagcaagccctggtgttatgtcttcaaggcgggaaagtattcaagcgagttctgcagcaccccagcttgctctgagggaaattctgactgttatttcggaaacggtagtgcatacaggggaactcacagcctaacagaatccggcgcttcatgtttgccctggaacagtatgatcctaataggcaaggtgtacacagctcaaaacccttccgcccaggcccttggcctagggaaacataactattgtaggaaccctgatggagatgcaaaaccatggtgccacgtgctgaagaaccggaggctgacttgggagtactgtgacgtgcctagttgtagcacatgtgggctgaggcagtacagtcagccacaattcaggataaagggtggcctgtttgctgatattgcctcacatccttggcaggctgccatttttgccaagcatcgtagatcaccaggcgagagattcttgtgtggcggcatcctgataagctcctgctggatcctttccgcggctcactgctttcaggaacggtttcccccacaccatctcaccgttatactaggacgcacatatagagtggtgcccggcgaggaggagcagaagtttgaagtggaaaagtacatagtccataaggagtttgatgatgatacctacgacaatgacatcgctttactacaactcaaaagtgattcttcccgctgtgcgcaagaatcttctgtggtcagaacagtatgccttccccctgctgacctgcagctccctgattggaccgagtgcgagctgtctgggtacggcaaacacgaagctctctctccattctactcagagcgtctgaaagaggcccatgtgcggctgtacccctcttccagatgcacctctcagcacctgttgaaccgcacagttactgataatatgttgtgtgccggtgacacccgtagcggcggtccacaggcaaacctccacgatgcatgccagggcgactcgggcggtcccttggtgtgcttaaatgacgggcgcatgaccttggtgggcatcatatcttgggggctaggctgtggtcagaaggacgtccctggagtttatactaaggtcactaattatcttgattggatcagggataatatgcggccc

SEQ ID NO: 17301 - DNA, 1686 bp, Artificial Sequence
  derived and/or modified sequence
atggatgcaatgaaaagaggtttgtgctgtgttcttttactttgtggagctgtttttgtttctccaagtcaagaaatacatgcaagattcagaagaggagctagatcataccaagttatttgtcgagatgaaaaaacacaaatgatatatcaacaacatcaatcttggcttcgacctgtattaagatctaacagagtagaatattgttggtgtaattctggtagagctcaatgtcatagtgttccagttaaatcatgttcagagccaagatgttttaatgggggaacatgtcaacaagctctttattttagtgatttcgtttgtcaatgtccagaaggattcgctggtaagtgttgtgaaattgatactagagcaacttgttatgaagatcaaggaatttcttatcgagggacatggtcaactgctgaatcaggagcagaatgtactaattggaactcatcagctcttgcacaaaaaccatactcaggacgtagacctgatgctattagactaggtttaggaaatcataactactgtagaaatccagatagagactctaaaccttggtgttatgttttcaaggcaggaaaatattcatcagaattttgcagcactcctgcttgtagtgaaggtaattctgattgttatttcggtaatggaagtgcttatagaggtacacattcattaacagagtcaggtgcaagttgtttaccatggaattcaatgattttaattggtaaagtttatactgcacaaaatccatcagcacaagcacttggattgggaaaacataattattgccgtaatccagatggtgatgcaaaaccatggtgtcatgttcttaaaaatcgtagattaacttgggaatattgtgatgttccaagttgttctacatgtggattaaggcaatattctcaaccacaattcagaattaaaggaggacttttcgctgatattgcttctcatccatggcaagcagctatttttgcaaaacatcgtagatctccaggagaacgattcttatgcggaggtattttaatttcatcttgttggattttatcagcagcacactgttttcaagaaaggtttccaccacatcatttaactgtaattttaggtcgtacatatagagttgtacctggtgaagaagaacaaaaatttgaagtcgaaaaatatatagtacataaagaatttgatgatgatacgtatgataatgatattgctcttttacaacttaaatcagattctagtcgttgtgctcaagaatcttcagttgttagaactgtttgcttaccaccagctgatcttcaattacctgattggacagaatgtgaactttcaggatacggaaaacatgaagctttaagtccattttattcagaaagattaaaagaagctcatgttagattatatccttcttctcgatgtactagtcaacatcttttaaatagaacagttacagataatatgctttgtgcaggtgatacaagatctggtggaccacaagctaatttacatgacgcatgtcaaggagattcaggaggtccacttgtttgtcttaatgacggaagaatgacacttgttggaataatttcatggggattagggtgtggacaaaaagatgtcccaggagtttatactaaagtaacaaattatttagattggattagagataatatgagacca

SEQ ID NO: 17302 - DNA, 1686 bp, Artificial Sequence
  derived and/or modified sequence
atggatgccatgaagaggggcctgtgctgcgtacttctactgtgtggggctgtgttcgtgtcaccatcacaggaaatccacgcccgattcagaagaggggcccgctcgtaccaggtcatctgtcgagatgaaaagacgcaaatgatttaccagcagcatcagagttggcttcgccctgtcctcaggtccaacagagtggagtattgctggtgtaatagcgggcgtgcccagtgccactcggtgccggtcaagtcttgcagtgaaccaaggtgctttaacggcggcacatgccagcaagctttgtacttctctgattttgtttgtcaatgtcctgaaggattcgctggaaagtgctgtgaaattgacactcgagcgacatgttatgaggaccagggcatatcctaccgggggacatggtctacagcagagtccggagcagaatgtaccaattggaacagtagtgctttagcacagaagccatactccgggcgcaggcctgacgcaattcgccttggactcggcaaccataactactgcagaaaccccgatcgggactccaaaccttggtgctatgtcttcaaagcaggcaagtatagcagtgagttttgcagtacgcctgcatgtagcgagggcaacagcgattgttatttcgggaatgggagcgcatacagaggaactcacagtcttactgagtcgggcgctagctgtcttccgtggaactccatgatcctgattgggaaggtgtacaccgcccaaaatccctcagcccaggcactgggactcggcaaacataactattgccgaaacccagatggggatgccaagccttggtgccatgtgctgaagaaccgtcgcctgacatgggagtactgtgatgtaccgagctgtagtacgtgcggactgcggcagtacagccagcctcagtttcggataaaggggggcttatttgcagatatagcctctcatccatggcaggctgcgatcttcgccaaacataggcgtagtccaggcgagagatttttatgcggcggcatcctaatatcttcatgctggatcctatcagccgctcactgtttccaggaaagatttcccccacatcaccttacagtcatcctgggcaggacctatcgggtagtacccggggaagaagagcagaagttcgaagtagagaagtatatcgtgcacaaggagtttgacgacgatacgtacgacaatgacatcgcacttcttcagctgaaaagtgattcttcaagatgtgcacaggagtcctctgtggtaaggacagtgtgtctaccgcctgcagatctacagctacccgattggaccgagtgcgaactgtccggatacggaaagcacgaggctctatcacccttttacagtgagagattgaaggaagctcacgtgaggttgtacccttcttcacgatgcacctctcagcatcttctaaaccggaccgtgactgacaacatgctgtgcgctggggacacccgctccggggggccccaggcaaacttgcacgatgcatgtcagggcgatagcgggggcccactggtatgtctgaatgatggccgaatgacgctcgtgggcattatatcatggggcctaggctgcggacagaaggatgtccctggcgtgtatacaaaagttacgaactacctggactggataagagataatatgcgtccg

SEQ ID NO: 17303 - DNA, 1686 bp, Artificial Sequence
  derived and/or modified sequence
atggacgccatgaaaagaggactgtgttgtgtgctgctgctgtgcggagccgtgttcgtgagcccgtcacaggagatccacgcaagattccggcggggggcccgctcataccaggttatctgccgcgatgagaaaacccaaatgatctaccagcagcaccaatcgtggcttagaccggtgttgaggtccaatagagtggaatactgctggtgtaactcgggacgcgcacagtgccactccgtcccagtgaaaagctgctcggagccacgttgtttcaatggaggcacctgtcaacaggcactctacttctcggacttcgtctgccagtgtccagagggcttcgctggaaaatgttgcgaaatcgacacccgggctacttgctacgaagatcagggaatctcgtaccggggcacttggtcaactgcagaatccggagctgaatgcaccaactggaactcctccgccttggcccagaagccttactccggtcgtagacctgacgcgatccgcctgggactcggaaaccacaattactgcaggaatccggatcgggactcaaagccgtggtgctacgtgttcaaggctggtaagtactcatcggagttttgctcaactcctgcatgcagcgaagggaacagcgattgctatttcggaaatgggtcggcctaccggggaactcattcccttaccgagtcaggcgcctcctgcctgccatggaacagcatgatcctgatcggaaaggtgtatactgcacagaaccctagcgcacaggcattgggactgggaaagcacaactactgcaggaacccggacggagatgcaaagccctggtgccatgtgctgaagaaccggcggttgacctgggaatactgcgacgtgccctcctgctctacctgcggactcaggcagtactctcagccacagttccggattaaaggaggattgttcgccgatatcgcttcgcacccatggcaggccgctatcttcgcgaagcacagaaggagcccaggggaacgtttcctgtgtggaggcattcttatttcgtcgtgctggattctcagtgccgctcattgttttcaggaacgcttcccgccacatcatctgaccgtgatcttgggacgcacctaccgggtcgtcccaggagaggaagaacaaaagtttgaggtggaaaagtatatcgtccataaagagtttgatgatgatacctacgacaatgatatcgctcttctccagctgaagtcggactcaagccggtgcgcccaagaatcctcggtggtccgcactgtctgtttgccgccggccgacctgcagctgccggactggaccgagtgtgaactgtccggatacggaaagcatgaagcactgagcccgttctattccgaacggctgaaagaggcccacgtgcgcttgtacccgtcgagccgatgtacttcgcagcacctcctgaaccgaacggtcaccgataacatgctttgcgccggagataccaggtcaggaggtccccaggccaacctgcacgatgcgtgccagggagactcaggaggcccgcttgtctgcctgaatgacggccgcatgactctggtcggaatcatctcgtggggactgggctgcggtcaaaaggacgtaccgggagtgtacaccaaggtgaccaattacctggactggatcagagataacatgcgcccg

SEQ ID NO: 17304 - DNA, 1686 bp, Artificial Sequence
  derived and/or modified sequence
atggacgcgatgaaacgcgggctctgttgcgtgctgctgctctgtggagcagtgtttgtgtccccatcccaggaaatacacgctcgctttcggagaggggcacgttcctaccaggtcatttgtagggacgaaaaaacccagatgatctaccagcagcatcagtcctggctgcgtcctgtgctcagatcgaatagagtggagtactgttggtgtaattcggggcgagcacagtgccattcggtgccggtgaagagctgttcagaaccacggtgttttaacggaggtacttgtcaacaagcactttacttctcggatttcgtgtgtcaatgccccgagggatttgccgggaaatgctgtgagattgatacccgagctacctgctacgaagatcaaggaatctcgtaccgaggaacttggtcgaccgccgaatcgggggcagaatgtaccaactggaactcttcagcactcgcccaaaagccatacagcgggagacgacctgatgcgatacgtctcggccttggtaaccacaattactgcagaaacccagacagagattcaaaaccttggtgctacgtgttcaaggcaggaaagtattcgtcagaattttgttcgactccagcatgttccgagggaaactcagattgctactttggtaatggttcagcgtaccgtggaacccatagcctgactgaatccggggcaagctgcctcccgtggaactccatgatccttattggtaaggtgtatactgcacagaacccctccgcccaggcacttggactgggtaagcacaactattgtagaaatcctgatggcgacgcgaagccttggtgtcatgtgcttaagaatcgacggctgacgtgggagtactgtgatgtgccctcctgctccacttgcggactgaggcaatactcgcagccccagtttcggattaagggaggcctctttgctgatatcgcatcacacccttggcaagcagcaatcttcgcaaagcaccgcaggtcgcccggagagagattcctgtgtgggggcattctcatctcctcctgctggattttgtcagccgcacactgttttcaagaacggttcccgccacatcatcttactgtcatactgggtcgcacctacagagtggtcccgggggaggaggaacagaagttcgaggtcgaaaagtatattgtgcataaagagttcgatgacgatacctacgacaacgatattgcgctgctgcaacttaagtcggactcctcccgctgcgcccaagaatcctcagttgtgagaactgtgtgtctgcctcctgccgatctgcaactgcctgattggactgaatgtgagctgtcggggtatgggaagcatgaagccctcagcccattttactccgagaggcttaaagaagcccatgtgaggctctacccatcaagccggtgtacttctcaacatcttcttaacagaacggttaccgacaatatgctttgcgcgggtgatactcgctcgggagggccacaggccaatctccatgatgcctgccaaggagattcggggggaccccttgtgtgcctgaacgacggccggatgaccctcgtcggtatcatttcctggggtcttggatgtggacaaaaagatgtgcccggcgtttacaccaaggtgaccaattaccttgattggattagggataacatgcgccca

SEQ ID NO: 17305 - DNA, 1686 bp, Artificial Sequence
  derived and/or modified sequence
atggatgccatgaagagggggctgtgctgcgtgcttttgctgtgcggcgcagtgtttgtgagccccagtcaggagatccacgcccgctttcggcgcggcgcaaggagttaccaggtcatatgcagggacgagaagacccagatgatctaccagcagcaccaatcttggctacgccccgtccttcgttccaacagggtagagtattgctggtgtaattccggcagagcgcagtgtcactccgtacccgtcaagtcctgctcagaacctcgctgtttcaacggcggtacgtgccaacaggcgctttatttctccgattttgtatgccagtgcccagagggattcgcagggaaatgctgcgagattgatacaagagccacatgctatgaggatcagggcattagttacaggggcacatggagtaccgctgagtcaggagctgaatgcacaaactggaattcttccgcgttggctcaaaaaccttattcgggtcgtaggcccgatgccattcgcctgggtctaggtaatcataactattgccggaaccccgatagagactccaagccctggtgctacgttttcaaagccggtaaatactccagcgagttttgttcaacccctgcctgttccgagggcaatagcgattgttactttggcaacggctccgcctacagggggactcacagcctgaccgagtctggcgcctcctgccttccatggaatagtatgatcctcataggcaaagtctacaccgcgcagaatccttccgcccaggctctgggcctcgggaagcataattattgtagaaatcccgatggtgacgcaaaaccatggtgtcatgtgctgaagaataggcgcctgacatgggaatactgcgacgtcccctcttgctcaacctgcggactgcggcagtatagtcagccccaattccgcataaaaggcgggctgtttgctgacatcgcttcccacccttggcaagccgctatctttgcaaagcatagacgcagccccggggagcggtttctttgtggcggcattctgatttcttcttgttggatcctctctgccgcccactgcttccaggaacggtttccaccacatcaccttacagtgatcctaggtagaacgtaccgcgtggtaccaggcgaggaagagcaaaaattcgaggttgagaaatacatcgtccacaaggaatttgacgacgatacctatgacaatgatatcgctctgctgcagctgaagagcgactcaagccgctgtgcccaggaaagcagcgtggtgcgtacagtgtgcctccctccagctgacctgcaactgcctgattggacagaatgcgaactgtcgggatatgggaaacacgaagctttgtctcccttttactctgagaggctgaaagaagcccacgttagactgtacccttcaagccggtgcacatcccagcacctccttaacagaaccgtcacagacaacatgctgtgcgccggggacacgcgttcaggcggaccacaggccaatttgcatgatgcttgtcagggcgattctggaggcccgcttgtgtgccttaatgatggccgtatgactctggtgggaataatctcttggggactcggatgcgggcaaaaggacgttcccggggtgtataccaaagtgaccaattatttggattggattcgcgacaatatgcgcccg

SEQ ID NO: 17306 - DNA, 1686 bp, Artificial Sequence
  derived and/or modified sequence
atggatgcaatgaagcggggcctttgttgtgtgctccttctgtgtggggcagtctttgtctccccttcccaagaaatccatgcacgcttcagacgcggagcccggtcataccaagtgatttgccgcgacgaaaagacgcagatgatctatcagcaacaccaaagctggctgcgcccggtgctgagatcgaacagagtggaatactgctggtgcaactcgggtcgtgcgcagtgtcattccgtacccgtcaagtcatgctcggaacctcgctgctttaacggaggtacttgccagcaagctctctactttagcgactttgtgtgtcagtgtcccgagggcttcgccggtaaatgctgcgaaatagatacgcgagccacttgttacgaagatcaaggcatctcatacagaggaacgtggtcaacggcggaaagcggtgctgagtgtaccaactggaactcaagcgcacttgcacaaaagccctactccggtaggcgcccagacgccatcagactgggactgggaaaccacaactattgtcggaatcctgatcgtgactcgaagccgtggtgttacgtgttcaaggcaggcaagtacagctccgagttttgttccaccccagcatgttccgaaggtaattccgattgttacttcgggaacggcagcgcctaccgcggaacccattcacttactgaatccggtgcatcttgtctcccatggaactcgatgattttgataggaaaggtctacaccgcacaaaacccttcggcgcaggcactgggtctgggaaagcacaattactgccgtaatcctgatggcgatgcaaagccctggtgccatgttttgaagaatagacgtcttacctgggaatactgcgatgttccttcgtgctccacctgtggtctgagacagtactcgcagccccaatttcggattaagggaggtctgttcgctgatattgcctcccatccttggcaagcagcaatcttcgccaagcatagacgcagccctggcgaaagatttctctgtggagggattcttatttcttcctgttggatcctgagcgcagcacactgctttcaagaacgttttcccccacaccaccttacggtgattctgggtcgaacctacagggttgtgcctggcgaagaagaacaaaagttcgaggtcgaaaagtacattgtccataaagagttcgatgatgatacctatgacaatgacatagctctcctgcagctgaaatcggatagcagccgctgcgcgcaagaaagctcggttgtgcgcaccgtgtgtctgccgcctgcagatttgcaacttccggactggactgaatgtgagcttagcggatacggaaaacatgaggcgctttcccccttttacagcgaacgcctgaaagaggcgcacgtgcgtctgtatccttcttcgcgatgtacgtcacaacatctcctgaaccgaaccgtgaccgataacatgctgtgcgccggagacactcggtctggtgggcctcaggctaatcttcacgacgcgtgtcaaggagactcgggtggaccgctggtgtgcctcaatgatggacggatgactcttgtgggtatcatctcgtggggactgggctgcgggcagaaggatgtgcctggtgtgtacaccaaggtgactaattacctcgattggatccgcgacaacatgcgacct

SEQ ID NO: 17307 - DNA, 1686 bp, Artificial Sequence
  derived and/or modified sequence
atggatgccatgaagcgggggctgtgttgcgttctgctcctgtgcggagcagtatttgtctcaccgtcacaagaaatccatgcaagattccgcaggggtgcgcggtcataccaggtgatctgtcgagacgaaaagacccagatgatctatcagcagcaccagagctggctccgacctgtgctccggtctaaccgggtcgaatactgttggtgcaattcgggtagagcccagtgccacagcgtgccggtgaaatcatgctcggagccacgctgcttcaacggcggaacctgccaacaggccctttactttagcgacttcgtctgtcaatgccctgagggatttgctggcaagtgttgtgagatcgatacccgcgctacctgctacgaggaccagggcatttcctacaggggtacctggtccaccgcagaatcaggcgcggagtgtaccaactggaactcctcagcgttggctcagaagccgtacagcggacgacgtcctgatgccatcagacttggactggggaaccacaattactgtcgaaacccagacagagatagcaagccatggtgctacgtctttaaggctggaaagtattcatccgaattctgctctacccctgcgtgctcagaaggaaactcagactgctactttggtaacggttccgcctaccgcgggacccacagcctgactgaaagcggcgccagctgcctcccgtggaactcgatgatcctgattggtaaggtgtacaccgcgcagaacccatcagcacaagcattgggcctcggcaagcacaattactgccggaaccctgacggagacgcgaaaccatggtgccacgtgctcaaaaatcggcgcctgacttgggaatactgtgatgtgccgtcgtgttcgacctgcggtctgcgccagtactcacaacctcagttccgaatcaagggtggcctcttcgcagatatcgcatcgcacccatggcaggcagctattttcgctaagcatagacggtcgcccggtgagcggttcctctgcggaggaattctgatctcatcgtgttggatcttgagcgccgcccattgcttccaagagcgcttcccgcctcaccatctcacggtgatcctggggcggacctacagagtggtgcctggagaagaagaacaaaagtttgaagtcgagaagtacatcgttcacaaggagttcgatgacgatacttacgataacgacattgccctgctgcaactgaagtccgatagctcgcgctgcgcgcaggaatcatccgtggtgagaacggtctgcctcccgccggccgacctccagttgcccgactggaccgaatgtgagctcagcggctacggaaaacatgaagcgctctcccccttctactccgagcgcctcaaggaagcccacgtccggctgtacccatcatccaggtgcacttcacagcacctgttgaaccggactgtcactgacaacatgctgtgtgctggagacacccggtcgggaggaccgcaggcgaatctgcatgacgcttgccaaggcgattccggcggtcctctcgtctgcctgaatgatggccggatgactctggtgggtatcatctcttggggcctggggtgcggacaaaaagatgtgccgggagtgtacacgaaagtcactaattacctggactggatccgcgacaatatgcgcccc

SEQ ID NO: 17308 - DNA, 1686 bp, Artificial Sequence
  derived and/or modified sequence
atggatgctatgaaaagggggttgtgttgtgtcctcctgctgtgtggagcagtgtttgtgagcccatcacaggagattcatgctcggtttcgccgaggtgcccggtcttaccaggtgatttgcagagatgaaaagacccaaatgatttaccagcagcatcaatcctggcttcgtccggtgctccgcagcaatcgggtcgaatactgttggtgcaattccggtcgcgcgcagtgccacagcgtccctgttaagtcgtgttccgagccgcggtgcttcaatggaggcacctgtcagcaggcactttacttttcagacttcgtgtgccaatgtcccgaagggtttgccggcaagtgctgtgaaattgacactagggccacctgctacgaagatcagggtatctcgtatagggggacttggtcgaccgctgagagcggagccgaatgtacgaattggaacagcagcgcacttgcacaaaagccctactcgggtaggcggcctgatgccatccgacttgggctcggcaaccataactactgcaggaatcctgaccgggatagcaagccctggtgctacgtctttaaggcgggtaaatactcgtcggaattttgctcgactcctgcctgttccgaaggaaactcggattgttactttgggaacggttcagcatatcgcggtacccattccttgactgagtcaggagcatcgtgtctgccttggaactctatgatactgattgggaaggtgtacactgcacaaaatccaagcgcgcaagcactcggactggggaaacataactactgtcgcaacccagatggtgacgcgaaaccttggtgtcatgtgcttaagaaccgacgcctgacttgggaatactgtgacgttccatcctgtagcacttgcggacttcggcaatactcccagcctcaattccggattaagggcgggctgttcgcggatattgcgtcgcatccttggcaagccgcaatctttgcaaaacaccggcgttcccctggcgagcgatttctctgcggaggtattctgatttcatcctgctggatcctgtccgcagcacattgtttccaagaaaggtttcctccccatcatctgaccgtcatcctgggccgcacgtatcgcgtggttccaggggaggaagaacaaaagttcgaagtggagaaatacatcgtccacaaggaatttgatgatgatacctacgataacgacattgctctgctgcaacttaagtcggactcttcaagatgcgcacaagagagctcggttgtgaggactgtgtgtctcccacccgccgatctgcagctgcctgactggaccgaatgtgaacttagcggctacggcaagcatgaagccctttcccctttctactcggaaagacttaaggaagcgcacgtgaggctctacccttcttcccgctgtacttcccaacacctcctcaaccggacggtgaccgacaatatgctttgtgcaggagatacccgctccggtggacctcaggcgaatcttcatgatgcatgtcaaggtgactccggaggtccactggtctgtcttaatgacggtcgtatgactctggtcggaatcatctcatggggacttggatgtggacagaaggatgtgccaggagtctacaccaaagtgaccaactacctggattggatccgcgacaacatgcgccca

SEQ ID NO: 17309 - DNA, 1686 bp, Artificial Sequence
  derived and/or modified sequence
atggatgccatgaaaaggggactgtgctgcgttctgctcctatgtggagctgttttcgtgagtcccagccaggagatacacgcccgctttcgaagaggggcaaggtcttaccaggtgatctgcagagacgagaagacacaaatgatctatcagcagcaccagtcctggctgcggcccgttctacggagtaatcgtgtggaatattgctggtgcaattccgggagagcccaatgtcacagtgtccctgtgaagtcctgtagcgaaccacggtgtttcaatgggggcacctgtcagcaggccctctatttcagcgatttcgtctgtcagtgtcctgagggctttgccggcaagtgctgtgaaattgacacacgagctacttgttatgaagaccagggaatcagctaccgcggcacttggagtactgcagagtcaggagctgaatgcaccaattggaattccagcgctctagcccagaagccatactccgggcgccgtcctgacgctattaggctgggattggggaaccataactactgcagaaacccagatagagattctaaaccctggtgctacgtgttcaaggccgggaagtactcatccgagttctgcagtacaccagcttgcagcgaagggaactctgactgctactttgggaatggcagtgcatatcggggcactcactctttgactgagagtggcgcctcttgcttgccctggaactctatgatattaatagggaaagtctacaccgctcaaaacccttccgcccaggcactggggctgggcaaacataattactgccggaaccccgacggagacgcaaagccctggtgtcacgtcctgaagaaccgacggctcacatgggagtactgcgatgtgccctcttgtagtacctgcggtttacggcagtatagtcagccccagttcaggatcaaaggaggcttgttcgccgacatcgctagccacccttggcaggccgctatctttgcaaagcaccgacggagccccggggaacggttcttgtgtggcggcatactgattagttcctgctggatactgtcagcagcccactgtttccaggaacgattcccaccccatcacttaacagtcattctggggaggacttatagagtcgtcccaggagaagaggaacagaagttcgaggtcgaaaaatacatagtgcacaaggagttcgacgacgacacctatgataacgacatcgcattgctgcagctgaaatctgattcctccaggtgcgcccaagagtctagtgtcgtaagaacagtttgtctaccacccgccgacctccaactacccgattggactgaatgtgaattgagcggctatgggaaacacgaggccctgagccccttctactctgagcgtctgaaagaagctcacgttcggctgtacccctcatctaggtgcacttctcagcacctgctaaatcggactgtgactgacaacatgctgtgtgcaggggataccagaagtggcggcccgcaggccaacctgcacgacgcttgccagggcgattctggcggtcctctggtgtgcctgaatgacggtaggatgacacttgttggcataataagctggggcctgggctgcggacagaaagacgtcccaggagtgtatactaaagtgaccaattacctggactggataagggataacatgcgccct

SEQ ID NO: 17310 - DNA, 1686 bp, Artificial Sequence
  derived and/or modified sequence
atggatgcaatgaaacgaggtctttgttgcgtgcttctcctgtgcggagccgtattcgtctcccccagccaggagatccacgcgcgtttcagaagaggagcccgatcctaccaggtgatttgccgagacgagaaaacgcaaatgatttatcaacagcaccagtcttggctcaggcccgtgctacgctccaacagagtggaatattgctggtgcaactccggcagggcccagtgccacagtgtgcctgtgaaaagctgcagcgagcccagatgcttcaatggcggcacttgtcaacaggcattgtacttttccgacttcgtgtgtcagtgccccgagggctttgctggaaagtgctgcgagatcgataccagggccacatgctatgaagaccagggaatttcttataggggcacatggtcaacagcagaatcaggcgctgagtgtactaactggaattcatcagcacttgctcaaaagccctactccgggcgtagaccagatgcaataaggctcggtctcggcaatcacaattactgtcgaaacccagacagagattccaagccatggtgctacgtgttcaaggccggaaaatactcttccgagttttgtagtacccctgcatgcagtgagggtaatagcgactgctacttcggcaacggctccgcataccgtggcacacactcactcactgagtccggcgcctcatgcctaccatggaatagcatgattctgatcggtaaagtgtatactgcacagaaccccagcgcacaggccttggggctgggaaagcataactactgcaggaaccctgacggcgatgcaaagccctggtgccatgttctgaagaaccggaggttgacttgggagtactgcgatgtgcccagctgctcaacttgtgggctaagacagtacagccagccacagttccgtatcaagggagggctattcgctgatatcgcatcccacccttggcaggcagcgatctttgccaagcaccgcagatctccgggagagcgctttctgtgtggtggcatcctgatttcctcctgttggatattatctgcggctcactgttttcaggagagatttcccccacaccacctcacagtcatcttgggccggacgtaccgagtcgtccccggtgaagaggaacaaaagttcgaggtcgaaaagtacatcgtacataaggagtttgacgatgatacctatgataacgatatcgcactacttcaactcaaatctgattctagccggtgtgcacaggaaagctcagttgtcagaacagtttgcctccccccagcagatctccaactgcctgattggaccgaatgtgagttaagcggatacggcaagcacgaagctctctcccccttctacagcgaacgcttaaaagaggcccatgtgaggctctatccttcctctcggtgtacttcccagcacctgctgaatagaacagtgaccgacaatatgctttgcgcaggggatacccggtcgggaggtcctcaggctaacttgcacgatgcatgtcagggcgactccggaggaccgctcgtttgcctgaatgacggtaggatgacactggttggtatcatttcttggggtctcggctgcggccaaaaggatgtgcctggtgtttacacaaaagtgaccaactacctggactggatccgggataacatgcggccc

SEQ ID NO: 17311 - DNA, 1686 bp, Artificial Sequence
  derived and/or modified sequence
atggatgccatgaagagggggctgtgctgcgtgctcttgttgtgtggagccgtttttgtctccccgtcccaagagattcacgctcggttccgtcgcggcgctcgctcctaccaagtgatttgcagggacgagaaaactcagatgatctatcagcaacatcaatcttggttacggcctgttcttcgatcgaatcgtgtcgaatattgttggtgtaactcgggccgtgcacaatgccactctgtcccagttaagtcgtgctccgagccccgctgcttcaacggggggacctgccagcaagctctttacttttcggactttgtctgccagtgtccggagggtttcgcgggcaagtgctgcgagattgataccagggcaacctgctatgaagatcagggtatcagttataggggcacgtggagtactgcagaatcgggagctgaatgtacaaattggaactcatccgccttggcgcaaaagccttattcgggaagacggcccgacgctataaggctgggtcttggcaaccataactactgtaggaaccctgatagggatagcaaaccctggtgttatgtattcaaggcaggcaagtacagttctgagttctgtagcactccggcgtgcagcgagggcaacagtgactgctacttcggaaacggttcagcgtatcgcggtactcattcgttaacagagtcaggtgcttcgtgcttgccctggaattccatgatattaatcggcaaagtctacactgctcagaatccttccgctcaagcgttgggtttgggtaagcacaactactgtcgaaacccggacggcgatgcgaagccatggtgtcatgtactcaagaaccgcaggctcacctgggaatattgcgacgtgccatcatgcagcacatgcggcctccgtcagtattcacaaccgcagttccgcattaaaggagggctattcgctgatatcgcaagtcacccctggcaagcggccatcttcgcaaagcatcgtcgtagtcctggagagaggtttctgtgtggcggaatcttaatctcctcatgttggatcctgagtgctgctcactgttttcaagagaggtttcctcctcatcacttgaccgtcatcttgggccgcacatacagagtagttcctggagaggaagaacaaaagttcgaggtggaaaagtatattgtgcataaggagttcgatgacgatacttatgataacgatatcgcgttgttacagctgaaaagcgactcgtctaggtgtgcccaagaatccagcgttgttcgtacagtttgtctcccccctgctgatttacagctgccagactggacagagtgtgaactgagtgggtatggaaagcacgaggcgttgagcccgttctatagcgagcgtctaaaggaagcacacgttcggctctacccaagcagtcggtgtaccagtcagcaccttctcaaccgtactgtcactgacaacatgttgtgtgccggggacacccgaagtggcggtccacaagcgaacctccatgatgcctgccagggcgacagcggcggtcctttagtctgtttgaatgatggccgcatgactctggtaggaattattagctgggggttaggttgcggtcaaaaggatgtgccaggggtctataccaaggttacgaactaccttgactggattcgcgataacatgcgtccg

SEQ ID NO: 17312 - DNA, 1686 bp, Artificial Sequence
  derived and/or modified sequence
atggatgccatgaagcgggggctgtgctgtgtgctcctgctgtgcggggcagtgttcgtgtctccaagccaggagatccatgcacggtttcggagaggtgctagatcatatcaggtgatctgtcgggatgaaaaaacccaaatgatctaccaacagcaccagtcctggctgagaccagtcttgaggtccaatcgcgtggaatattgttggtgcaattctggccgcgcccagtgccattctgtgccagtcaagtcatgttccgagcctcgatgctttaatggtgggacgtgtcagcaggctctgtacttttctgacttcgtttgtcagtgccctgaggggtttgccgggaaatgctgcgaaatagataccagagccacgtgctatgaagatcagggcatttcctaccggggcacatggagcaccgccgaatccggggctgaatgtacaaactggaattcctctgccctggcacagaagccctattcaggacgcaggcctgatgcaatcagactcggactgggaaaccacaattattgcaggaatccagatagagactccaaaccttggtgctacgtcttcaaggctgggaaatacagctcagaattttgtagcaccccagcttgcagtgaagggaacagcgactgttatttcggcaatggtagcgcctatcgagggacgcacagcctgacggaatccggtgcctcctgtctgccctggaacagcatgatcctcattggcaaagtctacactgcccagaacccgagcgcccaagccttgggcttgggcaagcacaactattgtcgcaacccagacggcgatgccaaaccctggtgccacgtgttgaagaacagaaggctgacctgggaatactgcgatgtgccctcctgcagcacatgcggccttaggcagtatagccagccacaatttcgaatcaaggggggactcttcgccgacatcgccagccatccctggcaagccgccattttcgcgaaacaccgacgctctccaggagagagattcctttgtgggggaattctgatcagcagctgttggatcctgagtgcggcccactgtttccaggaaagattccctccacatcatctgacagttattttgggaagaacatacagagtggtgccgggcgaagaggagcagaagtttgaggtagaaaagtacattgtgcacaaagaattcgatgatgatacctacgacaacgacatagccctcttgcaattgaaaagtgatagctctaggtgtgcccaggagtctagcgtggttaggaccgtgtgccttcctcccgccgatttgcagctcccagactggaccgagtgtgagctttccggctatgggaagcatgaggccctgtcccctttttattccgaaaggcttaaggaagcccatgtgagactctacccctccagcaggtgtacaagtcagcacctgttgaaccggacggttacagataatatgctttgcgcgggtgacacccgctctggtgggccacaagcaaaccttcatgacgcgtgccagggcgatagcggtggtcctctggtctgtctcaacgacggcaggatgactctggtgggaatcataagttggggactggggtgcggccagaaggacgttcccggggtctacacaaaggttaccaattacctggactggattcgcgataacatgaggcct

SEQ ID NO: 17313 - DNA, 1686 bp, Artificial Sequence
  derived and/or modified sequence
atggatgcgatgaaaagaggtctttgctgtgtgcttctgctgtgtggtgctgtgttcgtctccccctctcaagaaatccacgcacggttccggcggggagcacgctcctaccaggtcatctgcagagacgaaaagacccagatgatctaccagcagcaccagtcgtggctgcggccggtgttgagatcgaaccgagtggaatactgctggtgcaattcaggacgggcacagtgccactccgtacccgttaagtcatgttctgaaccaaggtgctttaacggtggaacttgtcaacaagcactctatttctccgatttcgtctgccaatgcccagaaggattcgccggaaaatgttgtgaaatcgatactcgcgcgacctgctacgaagatcagggcatcagctaccggggaacctggtccactgcggaatcgggagccgagtgtacgaattggaactcgtcggctctcgcgcagaagccgtacagcggccgtagacccgacgcgatccgccttgggctgggcaatcataactactgcagaaatcccgatcgcgacagcaagccctggtgctacgtgttcaaggccggtaaatacagcagcgagttctgctccacccccgcctgcagcgaaggcaacagtgactgctactttggcaacgggtccgcttacaggggcactcattccctcaccgaaagcggagcatcgtgcctgccgtggaactcgatgatcctcattggaaaggtctacacggcacagaatccgagcgctcaagcgctcgggttggggaagcacaactactgccgcaatcccgatggagatgcaaaaccgtggtgccatgtcctgaagaaccggaggctgacttgggaatactgcgacgtcccgtcgtgctcgacttgcggattgagacaatactcgcaaccgcagttcaggatcaagggaggactctttgcagacattgcgtcacatccgtggcaggcggcaatcttcgccaagcaccgccgctcgccaggggagagatttttgtgcggcggtatcctcatctcaagctgttggatcctctcggccgcacactgtttccaggagcgctttccgcctcatcatctgacggtcatcctgggccggacctaccgcgtggtgccgggagaggaagagcagaagtttgaagtggaaaagtacattgtgcacaaggaattcgatgacgatacttacgacaacgatattgccctcctccagttgaaaagcgactcctcgcgatgcgctcaagaatcatctgtcgtgcgcactgtgtgcctcccgccagcagacttgcagctccccgattggaccgagtgcgagctgtctgggtacggaaaacacgaagcactgtcccccttctattccgaaagacttaaggaagctcacgtccgcctgtacccatcctcgcggtgcacctcgcagcacctgttgaatcgcactgtgactgacaacatgctgtgtgcaggggacactcggtcgggagggcctcaggcaaacctgcacgatgcctgtcaaggagatagcggtggcccgctggtgtgccttaacgacggacgcatgaccctcgtgggaattatcagctggggcctgggatgcggacagaaggacgtgccgggagtgtacactaaggtcaccaactacctggattggatccgggacaatatgcggccg

SEQ ID NO: 17314 - DNA, 1686 bp, Artificial Sequence
  derived and/or modified sequence
atggatgctatgaagcgcggactctgctgtgtgctgctgctgtgcggcgcggtgttcgtgtcaccgtcccaggaaatacacgcccgcttccgccgaggagctcggtcttaccaagtcatatgccgggatgaaaaaacgcagatgatctaccaacagcaccagtcatggctgcgcccggtgttgcgcagcaatagagtcgagtactgttggtgcaattccggccgcgctcagtgccactccgtgccagtcaagtcctgttcggaaccgcgctgcttcaatggaggaacttgccagcaggccctctactttagcgattttgtgtgccagtgcccggaagggttcgctggaaaatgttgcgaaatcgatacccgtgccacctgctacgaggaccaaggaatctcataccgcggaacctggagcaccgcagagtcaggcgcggagtgcactaactggaactcctcggccctggcacagaagccatactccggtaggcggccagatgcaatcaggctcggcctgggaaatcacaactattgtcgcaaccctgaccgcgactcgaaaccatggtgctacgttttcaaggcaggaaagtactcgtccgagttctgctccaccccagcttgctcagaaggcaatagcgattgttacttcggtaacggatcggcataccggggaacccattcgttgacggaatccggagccagctgtctcccctggaactcgatgatcctgatcggtaaagtctataccgcacaaaatccatccgcgcaggccctcggactcggcaaacataactactgccgcaatccggacggcgatgctaagccttggtgccacgtgctgaagaaccgccgcttgacgtgggagtactgcgatgtcccatcctgttcgacttgcggcctgcgccagtatagtcaacctcaattcaggatcaagggtggactgtttgcggacatcgcctcgcacccatggcaggcggccatcttcgcaaagcacaggcggtccccgggcgagcgatttttgtgcggaggaattttgatctcatcttgttggatcctgagcgccgctcactgttttcaagagcgcttccccccacatcacctgactgtgatcctcggtagaacctaccgcgtggtgccaggagaagaggaacaaaagttcgaagtggagaaatacatcgtccacaaagaattcgacgacgatacttacgataacgacatcgcgctgctccagctgaagtcagattcttcgagatgtgcacaggaatcctccgttgtccggactgtctgcctgcccccggcggacctccaacttcccgactggactgaatgcgagctgtcaggctacgggaagcatgaggcgctctccccattctactccgaacggctcaaggaggctcacgtgcggctctacccaagctccagatgcactagccagcacttgctcaatcgcactgtgaccgataacatgctgtgcgccggagatactcggtcgggaggtccgcaagcaaacctgcacgacgcctgccagggcgactccggcggacccctggtgtgcctcaacgacggacgcatgaccctcgtggggattatcagctggggcttgggttgcggtcagaaggacgtgccaggggtctacaccaaagtgaccaactacctcgactggatccgggataacatgcggccc

SEQ ID NO: 17315 - DNA, 1686 bp, Artificial Sequence
  derived and/or modified sequence
atggacgcaatgaagcgcggcctctgttgtgtgcttttgctttgcggcgccgtgttcgtctcaccgtcgcaagagattcacgcacgctttcgccgcggggcacgcagctaccaagtgatctgccgggacgaaaagactcagatgatctaccagcagcatcagtcgtggctgcggccggtgctgcgctctaaccgcgtggagtactgctggtgtaatagcggcagagcccaatgccatagcgttcctgtcaaatcatgctcggaaccccggtgctttaacggcgggacttgtcaacaggccctctacttctccgacttcgtgtgccaatgcccagaaggcttcgccggaaagtgttgcgaaatcgacacccgcgccacttgctacgaagatcagggcatctcctaccgcgggacttggtcgactgcggagtccggagctgagtgcaccaattggaactcaagcgcattggcacaaaagccctactcgggacgccggccagatgcgatccgcctcggactgggaaatcacaactactgcaggaacccggacagagactcaaaaccctggtgctacgtgttcaaggcaggtaaatacagctcggaattctgctcaaccccggcatgttcagaaggcaacagtgactgctacttcgggaatggatccgcataccgcggaacccactcgctcactgagtccggcgcttcctgcctgccatggaattcgatgatcctgatcggaaaggtgtacaccgcgcagaacccgtcagcgcaggccctgggactgggaaagcacaattactgtcggaatcccgacggcgatgcaaagccgtggtgtcacgtcctgaagaaccggcgactgacctgggaatactgtgatgtcccttcatgctcaacctgcgggcttcgccagtactcccagccgcagtttcggatcaaggggggactctttgccgatatagcatcccacccgtggcaggccgcaatcttcgccaagcacagacgctccccaggagaacggttcctctgcggaggtatcttgatcagctcgtgctggatactgagcgcggcgcactgttttcaggagcgattcccgccccatcacctgactgtgatcctgggccgcacctacagggtcgtcccgggcgaagaagagcaaaagttcgaggtcgagaagtacatcgtgcataaggagttcgatgacgatacctacgacaatgacatcgcattgttgcaactgaagtcagactcctcccggtgtgcccaggaatcgtcggtggtgagaaccgtgtgcctcccgccagccgacctgcagctgcctgattggaccgaatgcgaactcagcggctacggaaagcacgaggcgctgtcaccgttttactcggaacgcctgaaagaggcgcacgtgcgactttacccgtcgagccggtgcacctcccaacatctgctgaaccggaccgtgacggacaacatgctgtgtgctggagatactaggtctggggggccccaagccaacctccacgacgcgtgccagggagactccggaggaccactggtgtgcctcaacgatggacgcatgactctcgtgggaattatctcgtggggcctggggtgcggccaaaaggacgtgccgggggtgtacaccaaagtgacgaattacctggactggatccgcgataacatgcggcca

SEQ ID NO: 17316 - DNA, 1686 bp, Artificial Sequence
  derived and/or modified sequence
atggacgccatgaagcgaggcctttgttgtgtgctgctactgtgtggagcggtcttcgtatcacctagccaggagatccacgcccgatttcgccgaggtgctaggtcataccaggtgatctgcagagatgagaagacccaaatgatctatcaacagcaccagtcatggttacgcccagtccttagatccaaccgcgtagagtattgttggtgtaattcggggagggcgcagtgtcattcagtgcctgtgaaatcttgctctgagccgcgatgcttcaacggcggcacctgccagcaagctctgtacttctcggacttcgtctgtcagtgcccagaggggttcgctggaaagtgttgtgagatagacactcgagcaacttgctatgaggaccaggggatctcatatcgcggcacatggagtacagccgagtcaggggccgagtgtacaaactggaactcatctgctcttgctcaaaaaccttactcaggccgccgccccgatgccatccggctgggactgggcaaccataactactgtcgaaaccccgatagagatagtaagccctggtgctatgtgtttaaggccgggaagtattcttcggagttctgttctactccggcttgttccgaggggaacagcgactgctatttcggcaatgggagcgcttaccggggaacacatagcctcaccgagagcggagcctcatgcctaccatggaatagcatgatcctcattgggaaggtttacacagctcaaaatccttctgctcaggcgctcgggctcgggaaacacaattattgtagaaatccggacggcgacgcaaagccatggtgccacgtgctgaagaaccggagactgacctgggagtactgcgacgttcctagctgctccacgtgtggtctgcggcagtactcccagccacagttccggataaagggaggcctattcgccgatatagcctcccatccttggcaggctgccatcttcgctaagcaccggcgttcccctggtgaacgtttcttgtgtgggggaatactcataagttcctgctggattttgagcgccgcccactgttttcaggagcggttcccgcctcaccaccttacagtgatcttagggaggacctaccgagtcgtgcctggtgaggaggagcagaaatttgaggttgaaaaatatatcgtgcacaaagaatttgatgatgacacatacgacaatgacattgctctgttgcagctgaagagcgactccagtagatgcgcccaagagtccagcgttgtccgcaccgtctgtctgccacccgcagatctgcagttgcccgattggaccgaatgcgaactgtcgggctatggcaaacatgaggcactctctcccttctactccgaacgcttaaaggaggcgcacgtgcgcctataccccagcagcagatgcacctcccagcacttgcttaacaggacagtgaccgacaacatgctgtgtgctggcgatacaagatccgggggtccccaggccaaccttcacgacgcatgccagggtgattcaggtggaccactggtgtgtctgaatgacggacgaatgaccctggtgggcataatttcctggggactgggctgcggtcagaaagatgttcctggggtgtatactaaggtgaccaattacttggattggattcgcgacaacatgcggcca

SEQ ID NO: 17317 - DNA, 1686 bp, Artificial Sequence
  derived and/or modified sequence
atggacgcaatgaaacggggactttgttgtgtgctgctgctttgtggagccgtgttcgtctccccgagccaggagattcatgctagattcagaagaggtgcaagatcgtaccaggtgatttgtagagacgaaaagacccaaatgatttaccaacagcaccagtcctggctgaggcctgtgctcagatccaatcgcgtggaatactgttggtgtaactccggtcgcgcacaatgtcattccgtgcccgtcaagagctgtagcgaacctcggtgttttaacggtggaacttgtcagcaagcactttactttagcgatttcgtgtgccagtgtcctgaagggtttgccggtaagtgttgcgaaatagacactcgagcaacctgctacgaggatcagggaatctcataccgcggtacgtggagcactgcagaaagtggagcagaatgtactaactggaattcctccgcgcttgctcagaagccctactctggaaggaggccagatgcaatccgtcttgggctgggaaaccataactactgtcggaatccagatcgagactccaagccttggtgttatgtattcaaagctggtaaatactcctcggagttttgttcaactcctgcatgtagcgaaggtaattcagattgctactttggtaatgggtcagcatatagaggaacccattcccttaccgaatccggcgccagctgtctcccctggaacagcatgatccttattggtaaagtctacaccgcgcagaacccatcagcacaggccctgggactgggtaagcataactactgccggaatcctgacggggatgcaaagccatggtgtcatgtgctgaagaaccggcggctgacctgggaatactgtgacgtgccatcgtgttcgacttgtggattgaggcagtactcccaaccccaatttcgaataaagggtggcctttttgcagatattgcctcacacccctggcaagccgccatttttgccaagcataggagatccccgggagaaaggtttctgtgcggaggtattctgattagctcgtgttggattctgagcgcagcccattgctttcaggagcgcttcccaccgcaccatctcacggtgattcttgggagaacttatcgcgtggtccctggagaagaggaacaaaagttcgaagtggaaaagtacatagtccataaagaattcgacgacgatacttacgataatgacatcgcccttctgcagctgaagtcagactcctcgcgatgcgcgcaggaatcgagcgtcgtgagaaccgtgtgcctgcctccagcagatctgcaactgcctgattggactgagtgcgaattgtccgggtacgggaaacacgaggctcttagccctttttactcagaacggctcaaggaagcacatgtgcgactttaccccagctcaaggtgtacttcgcagcaccttctcaacagaaccgtgactgacaacatgctttgtgctggagataccagaagcggcggcccccaagcgaaccttcatgatgcatgccaaggggattccggaggacctcttgtgtgtctcaatgatgggcgaatgaccctggtagggataatctcatgggggctggggtgtggtcaaaaagatgtgcccggcgtctacactaaagttactaactacttggactggattagggataacatgcgccca

SEQ ID NO: 17318 - DNA, 1686 bp, Artificial Sequence
  derived and/or modified sequence
atggacgcgatgaagcgggggctgtgttgcgtgctgctcctgtgtggtgcggtgttcgtgtctccttcccaggagatacacgcaagattccgcaggggcgcccggagctatcaggtgatctgtcgcgatgaaaagacccagatgatctaccaacagcaccagagctggctgaggccagtcctgcgtagtaaccgcgtggaatactgttggtgcaattcgggacgggctcaatgtcattccgttccagtgaagagctgctccgaaccacgctgcttcaacggcggcacgtgccaacaggccctgtacttttcggattttgtctgccagtgcccagaggggttcgctggcaaatgctgcgagatcgatactcgggccacgtgctacgaagatcaggggatcagctacagaggcacttggtctactgcagagtctggagccgaatgcaccaactggaattcttcagccttggcccaaaagccgtactccggacggcggccggatgctatccggctgggtctgggtaatcacaactactgccggaatccggaccgcgacagtaaaccgtggtgctacgtctttaaagccggaaagtacagctccgaattctgcagcacccccgcatgctcggaaggaaattccgactgttatttcggaaacgggagcgcctacaggggaacgcactcgctcaccgaatcaggagcgagctgcctgccgtggaacagtatgatcctgatcggcaaagtatacactgcccagaatccaagcgcgcaagccctcggactgggcaagcacaactactgtagaaacccggatggtgatgcgaagccgtggtgccacgtgctcaaaaacagacgcttgacctgggaatactgcgacgtaccgtcctgttccacctgtggactgcggcaatactcgcaaccgcagttcagaatcaagggagggctgttcgccgatatcgctagccatccttggcaggcagccatcttcgcaaagcaccgccgctctcctggagaaagattcttgtgcggtggcatcctcattagttcatgctggatcctttcggcggcgcattgctttcaggagcggttcccacctcaccacctgaccgtgattctcggccgaacttaccgtgtcgtcccgggagaggaagagcagaaatttgaagtggaaaagtatatcgtccacaaggagttcgacgacgatacttacgataacgacattgctctcctgcaactgaagtccgactcctcgagatgcgctcaggagtcaagcgttgtgcgaactgtctgtttgccccctgccgacctccaacttcccgactggactgagtgcgagctgtcaggctacggaaagcatgaagcgttgtcgcctttctactcggagcggcttaaggaagcccatgtgaggctgtacccgtcctcacggtgtacctcgcagcatcttctgaatagaactgtgaccgacaatatgctgtgcgccggcgatactcgctcgggtggaccgcaggctaacctccatgacgcatgccagggagactccggcgggccactcgtgtgcttgaacgacggacgcatgaccctcgtgggcatcatttcttggggactgggatgcggacagaaagatgtgccgggagtctacacgaaggtgaccaactaccttgactggatcagggacaacatgcgccca

SEQ ID NO: 17319 - DNA, 1686 bp, Artificial Sequence
  derived and/or modified sequence
atggatgccatgaagagagggctctgttgtgtgcttcttctttgtggagcagtgtttgtgagcccaagccaagagattcatgcaaggtttagaaggggagcgaggtcataccaagtcatttgcagagacgaaaaaacccagatgatataccaacagcatcaatcctggctcagacccgtgcttagaagcaaccgcgtggaatactgttggtgtaattcggggcgggcacaatgtcattccgtccccgtgaagtcatgtagcgaacctcggtgtttcaatggcggcacctgccagcaagccctgtacttttcggatttcgtgtgtcaatgtcccgagggctttgcaggaaaatgttgcgaaattgatactcgcgcaacttgttacgaagatcaggggatatcttacagaggaacttggtcaactgctgagagcggtgcagaatgcactaattggaactccagcgcacttgcacaaaagccatactccggacgtagaccagatgcaatcaggcttggacttggtaaccacaattactgcagaaacccagacagagattcaaaaccttggtgttacgtgtttaaggcaggaaagtatagctcagagttttgctccacccctgcctgctccgaaggcaacagcgattgctactttggtaatgggagcgcgtacagaggtactcacagcctgactgaatccggagccagctgtctgccttggaactcgatgattctgatcggtaaggtgtacaccgcgcagaatccttcggcgcaggcgcttgggctcggtaagcacaactactgtagaaatcctgatggtgacgccaaaccttggtgccatgtgttgaagaaccgccggctgacttgggaatactgtgacgtccctagctgctccacttgtggcctgagacaatattctcagccacagtttcgaatcaagggtggactgtttgcggatattgcaagccatccctggcaagcggctattttcgcgaagcatcgacgttcacctggggaaagattcctgtgtggtggtattcttatatcgtcatgttggatactttccgccgcacactgcttccaagagcgttttccaccacatcacctgaccgtcattctgggacggacttaccgagtcgtgcccggagaggaagaacagaagtttgaggtggaaaagtacatcgtccacaaggaatttgatgatgacacttacgataatgacattgcgcttctgcagctcaaatccgattcatcaagatgcgctcaggagagctcggtggtcaggactgtctgcctccctcccgcagaccttcagctccctgactggacggaatgtgaattgagcggctacggcaagcacgaggcattgtcccctttttactccgagagacttaaagaagcgcatgtgaggctgtacccttcgtcgcgttgtacttcccaacatctgctgaatcgaaccgtgacggacaacatgctttgtgcaggtgatactcgctccggggggccgcaggcaaacctccacgacgcctgtcaaggagatagcgggggacctctggtgtgtctgaatgatggtcggatgactctcgtgggtatcatttcttggggccttggttgtggacagaaagatgtgcctggagtctacactaaggtgactaactacctggactggattagggacaacatgcggccc

SEQ ID NO: 17320 - DNA, 1686 bp, Artificial Sequence
  derived and/or modified sequence
atggatgcaatgaaacgcggcctgtgttgcgtcttgctcctctgtggggccgtcttcgtgtcgccatcccaagagattcatgcacggttccgacgcggggcccggtcataccaagtcatttgtcgcgatgaaaagactcagatgatatatcagcagcatcaatcctggctgcggccagtgctgcggtcaaatagagttgaatactgctggtgcaactcaggccgcgctcagtgccacagcgtcccagtgaagagctgctcagaacctagatgctttaacggaggaacctgccagcaggcgctctacttctcggactttgtctgtcaatgtccagaaggatttgcaggaaagtgctgcgaaatcgacactcgagctacctgctacgaggaccagggaatcagctacagaggtacctggagcactgcggagtcaggtgcagaatgcactaattggaattcctccgcactggctcaaaaaccatactccggccggcgtcctgacgccattcgcctggggctcggcaaccataactactgtcggaatccggacagagatagcaagccgtggtgctacgtgttcaaagctggaaagtatagctccgagttctgctccaccccagcgtgctcggaagggaactcagactgctactttgggaatggctccgcctaccgaggaactcattccctcaccgaatcaggcgcatcatgcttgccttggaactctatgatcctgatcggcaaagtgtacactgcccaaaacccgtccgcgcaggcacttggactcggtaagcataattactgcaggaacccggacggtgacgccaaaccatggtgtcacgtgctcaagaacaggaggctcacttgggagtactgcgacgtgcccagctgctccacgtgtggtctgcgacagtacagccagcctcagttcagaatcaagggcggcctctttgcggatatcgcgagccacccctggcaagccgcaatcttcgcgaagcatcgccgctccccgggggaacgattcctgtgtggagggatcctgatctcgagctgctggatcttgtccgcagcccactgcttccaggaacggttcccgccccatcacctgaccgttatcctgggtcgcacttaccgcgtggtgccgggtgaggaggaacagaagttcgaggtcgagaaatacattgtgcacaaggagttcgatgacgacacctacgacaatgacatcgccctgctgcagctgaagagcgacagctcacggtgcgcacaggagagctcagtggtgcgcactgtctgcttgcccccggccgacctgcaattgccggactggactgagtgcgaattgtcaggatacggaaagcacgaagctctctcaccattctactccgaacgtctcaaggaagcccacgttcgcctgtacccgagcagcaggtgcacttctcagcaccttttgaacaggaccgtgaccgataacatgctgtgtgcaggagatactcgctcaggcggtcctcaagctaacctgcacgatgcttgtcagggtgattcgggaggaccgcttgtctgtcttaacgatggaaggatgactctcgtgggcatcatctcatggggacttggatgcgggcaaaaagatgtcccgggagtgtatacgaaggtcactaactacctggactggatccgcgacaacatgcgacct

SEQ ID NO: 17321 - DNA, 1686 bp, Artificial Sequence
  derived and/or modified sequence
atggatgccatgaagagagggttatgctgcgtccttttactctgcggagcagtctttgtaagtccatctcaggaaattcacgcccggtttaggcggggagcaaggtcctatcaggttatatgcagagatgaaaaaactcagatgatataccagcaacatcagtcatggctaaggcccgtcctccgctctaatagggtagaatactgttggtgtaacagtggaagggcccagtgtcactctgtccctgttaaaagttgttcagaaccccgctgcttcaatggaggaacatgtcagcaggccctctattttagtgattttgtctgtcagtgtcccgaagggtttgcaggaaaatgctgtgagatagatactcgcgctacttgctacgaagatcaggggatatcttatagaggaacatggtccacagcagaatccggagccgaatgcactaattggaattcgtctgctcttgcccagaaaccttattccggacggaggcctgatgctattcgccttggactcgggaatcacaattattgcagaaacccagatagagattcaaagccctggtgctacgtttttaaagcagggaaatattcttccgaattctgttctacacccgcatgctccgaaggaaactccgattgctattttggaaacggatctgcgtatagaggaactcattccctaacagaaagtggggcttcgtgcctgccttggaattctatgatccttatcggaaaagtgtatacagcacagaatccatccgcacaggccctcgggctggggaaacacaattattgccggaatccggatggggatgcaaaaccttggtgccacgttttaaaaaatcgacgcttaacatgggagtattgtgatgtgccctcttgctcgacttgcgggctcaggcagtattcacagccacagttcagaataaaagggggactttttgccgacatagcttcgcacccctggcaggcagctatattcgcaaaacacaggcggtcaccaggagaacggttcctatgtggaggaatcctgatctcctcatgttggatcctttctgcagctcactgttttcaggaacgctttcctccccatcacctcacagtgatattaggacgcacatatagggtcgtgcctggagaggaggagcagaagtttgaagtcgaaaagtatattgtacacaaagaatttgatgatgatacatatgataacgatattgccctgcttcagctcaaatcagattcgtcccgatgtgcgcaggaatcttctgtggtccggactgtgtgcttaccccccgcagatcttcagctccccgattggactgaatgtgaactctcaggatacggaaagcatgaagcactgtctcctttctattctgaacgacttaaagaagcccatgtcagactctatccctccagtaggtgcacttcacagcacttgcttaataggactgttacagataacatgctctgtgctggggatactcgatccggagggccacaggccaacttacacgatgcatgccagggggattccggaggacccctcgtgtgcctaaatgatgggcgcatgacattagtgggaatcatatcgtggggactagggtgtgggcagaaggatgtacccggagtctatacaaaagtgacaaattatctcgattggatcagagataacatgaggccc

SEQ ID NO: 17322 - DNA, 1686 bp, Artificial Sequence
  derived and/or modified sequence
atggatgcaatgaaaagagggttgtgctgtgtgcttctgctctgcggggcagtgtttgtgtcaccaagccaggaaatacacgcccggttcagacgcggagcaaggtcgtatcaggtgatctgtcgggatgaaaagactcagatgatttaccaacaacatcaatcctggttgcgtcccgtgctccgctcgaaccgtgtggaatactgttggtgtaactcaggacgcgcacaatgtcattcggtgcctgtgaaatcatgttccgaaccgcgttgctttaatggcgggacttgccagcaggctctctacttttcggatttcgtgtgccaatgcccagagggattcgcaggcaagtgttgtgaaatagacaccagagcaacctgttatgaggaccaaggaatttcataccgtggtacctggagcaccgctgagtcgggggcagagtgtactaattggaactcgtcggcactggcgcaaaagccctacagcgggagacgcccggatgcgatacgacttggccttggcaaccacaattactgccgaaaccccgaccgggattccaagccatggtgttacgtctttaaagcaggtaaatacagctccgaattttgttccactccggcatgctccgaaggaaattcggattgctacttcgggaacgggtcagcctaccgcggcacccattccctgactgagtctggtgcttcttgtctgccgtggaattcgatgattcttataggtaaggtgtacaccgcccagaacccttcggcgcaggcactggggctcggaaaacataactactgtcgcaaccctgacggagatgcaaaaccatggtgccatgtgcttaagaatcgtcggcttacctgggaatactgtgacgtcccgtcctgttccacttgcggacttcgccaatacagccagccacaatttaggattaaaggaggactctttgccgatatagcaagccatccctggcaggcagctattttcgcaaagcatcgacggtcccctggagaacgatttctttgtgggggaattctcatctcgtcctgttggatcctgtcggctgcacattgctttcaggaaagatttcccccacaccacttgaccgtgatcttgggccgcacgtaccgggtagtccctggcgaggaagaacagaagttcgaggtggagaagtacatagttcacaaggaatttgacgatgacacctacgataacgacattgcacttctgcaactgaagagcgattcatcccgttgcgctcaagagagctcagttgttcggaccgtgtgtctccctccagcagatttgcaactcccagactggactgaatgtgaacttagcggttacggaaagcacgaagccttgtcgccattctattcggagcggcttaaggaggcacatgtcagattgtacccgagcagtcggtgtaccagccagcacttgctgaacaggaccgtgaccgataacatgctgtgcgcaggtgatactcgatcgggtggacctcaagcgaatcttcatgacgcctgtcaaggtgattctggtggtcccctggtctgtctgaatgacgggcgtatgactctggtgggcatcatttcgtggggacttggttgtggccaaaaagatgtcccgggtgtgtacaccaaggtcactaactacctggattggattagggacaacatgcgccct

SEQ ID NO: 17323 - DNA, 1686 bp, Artificial Sequence
  derived and/or modified sequence
atggatgcgatgaaaagggggttatgctgtgtgctgctcttgtgtggagcagtatttgttagcccatcgcaggagattcacgctcggttccggaggggcgcgagatcttatcaggtcatttgtcgagatgagaaaacacaaatgatctaccagcagcatcagagctggctgagacccgttctgcgctctaatagggtggagtactgctggtgtaattccggacgcgcccagtgtcacagcgtgcccgtgaaaagctgttcggagccaaggtgctttaatggagggacatgccagcaggcactgtacttctcagacttcgtgtgccaatgtcctgaggggttcgctggcaagtgctgcgaaatcgacacacgggctacatgttatgaggatcaggggatcagttatagagggacctggagtacggcggaatccggcgctgaatgtactaattggaactcaagtgccttggcacagaagccttactctggccggcgcccggatgcaataagactggggctaggaaatcataattactgtagaaatcccgacagagatagcaaaccctggtgttatgtgtttaaagccggtaagtactcatccgagttctgctccactcccgcatgtagcgaaggtaattccgactgctacttcggcaatggatccgcgtacagaggcactcactctctgactgagagtggcgcgagctgcctgccatggaacagtatgattttgattggaaaggtgtacacggcacagaatccaagtgcccaggcactgggactcggtaaacacaattactgtagaaatccggacggcgatgccaagccttggtgtcatgtattgaaaaatcggcgccttacctgggaatattgtgatgtccctagctgctcgacctgcggactcagacagtattctcagccccagttccgtattaagggagggctgttcgctgacatcgcttcccatccatggcaggctgcaattttcgctaagcataggcgttcccctggtgaacggttcctttgtggggggattttgatcagttcctgctggattctgagtgctgcccactgctttcaggaacgctttcctccacatcatctgacagtcattctgggaagaacgtaccgcgtagtgcctggcgaggaggagcagaaatttgaagtggaaaaatatatagtgcacaaggaattcgatgacgacacttatgacaacgacatcgcattgcttcaactaaagtccgactcatccaggtgtgctcaggagagtagcgtggtgcgcacagtgtgtcttccacctgccgacttacagctacccgactggacagaatgtgaattatctgggtacggaaaacatgaagctctgagtccattctattccgagcggctgaaggaagcccatgtcagactgtatcccagttcgagatgcactagtcagcatctcctaaaccgcaccgtgacagataacatgctgtgcgccggggatactcggtccggtggaccacaagcgaacctgcatgatgcttgccagggagacagtggcgggccactcgtctgtctgaatgatgggaggatgaccctggtgggtataatctcgtggggactcgggtgtggacagaaggacgtgcccggtgtctacaccaaggtgacgaattaccttgattggatcagggataacatgaggcct

SEQ ID NO: 17324 - DNA, 882 bp, Artificial Sequence
  derived and/or modified sequence
atggacgccatgaagagaggcctgtgctgcgtgctgctgctgtgcggcgccgtgttcgtgagccccagccaggagatccacgccagattcagaagaggcgccagaagctaccaggtgatctgcagagacgagaagacccagatgatctaccagcagcaccagagctggctgagacccgtgctgagaagcaacagagtggagtactgctggtgcaacagcggcagagcccagtgccacagcgtgcccgtgaagagctgcagcgagcccagatgcttcaacggcggcacctgccagcaggccctgtacttcagcgacttcgtgtgccagtgccccgagggcttcgccggcaagtgctgcgagatcgacaccagagccacctgctacgaggaccagggcatcagctacagaggcacctggagcaccgccgagagcggcgccgagtgcaccaactggaacagcagcgccctggcccagaagccctacagcggcagaagacccgacgccatcagactgggcctgggcaaccacaactactgcagaaaccccgacagagacagcaagccctggtgctacgtgttcaaggccggcaagtacagcagcgagttctgcagcacccccgcctgcagcgagggcaacagcgactgctacttcggcaacggcagcgcctacagaggcacccacagcctgaccgagagcggcgccagctgcctgccctggaacagcatgatcctgatcggcaaggtgtacaccgcccagaaccccagcgcccaggccctgggcctgggcaagcacaactactgcagatgcagaaccggcagaagcgtgagcagccccgccaccgccagcatgagaccctgcctgctgagcatcagaagcggctag

SEQ ID NO: 17325 - DNA, 1689 bp, Artificial Sequence
  derived and/or modified sequence
atggacgccatgaagagaggcctgtgctgcgtgctgctgctgtgcggcgccgtgttcgtgagccccagccaggagatccacgccagattcagaagaggcgccagaagctaccaggtgatctgcagagacgagaagacccagatgatctaccagcagcaccagagctggctgagacccgtgctgagaagcaacagagtggagtactgctggtgcaacagcggcagagcccagtgccacagcgtgcccgtgaagagctgcagcgagcccagatgcttcaacggcggcacctgccagcaggccctgtacttcagcgacttcgtgtgccagtgccccgagggcttcgccggcaagtgctgcgagatcgacaccagagccacctgctacgaggaccagggcatcagctacagaggcacctggagcaccgccgagagcggcgccgagtgcaccaactggaacagcagcgccctggcccagaagccctacagcggcagaagacccgacgccatcagactgggcctgggcaaccacaactactgcagaaaccccgacagagacagcaagccctggtgctacgtgttcaaggccggcaagtacagcagcgagttctgcagcacccccgcctgcagcgagggcaacagcgactgctacttcggcaacggcagcgcctacagaggcacccacagcctgaccgagagcggcgccagctgcctgccctggaacagcatgatcctgatcggcaaggtgtacaccgcccagaaccccagcgcccaggccctgggcctgggcaagcacaactactgcagaaaccccgacggcgacgccaagccctggtgccacgtgctgaagaacagaagactgacctgggagtactgcgacgtgcccagctgcagcacctgcggcctgagacagtacagccagccccagttcagaatcaagggcggcctgttcgccgacatcgccagccacccctggcaggccgccatcttcgccaagcacagaagaagccccggcgagagattcctgtgcggcggcatcctgatcagcagctgctggatcctgagcgccgcccactgcttccaggagagattccccccccaccacctgaccgtgatcctgggcagaacctacagagtggtgcccggcgaggaggagcagaagttcgaggtggagaagtacatcgtgcacaaggagttcgacgacgacacctacgacaacgacatcgccctgctgcagctgaagagcgacagcagcagatgcgcccaggagagcagcgtggtgagaaccgtgtgcctgccccccgccgacctgcagctgcccgactggaccgagtgcgagctgagcggctacggcaagcacgaggccctgagccccttctacagcgagagactgaaggaggcccacgtgagactgtaccccagcagcagatgcaccagccagcacctgctgaacagaaccgtgaccgacaacatgctgtgcgccggcgacaccagaagcggcggcccccaggccaacctgcacgacgcctgccagggcgacagcggcggccccctggtgtgcctgaacgacggcagaatgaccctggtgggcatcatcagctggggcctgggctgcggccagaaggacgtgcccggcgtgtacaccaaggtgaccaactacctggactggatcagagacaacatgagaccctag

SEQ ID NO: 17326 - DNA, 1500 bp, Artificial Sequence
  derived and/or modified sequence
atggacgccatgaagagaggcctgtgctgcgtgctgctgctgtgcggcgccgtgttcgtgagccccagccaggagatccacgccagattcagaagaggcgccagaagctaccaggtgatctgcagagacgagaagacccagatgatctaccagcagcaccagagctggctgagacccgtgctgagaagcaacagagtggagtactgctggtgcaacagcggcagagcccagtgccacagcgtgcccgtgaagagctgcagcgagcccagatgcttcaacggcggcacctgccagcaggccctgtacttcagcgacttcgtgtgccagtgccccgagggcttcgccggcaagtgctgcgagatcgacagcaagccctggtgctacgtgttcaaggccggcaagtacagcagcgagttctgcagcacccccgcctgcagcgagggcaacagcgactgctacttcggcaacggcagcgcctacagaggcacccacagcctgaccgagagcggcgccagctgcctgccctggaacagcatgatcctgatcggcaaggtgtacaccgcccagaaccccagcgcccaggccctgggcctgggcaagcacaactactgcagaaaccccgacggcgacgccaagccctggtgccacgtgctgaagaacagaagactgacctgggagtactgcgacgtgcccagctgcagcacctgcggcctgagacagtacagccagccccagttcagaatcaagggcggcctgttcgccgacatcgccagccacccctggcaggccgccatcttcgccaagcacagaagaagccccggcgagagattcctgtgcggcggcatcctgatcagcagctgctggatcctgagcgccgcccactgcttccaggagagattccccccccaccacctgaccgtgatcctgggcagaacctacagagtggtgcccggcgaggaggagcagaagttcgaggtggagaagtacatcgtgcacaaggagttcgacgacgacacctacgacaacgacatcgccctgctgcagctgaagagcgacagcagcagatgcgcccaggagagcagcgtggtgagaaccgtgtgcctgccccccgccgacctgcagctgcccgactggaccgagtgcgagctgagcggctacggcaagcacgaggccctgagccccttctacagcgagagactgaaggaggcccacgtgagactgtaccccagcagcagatgcaccagccagcacctgctgaacagaaccgtgaccgacaacatgctgtgcgccggcgacaccagaagcggcggcccccaggccaacctgcacgacgcctgccagggcgacagcggcggccccctggtgtgcctgaacgacggcagaatgaccctggtgggcatcatcagctggggcctgggctgcggccagaaggacgtgcccggcgtgtacaccaaggtgaccaactacctggactggatcagagacaacatgagaccctag

SEQ ID NO: 17327 - DNA, 537 bp, Artificial Sequence
  derived and/or modified sequence
atggacgccatgaagagaggcctgtgctgcgtgctgctgctgtgcggcgccgtgttcgtgagccccagccaggagatccacgccagattcagaagaggcgccagaagctaccaggtgatctgcagagacgagaagacccagatgatctaccagcagcaccagagctggctgagacccgtgctgagaagcaacagagtggagtactgctggtgcaacagcggcagagcccagtgccacagcgtgcccgtgaagagctgcagcgagcccagatgcttcaacggcggcacctgccagcaggccctgtacttcagcgacttcgtgtgccagtgccccgagggcttcgccggcaagtgctgcgagatcgacaccagagccacctgctacgaggaccagggcatcagctacagaggcacctggagcaccgccgagagcggcgccgagtgcaccaactggaacagcagcgccctggcccagaagccctacagcggcagaagacccgacgccatcagactgggcctgggcaaccacaactactag

SEQ ID NO: 17328 - DNA, 474 bp, Artificial Sequence
  derived and/or modified sequence
atggacgccatgaagagaggcctgtgctgcgtgctgctgctgtgcggcgccgtgttcgtgagccccagccaggagatccacgccagattcagaagaggcgccagaagctaccaggtgatctgcagagacgagaagacccagatgatctaccagcagcaccagagctggctgagacccgtgctgagaagcaacagagtggagtactgctggtgcaacagcggcagagcccagtgccacagcgtgcccgtgaagagctgcagcgagcccagatgcttcaacggcggcacctgccagcaggccctgtacttcagcgacttcgtgtgccagtgccccgagggcttcgccggcaagtgctgcgagatcgacaccagagccacctgctacgaggaccagggcatcagctacagaggcacctggagcaccgccgagagcggcgccgagtgcaccaactggaacagcagcgccctggcctag

SEQ ID NO: 17329 - DNA, 882 bp, Artificial Sequence
  derived and/or modified sequence
atggatgctatgaagaggggcttatgttgcgtactcctgctgtgtggggcggtttttgttagccctagccaggaaattcacgcccgctttcgccgcggggcccgatcttatcaggtaatctgccgggacgaaaagacccagatgatctaccagcagcatcaaagctggctgcggcctgtgctgaggtccaatagagtggagtattgctggtgcaactccgggagagcccaatgtcactctgttcccgtgaagagttgcagcgaacccaggtgtttcaatggcggcacatgccaacaggctctgtatttcagtgacttcgtgtgtcaatgccccgaaggattcgcgggtaaatgttgtgaaatcgataccagggctacgtgttacgaagatcagggaattagctatagaggcacttggagcactgccgagtcaggggctgagtgtacgaattggaattccagcgcgctcgctcaaaaaccttactcggggagaaggccagatgccattcgtttgggcttagggaatcacaattactgcaggaatcccgatagagatagtaagccttggtgctatgtgtttaaagcaggaaaatatagctccgagttttgctctactcccgcctgctccgaagggaacagcgattgttactttgggaatgggagcgcgtatcgcggcacccacagcctcacggaatctggagcctcatgtttgccttggaatagtatgatactgatcggtaaggtgtacaccgcacagaacccaagcgcccaagcactgggactcggaaagcataattattgtcgatgtagaaccggcagatccgtgagcagtcctgccaccgcgtctatgcgcccatgcctcctgtccatcagatctggctag

SEQ ID NO: 17330 - DNA, 1689 bp, Artificial Sequence
  derived and/or modified sequence
atggacgctatgaaaagaggactgtgttgtgtgctactcctctgcggtgccgtctttgtgtcccccagtcaggaaattcacgcccggtttcggcggggggctcgaagctaccaggtcatctgcagggacgaaaagacccagatgatctatcagcagcaccagtcttggctaagacctgtgcttcgtagtaaccgagtggaatattgctggtgcaacagcggcagggcccaatgtcactcagtgcctgtgaagtcctgttcagagccccggtgtttcaacggcggtacttgccaacaagccttgtacttctctgacttcgtatgtcaatgccccgagggcttcgctgggaaatgttgcgaaatcgacactcgagccacctgctacgaggatcaagggatcagctataggggcacctggagcactgccgaatccggcgcagaatgcaccaattggaatagttccgcactggcccagaaaccttattccgggaggaggccggatgcgatcagactgggccttggcaatcataactattgccgcaaccctgaccgcgactccaaaccatggtgctatgtctttaaggcaggcaaatactccagtgaattctgttccacacccgcttgctccgaagggaactctgattgctactttggcaacggctcggcctaccgcggtacacattcactcaccgagagcggcgctagttgtttgccatggaatagtatgattcttattggtaaagtctacacagcccagaaccccagtgctcaggccctgggtctggggaaacacaactactgccggaaccccgatggagacgcaaaaccatggtgccacgtgctcaaaaaccggaggcttacgtgggaatactgcgatgtgccgagctgcagcacatgtggcctgcgccaatattctcagccccagttccgcattaagggtggactgtttgcagatattgcctctcatccctggcaagcagcgatcttcgcaaaacaccggcgatcaccaggggagcgcttcctgtgcggtggcatcttgatatcatcctgttggatcctctccgcagctcattgttttcaggagcgatttccaccccatcatcttaccgtgatcctgggacgcacgtatcgcgtcgtgcccggtgaggaggagcaaaagtttgaagtggagaaatacatcgtgcacaaggagttcgacgatgacacctacgataacgacatagccttgctgcaactgaagtccgacagctcacgctgcgctcaggagtcttccgtcgtgagaaccgtctgcctcccgcccgcggacctgcaattaccagattggactgagtgcgaattgagcgggtatgggaagcacgaggcactctcacccttttactccgagaggctaaaagaagcacacgtccggctttacccctcaagcagatgtacatcccaacacctgttaaatcgcactgtgacagacaacatgctttgtgccggcgacaccaggagcggaggaccccaggccaacctgcacgacgcttgtcagggggacagcggggggcccctggtgtgtctaaatgacggccggatgactctggttggcattatctcctggggcctcggctgcggccagaaggacgtccccggggtatacacaaaagtcacaaactaccttgactggatccgtgacaacatgagaccatag

SEQ ID NO: 17331 - DNA, 1500 bp, Artificial Sequence
  derived and/or modified sequence
atggatgccatgaaaaggggactgtgttgcgttttattactgtgtggagccgtctttgtgtccccttctcaggagattcacgctcgcttccggcgcggcgcgcggtcatatcaggtgatctgtcgcgatgagaagactcagatgatttaccaacaacatcagtcatggctgaggcccgtgcttcgatcgaacagggtcgagtattgttggtgcaactctggcagggctcagtgccactccgtgcccgtgaagagttgctccgagcctaggtgctttaacggcggcacttgccagcaggccctctatttctctgattttgtctgccagtgtccagagggattcgcgggaaagtgttgcgaaatcgattccaagccatggtgttacgtgtttaaggctggtaagtactcctctgaattctgttcaacacctgcctgttctgaggggaactcagactgctatttcggtaacggcagcgcttatcggggtacacactctcttaccgagagtggcgcttcctgtctcccatggaactccatgatactgatcggcaaggtctatactgctcagaacccttccgcccaggcgttgggacttggaaagcacaactactgcagaaatcccgacggggatgccaagccttggtgtcacgtgctcaagaaccgcagacttacatgggagtactgtgatgtcccaagctgctccacttgcggattacgacagtacagccaaccgcagttcagaataaaaggtggcctgtttgccgacattgcctctcatccctggcaggcggctatcttcgctaagcaccggcgctcacccggggaaaggtttctgtgtggtgggatcctcatctcctcttgctggatcctgtccgccgcacattgtttccaagaacgcttcccaccccaccatctgaccgtaattctcggtcgaacttacagggttgtgcctggtgaggaggagcaaaaattcgaagtggaaaaatacatcgtgcataaggagtttgatgatgatacctatgataatgacattgctctgcttcagctgaagtcagatagttccagatgcgcgcaggagtcaagtgtggtgaggacggtttgtctgccacccgccgaccttcagctgcctgattggacagagtgcgagttgtctggctacggcaagcatgaagctctgtctccattctactcagagcgtttgaaagaagcgcacgtgcgcctctatccgagttcgcggtgcacctctcagcacttgctcaatcgcactgtgactgacaatatgttatgtgccggggacaccaggtccgggggtccccaagccaacctccacgatgcctgccagggcgatagcggcggtcctctggtgtgcctgaacgacggcagaatgacacttgttgggataattagctggggactgggttgtggtcagaaagatgttcccggcgtgtatactaaggtcaccaactacttggactggattcgggacaacatgagaccctag

SEQ ID NO: 17332 - DNA, 537 bp, Artificial Sequence
  derived and/or modified sequence
atggatgcaatgaaacggggtctctgttgtgtcctgttactctgcggggcagtatttgtctcaccatcacaggaaatccacgcgcggtttaggaggggcgctaggtcctatcaggtaatctgtcgcgacgagaaaacacagatgatttaccaacagcaccagagttggttgagaccagtgctccgttcaaatcgtgtcgaatactgttggtgtaacagtggaagggcgcagtgccacagcgtgcccgtcaagtcctgctctgaaccacggtgttttaatggaggaacatgccagcaggccctttacttcagcgactttgtatgccagtgccctgagggtttcgccgggaaatgttgtgaaatcgacacaagagcaacctgttacgaggatcagggcatcagctacagaggtacatggagtactgccgaaagcggagccgaatgtaccaattggaactcctctgccctggcacagaaaccctacagcggtcggcgacctgacgcaatacggctcggcctggggaatcataactactag

SEQ ID NO: 17333 - DNA, 474 bp, Artificial Sequence
  derived and/or modified sequence
atggatgctatgaaaagagggttgtgctgcgttcttctgctctgcggcgctgtgtttgtttccccatcccaagagattcacgcccgattcagacggggcgcccgcagttatcaggtgatatgtcgcgatgagaagacacagatgatctaccaacagcaccaaagttggctacgccctgtactcaggtccaatagggtagagtactgttggtgcaattcaggaagggcacagtgtcacagtgtccctgtcaagagttgttcggaaccacggtgttttaacggtggcacttgccagcaagctctttatttctctgattttgtctgtcagtgtccagagggtttcgcgggcaaatgttgtgaaattgacacgcgggctacatgttatgaagaccaaggcatcagttacagaggtacctggtcaacagccgagagtggcgcggaatgcaccaattggaactcctcagctcttgcgtag

SEQ ID NO: 17334 - DNA, 882 bp, Artificial Sequence
  derived and/or modified sequence
atggatgccatgaagaggggcctgtgctgcgtgctgctgctgtgtggggctgtgtttgtgagccccagccaggagatccacgcccgcttcagaagaggagcccggagctaccaggtgatctgcagagatgagaagacccagatgatctaccagcagcaccagagctggctgcggcctgtgctgcggagcaacagagtggagtactgctggtgcaacagcggccgggcccagtgccacagcgtgcctgtgaagagctgcagcgagccccgctgcttcaatggaggcacctgccagcaggccctgtacttcagtgactttgtgtgccagtgcccagagggctttgctgggaagtgctgtgaaattgacacccgggccacctgctatgaggaccagggcatctcctaccggggcacctggagcacagctgagagcggggctgaatgtaccaactggaacagcagcgccctggcccagaagccctacagcggccggcggccagatgccatccggctgggcctgggcaaccacaactactgcaggaacccagaccgggacagcaagccctggtgctacgtgttcaaggccggcaagtacagcagcgagttctgcagcaccccagcctgcagcgagggcaacagcgactgctactttggaaatggaagtgcctaccggggcacccacagcctgacagagagcggggccagctgcctgccctggaacagcatgatcctgattggcaaggtgtacacagcccagaaccccagcgcccaggccctgggcctgggcaagcacaactactgccgctgcaggacaggccgctctgtgagcagccctgccacagcctccatgaggccctgcctgctgagcatccgcagcggctag

SEQ ID NO: 17335 - DNA, 1689 bp, Artificial Sequence
  derived and/or modified sequence
atggatgccatgaagaggggcctgtgctgcgtgctgctgctgtgtggggctgtgtttgtgagccccagccaggagatccacgcccgcttcagaagaggagcccggagctaccaggtgatctgcagagatgagaagacccagatgatctaccagcagcaccagagctggctgcggcctgtgctgcggagcaacagagtggagtactgctggtgcaacagcggccgggcccagtgccacagcgtgcctgtgaagagctgcagcgagccccgctgcttcaatggaggcacctgccagcaggccctgtacttcagtgactttgtgtgccagtgcccagagggctttgctgggaagtgctgtgaaattgacacccgggccacctgctatgaggaccagggcatctcctaccggggcacctggagcacagctgagagcggggctgaatgtaccaactggaacagcagcgccctggcccagaagccctacagcggccggcggccagatgccatccggctgggcctgggcaaccacaactactgcaggaacccagaccgggacagcaagccctggtgctacgtgttcaaggccggcaagtacagcagcgagttctgcagcaccccagcctgcagcgagggcaacagcgactgctactttggaaatggaagtgcctaccggggcacccacagcctgacagagagcggggccagctgcctgccctggaacagcatgatcctgattggcaaggtgtacacagcccagaaccccagcgcccaggccctgggcctgggcaagcacaactactgcaggaacccagatggagatgccaagccctggtgccacgtgctgaagaacagaaggctgacctgggagtactgtgatgtgcccagctgcagcacctgtggcctgcggcagtacagccagccccagttccgcatcaagggcggcctgtttgctgacatcgccagccacccctggcaggccgccatctttgccaagcacagaagaagccctggagagcgcttcctgtgtggcggcatcctgatcagcagctgctggatcctgtctgctgcccactgcttccaggagcgcttccccccccaccacctgaccgtcatcctgggccgcacctacagagtggtgcctggagaggaggagcagaagtttgaggtggagaagtacatcgtgcacaaggagtttgatgatgacacctatgacaatgacatcgccctgctgcagctgaagagtgacagcagccgctgtgcccaggagagctctgtggtgaggacagtgtgcctgcccccagctgacctgcagctgcctgactggacagaatgtgagctgagcggctacggcaagcatgaggccctgagccccttctacagcgagcggctgaaggaggcccacgtgcggctgtaccccagcagccgctgcaccagccagcacctgctgaacagaacagtgacagacaacatgctgtgtgccggggacaccaggtctgggggcccccaggccaacctgcatgatgcctgccagggcgacagcggcggccccctggtgtgcctgaatgatggccgcatgaccctggtgggcatcatctcctggggcctgggctgcggccagaaggatgtgcctggggtgtacaccaaggtgaccaactacctggactggatccgggacaacatgaggccctag

SEQ ID NO: 17336 - DNA, 1500 bp, Artificial Sequence
  derived and/or modified sequence
atggatgccatgaagaggggcctgtgctgcgtgctgctgctgtgtggggctgtgtttgtgagccccagccaggagatccacgcccgcttcagaagaggagcccggagctaccaggtgatctgcagagatgagaagacccagatgatctaccagcagcaccagagctggctgcggcctgtgctgcggagcaacagagtggagtactgctggtgcaacagcggccgggcccagtgccacagcgtgcctgtgaagagctgcagcgagccccgctgcttcaatggaggcacctgccagcaggccctgtacttcagtgactttgtgtgccagtgcccagagggctttgctgggaagtgctgtgaaattgacagcaagccctggtgctacgtgttcaaggccggcaagtacagcagcgagttctgcagcaccccagcctgcagcgagggcaacagcgactgctactttggaaatggcagcgcctaccggggcacccacagcctgacagaaagtggggccagctgcctgccctggaacagcatgatcctgattggcaaggtgtacacagcccagaaccccagcgcccaggccctgggcctgggcaagcacaactactgcagaaatccagatggagatgccaagccctggtgccacgtgctgaagaacagaaggctgacctgggagtactgtgatgtgcccagctgcagcacctgtggcctgcggcagtacagccagccccagttccgcatcaagggcggcctgtttgctgacatcgccagccacccctggcaggccgccatctttgccaagcaccggcgcagccctggagagcgcttcctgtgtggcggcatcctgatcagcagctgctggatcctgtctgctgcccactgcttccaggagcgcttccccccccaccacctgaccgtcatcctgggccgcacctacagagtggtgcctggagaggaggagcagaagtttgaggtggagaagtacatcgtgcacaaggagtttgatgatgacacctatgacaatgacatcgccctgctgcagctgaagagtgacagcagccgctgtgcccaggagagctctgtggtgaggacagtgtgcctgcccccagctgacctgcagctgcctgactggacagaatgtgagctgagcggctacggcaagcatgaggccctgagccccttctacagcgagcggctgaaggaggcccacgtgcggctgtaccccagcagccgctgcaccagccagcacctgctgaacagaacagtgacagacaacatgctgtgtgccggggacaccaggtctgggggcccccaggccaacctgcatgatgcctgccagggcgacagcggcggccccctggtgtgcctgaatgatggccgcatgaccctggtgggcatcatctcctggggcctgggctgcggccagaaggatgtgcctggggtgtacaccaaggtgaccaactacctggactggatccgggacaacatgaggccctag

SEQ ID NO: 17337 - DNA, 537 bp, Artificial Sequence
  derived and/or modified sequence
atggatgccatgaagaggggcctgtgctgcgtgctgctgctgtgtggggctgtgtttgtgagccccagccaggagatccacgcccgcttcagaagaggagcccggagctaccaggtgatctgcagagatgagaagacccagatgatctaccagcagcaccagagctggctgcggcctgtgctgcggagcaacagagtggagtactgctggtgcaacagcggccgggcccagtgccacagcgtgcctgtgaagagctgcagcgagccccgctgcttcaatggaggcacctgccagcaggccctgtacttcagtgactttgtgtgccagtgcccagagggctttgctgggaagtgctgtgaaattgacacccgggccacctgctatgaggaccagggcatctcctaccggggcacctggagcacagctgagagcggggctgaatgtaccaactggaacagcagcgccctggcccagaagccctacagcggccggcggccagatgccatccggctgggcctgggcaaccacaactactag

SEQ ID NO: 17338 - DNA, 474 bp, Artificial Sequence
  derived and/or modified sequence
atggatgccatgaagaggggcctgtgctgcgtgctgctgctgtgtggggctgtgtttgtgagccccagccaggagatccacgcccgcttcagaagaggagcccggagctaccaggtgatctgcagagatgagaagacccagatgatctaccagcagcaccagagctggctgcggcctgtgctgcggagcaacagagtggagtactgctggtgcaacagcggccgggcccagtgccacagcgtgcctgtgaagagctgcagcgagccccgctgcttcaatggaggcacctgccagcaggccctgtacttcagtgactttgtgtgccagtgcccagagggctttgctgggaagtgctgtgaaattgacacccgggccacctgctatgaggaccagggcatctcctaccggggcacctggagcacagctgagagcggggctgaatgtaccaactggaacagcagcgccctggcctag

SEQ ID NO: 17339 - DNA, 882 bp, Artificial Sequence
  derived and/or modified sequence
atggacgccatgaagcggggcctgtgctgcgtgctgctgctgtgcggtgcggtcttcgtgtcaccctcacaggagatccacgcaaggttccgtcggggagctcgaagctaccaggtaatctgcagagatgagaagacccagatgatctaccagcagcatcagagctggctgcgacctgtcctcagaagtaatagggttgagtattgctggtgtaactcggggagagcccaatgccactcagtgcccgtgaagtcctgtagcgagcccaggtgcttcaatggaggtacgtgccagcaggccctctacttttctgacttcgtctgccaatgtcctgagggcttcgccggaaaatgctgcgagattgataccagggcaacatgttatgaagatcaagggatttcgtaccgcggaacgtggagtaccgctgagtctggggcagaatgcactaattggaacagttctgccctggcacaaaaaccctattccggccgccgacctgatgctatccgcctcggtttgggcaaccataactactgtcggaaccccgacagggatagcaaaccctggtgttatgtcttcaaggccgggaagtactcaagtgagttttgttccaccccagcatgtagcgaggggaacagcgattgttatttcgggaacggaagcgcgtatcgagggacacactctctgacagagagcggagccagttgcctgccttggaactcgatgattctcatcggcaaggtgtacaccgctcagaacccgagcgcccaggccctcggcttaggcaagcacaattactgccgctgtaggaccggccgaagcgtttcctctccagccaccgctagtatgaggccttgtctcttgagcatccgatccggatag

SEQ ID NO: 17340 - DNA, 1689 bp, Artificial Sequence
  derived and/or modified sequence
atggacgccatgaagcggggcctgtgctgcgtgctgctgctgtgcggagcagtgtttgtgagccctagtcaagagatccatgctcgatttcgcaggggagctcgctcgtatcaagtcatttgcagggatgagaaaacccaaatgatctatcaacagcatcaatcctggctgcggccggtgcttcgaagtaatcgggtcgagtattgctggtgtaatagcggcagggcccagtgtcactcagtgcctgtcaaaagctgctcagaaccgagatgtttcaacggagggacctgtcaacaggccctgtatttcagcgacttcgtatgtcagtgccctgagggctttgccggtaaatgctgtgaaatcgacacacgcgcgacgtgctacgaggatcagggaatcagttacagggggacctggagcaccgcggaatctggcgctgagtgtaccaattggaattccagcgcactggcccagaaaccttacagcggaagaaggcccgatgcgattcgcctggggctggggaaccataattactgcagaaacccagacagagatagcaaaccgtggtgctatgtctttaaggccggtaagtacagctccgagttttgctccacgcctgcgtgtagcgagggcaacagcgattgctacttcggcaacggaagcgcctacaggggaactcacagccttactgagtcgggagcttcatgcctaccatggaactccatgatcctgatcggcaaggtgtatacagcccagaatccaagtgcccaagcactcggcctagggaagcataactattgtcggaatcccgacggtgatgcaaaaccctggtgtcacgtgttgaaaaacaggcggctcacctgggaatattgtgatgtcccttcttgctctacatgcggactcaggcagtacagccagccccaattccgcattaaggggggcctgtttgctgacatagcttcccacccctggcaggccgccatcttcgccaagcaccgccgcagcccaggcgaaagattcctatgcggcggaatcctcatttccagttgctggatcctttccgccgctcactgttttcaggagcgcttccccccccatcatctgactgtaatcctgggccgaacatatagggtcgtgccaggcgaagaggagcagaagttcgaagtagagaagtatatcgtccataaagaattcgatgacgatacctacgacaacgacattgccctgttgcagctgaagagcgactccagccgctgcgcccaggagtctagtgtcgtgaggaccgtgtgtctgccccctgctgacctccagctgcctgattggacagagtgtgagctgtctgggtacgggaagcacgaggccctgagcccattctacagtgaacgtctgaaggaagcccatgtgcgcttatatccatccagccgatgtacctcgcagcatctgctgaacaggaccgttaccgataatatgctttgcgccggagacacacggtccggaggccctcaggccaatctgcacgacgcgtgtcagggcgactctggcggaccgcttgtctgtcttaatgacggccgtatgactctggtgggcatcatctcatggggtctcggctgcggccaaaaggatgtccccggcgtgtacacgaaagttaccaactacttagattggattagggacaacatgagaccctag

SEQ ID NO: 17341 - DNA, 1500 bp, Artificial Sequence
  derived and/or modified sequence
atggacgccatgaagcggggcctgtgctgcgtgctgctgctgtgcggcgcagtgtttgtttccccgagtcaggagattcacgcaaggttccgcagaggggcgagaagctatcaggtaatatgtagggatgaaaaaacccagatgatatatcagcaacaccagtcctggctgagacctgtgcttaggagcaatagagtggagtactgctggtgtaattcaggtcgcgcccagtgtcacagcgtccctgtgaagtcttgtagtgagcccagatgtttcaacggcggcacatgtcaacaggcactgtactttagtgacttcgtatgtcagtgtcccgagggctttgctgggaagtgctgcgaaattgattctaaaccttggtgttatgtattcaaggcaggtaagtactcgtctgaattttgttcaacaccagcttgctctgagggcaattccgactgctactttggaaacggaagcgcctatcgaggtactcactcccttaccgaaagtggcgcatcctgtctgccctggaactccatgattctgatcgggaaggtgtacacagcacagaatccaagcgcacaggcactgggacttggaaaacataactattgccgcaaccctgatggggatgctaagccctggtgtcatgttctcaaaaatcgcagactcacatgggagtattgtgacgtgcctagttgctccacatgtggcctgagacaatatagtcaaccccagtttcgcatcaagggtggtctgtttgccgacatcgctagccacccatggcaggccgcaatctttgccaagcaccgaagatctcccggggaaaggttcctttgcggcggaatcttaatcagcagctgttggatactctctgctgcacactgcttccaggagcgctttccaccccaccatttgacagtcattctgggcagaacttatcgggtggtccccggcgaggaggagcagaagttcgaggtggagaaatacattgtccataaagagtttgacgatgatacctatgacaacgacatcgccctcctgcagcttaagtctgatagcagtcgatgcgcccaggagtcgtcagtggtacgaacagtttgtctcccaccggctgaccttcagcttcccgactggacggagtgcgaactgagcgggtacggcaaacatgaagcactgtcgcccttctattcagagaggttgaaggaggcgcatgtaagactgtacccgagcagccggtgtacctcacaacatctgctgaacagaaccgtaacagacaatatgctgtgcgccggagatactcggagcggcggcccccaggccaacctgcacgacgcctgtcagggcgactccggcgggccattagtgtgcctgaacgacggacgtatgacactggtgggaataatatcttggggacttggttgcggtcaaaaagacgtgcccggagtatacacgaaggttaccaattatttagactggatccgggataatatgcggccatag

SEQ ID NO: 17342 - DNA, 537 bp, Artificial Sequence
  derived and/or modified sequence
atggacgccatgaagcggggcctgtgctgcgtgctgctgctgtgcggggctgtgtttgtgtcccctagccaggagatccacgctcggttcaggcgcggggccagaagctatcaggtcatatgtagagacgaaaaaacacagatgatatatcaacagcaccagtcctggctgcggccagtcctgagaagcaacagggtggaatactgctggtgcaatagtggccgagcccaatgtcatagcgtgcctgtcaagtcctgctctgaacctaggtgtttcaatgggggcacttgccaacaagccctgtacttttctgattttgtttgtcagtgcccagagggatttgccggcaagtgctgtgaaatcgatacccgcgccacctgctatgaagaccagggtatctcttacagaggcacgtggtcaacagccgagtctggcgccgagtgcactaattggaactcaagtgccctcgcccaaaagccctacagcgggaggaggcctgacgcgatcagactcggactgggaaatcacaattactag

SEQ ID NO: 17343 - DNA, 474 bp, Artificial Sequence
  derived and/or modified sequence
atggacgccatgaagcggggcctgtgctgcgtgctgctgctgtgcggtgctgtgttcgtttcaccttctcaggaaattcatgcaagattccgccggggggcacgaagctatcaagtgatttgtcgcgacgaaaagacgcaaatgatctaccaacagcaccagagttggctgcggcctgttctccgttctaatcgcgtggaatattgttggtgcaatagcggacgggcacagtgccactccgtgcccgtaaaatcttgcagcgagccccggtgtttcaacggagggacctgccaacaagccctctatttctccgattttgtgtgtcagtgtccggaaggattcgccggcaaatgttgcgagatcgatacaagagccacatgctatgaggatcaaggaatctcgtaccgggggacgtggtcaaccgccgagtcaggcgcagagtgtaccaattggaatagcagcgccttggcctag

SEQ ID NO: 17344 - DNA, 882 bp, Artificial Sequence
  derived and/or modified sequence
atggacgccatgaaaaggggactctgctgtgttctcctgctgtgcggagctgtctttgtctctcccagtcaggaaatccatgcaagattccggcgaggcgctaggtcctatcaagttatttgccgggatgaaaagacccagatgatctaccagcagcaccagagctggttgcgaccggtactgagaagcaaccgagtggagtattgctggtgtaatagcgggagagcacagtgtcactctgtgcccgtgaaaagctgttcagagcctagatgctttaatggcggaacctgccagcaggcactctattttagcgacttcgtctgccaatgtcctgaaggcttcgcagggaagtgctgcgaaattgatacccgggcaacttgttatgaagaccagggtatttcgtaccgcggaacatggtctaccgccgaatccggagccgagtgtactaattggaatagctctgcgttagcccagaagccttacagcggtcgtcgccctgacgccattagactcggattgggcaatcataactattgtcggaaccctgatagagattctaaaccgtggtgttacgtgttcaaggccggaaaatactcctccgagttttgttccaccccggcttgttcagaggggaattcagactgctacttcggtaacggctctgcctacagaggcactcacagcttgaccgagtctggcgcttcctgtttaccctggaatagcatgattttgattggtaaggtgtatacagctcaaaacccctcagctcaggctctaggtttaggtaagcacaattactgccggtgtcggacagggaggtctgtctcatccccagcaacggcatcaatgaggccatgcctcctatcaatcaggtccggctag

SEQ ID NO: 17345 - DNA, 1689 bp, Artificial Sequence
  derived and/or modified sequence
atggacgccatgaaacgcggtctgtgctgcgtcctcctgctgtgtggcgcagtctttgtctcacctagccaggaaattcacgcccgatttcggagaggagccaggagctatcaggttatctgccgtgatgagaaaactcagatgatttaccaacaacatcagtcctggctgcgcccagtgctgagatctaatcgcgtagagtattgctggtgcaactccggccgtgcccagtgtcactcagtccccgtaaaaagctgcagcgagcctcggtgtttcaatgggggaacttgtcagcaggctctgtatttttctgattttgtctgccagtgccccgaaggatttgcagggaaatgctgtgaaatcgataccagggcaacctgctacgaagaccagggcatcagttaccggggtacctggtccacagcagagagcggcgctgagtgcacaaactggaatagcagtgccttagcacaaaagccctatagcgggaggcgccctgatgctattcgcctaggcctgggaaaccataactactgcaggaaccccgacagagactcaaaaccatggtgctacgtctttaaagcagggaaatactcatcggagttctgcagcaccccggcttgtagcgagggcaactctgactgttacttcggaaatggcagcgcgtatcgaggaacacatagtctgacagagtccggggctagttgtctgccctggaactctatgattctaatcgggaaagtctacaccgcccagaatccttccgcacaggctctcgggctggggaagcacaactattgtcgaaacccagatggcgatgccaaaccctggtgccacgtgctgaagaatcggcgactgacttgggagtactgtgatgtgccttcctgttcaacctgcggcttgagacaatattcccaacctcagttccgtattaaaggtggcctgtttgcagatatcgcctcgcacccatggcaagcagccatattcgcaaagcatcgaaggagtccaggggagaggtttctgtgcggagggattctaatttcgtcgtgctggatactctccgcagctcactgcttccaggagaggtttccacctcaccacctgactgtcattctggggcgtacctatcgggtagtacctggcgaggaagaacagaaattcgaggttgaaaagtatatcgtccataaagagtttgacgatgatacctacgacaatgacatagcgctcctgcaactaaaaagtgactccagccgttgcgcgcaggagagtagtgttgttcggacagtttgcctccctccagccgatctgcaactgccggactggaccgagtgcgagctgagcggctacgggaagcatgaagctttgagtcccttttactccgaaaggctgaaggaggctcacgtacggctttacccctctagtcgatgcacaagccagcacttgttaaaccgcacagttacagataacatgctgtgtgccggagatacaagatctggtggacctcaggctaatctccacgatgcttgtcagggagactcaggcggtcccctggtctgtttaaatgacggacgtatgactctggttggtattataagctggggacttgggtgtgggcaaaaagacgttcctggagtctatacgaaggtgacaaactacctggattggattcgcgacaatatgaggccatag

SEQ ID NO: 17346 - DNA, 1500 bp, Artificial Sequence
  derived and/or modified sequence
atggacgccatgaaacgcggactgtgctgcgttctgttgctctgcggcgcagtctttgtttcacctagtcaggaaattcacgctcgttttaggcgcggagcacgatcatatcaagttatctgccgggacgagaagactcagatgatctatcagcaacaccagagctggctgcgacccgtgctgagaagcaatagagtggagtactgttggtgtaactctggcagggcccaatgccattctgtaccagtcaagagttgcagcgagccgcgatgcttcaatgggggtacatgccagcaggctctgtacttttctgattttgtgtgccagtgccctgaagggtttgccggaaaatgttgtgaaatcgattcaaagccatggtgctatgtgtttaaagccggtaagtatagttctgagttttgttcaacgcctgcttgctccgagggcaactccgactgctattttggtaacggcagcgcttaccgtggaactcattccttaaccgaaagcggggcttcctgtttgccttggaacagtatgatactgattggtaaagtatatactgcccaaaacccttccgcccaggccctgggtctcggtaagcataattactgtcgcaaccctgacggcgacgccaagccttggtgccacgtgctgaagaatcgcaggttgacttgggaatactgtgacgtgccctcctgcagcacttgtgggctgcgccagtatagccagccccagttcagaataaaaggcggactttttgccgacattgcttcccacccatggcaggccgcaatctttgccaaacaccggagatctcctggtgagaggttcctctgtgggggaatccttatatcctcctgctggatcctgagcgctgcacactgttttcaggagcggtttccgccacaccatcttactgtgatcctggggaggacataccgtgtggtgcccggagaagaggaacagaaatttgaagtcgaaaagtacatcgtgcataaggagttcgatgacgacacctatgataacgacatcgcgttacttcagctcaagtctgattctagtaggtgtgcacaggagtccagtgtagtgcgcactgtctgtctcccaccagccgacctccagctgcctgattggacagaatgtgagctgtccggatacggcaaacacgaggcactgtcaccgttttactccgaacggctgaaagaagcacacgtgaggctatatccttcaagccgatgcacttctcagcacttattgaacagaacagtaaccgacaatatgctgtgcgccggagatactcggtccgggggaccacaagcaaacctgcatgacgcatgtcagggagactctggcggtccccttgtctgtctgaacgacggaaggatgactctagtgggtattatatcatgggggctggggtgtggccagaaagacgtgcccggagtgtacaccaaggtaactaactacctggactggatcagggataatatgcgtccttag

SEQ ID NO: 17347 - DNA, 537 bp, Artificial Sequence
  derived and/or modified sequence
atggatgcaatgaagcgcggactatgttgcgtcctgctcctgtgtggagcagtatttgtgtcaccttcccaggaaatacacgcccgttttagaagaggggcacgttcctaccaggttatctgccgagacgagaaaacccagatgatctatcagcagcatcagagttggctgcgcccagttctgaggtccaatcgcgtggagtattgctggtgcaattcaggtagagcccagtgccattctgtgccagtgaagtcttgtagcgagccaaggtgcttcaatggaggtacatgccagcaggctctctacttcagcgacttcgtgtgccagtgtccagaaggatttgccggaaaatgttgcgagatagatactcgggctacctgctatgaggatcagggtattagctaccgcggaacttggtctactgccgagtcgggggctgagtgcaccaattggaatagcagtgcacttgcacaaaagccatacagcggacgcaggcccgacgctattcggctcggcctcggaaatcacaactattag

SEQ ID NO: 17348 - DNA, 474 bp, Artificial Sequence
  derived and/or modified sequence
atggacgctatgaagaggggtttatgttgcgtactgttgctctgtggcgcagtattcgtcagccccagccaagagattcacgctagattcagaagaggcgcaagatcctaccaggtcatctgccgggacgagaagacccagatgatttaccagcagcaccagtcttggttgcgacctgtacttcggagcaatcgagttgagtactgttggtgtaactccggtagagcacagtgccattctgttcccgtgaaatcttgctcagaacccaggtgtttcaacggtggcacctgtcaacaggctttatatttcagcgattttgtctgccaatgtcctgaaggattcgcaggtaaatgttgcgagatcgatacaagggccacttgctatgaggatcaggggatctcgtatcgcggaacgtggtctactgcagagagcggtgctgaatgtactaactggaattcctcagctcttgcttag

SEQ ID NO: 17349 - DNA, 882 bp, Artificial Sequence
  derived and/or modified sequence
atggacgctatgaaacgtggtctctgttgtgtcttgctgctgtgcggggccgtcttcgtcagcccttctcaggaaatacatgccaggttccgccgcggagcgcggtcttatcaggtaatctgccgcgacgagaagactcagatgatttaccagcagcatcaatcgtggctcagacccgtccttcggagcaaccgcgtagaatattgttggtgcaatagcggccgggcacaatgtcattctgttcccgtgaaatcatgtagcgagccgagatgcttcaacggcggcacatgtcagcaggccctctatttctcggactttgtttgccaatgtcccgagggcttcgccggcaagtgttgtgagatcgacacgagagcgacatgctatgaggaccagggaatctcatatagagggacgtggtcaactgcagaatcaggcgctgaatgcacaaactggaactcctcagcactcgcccaaaaaccctattcagggaggaggccagacgctatcagactcggactggggaaccataactattgccgtaatccagatcgcgactcaaagccctggtgttacgtgttcaaggcagggaagtacagcagcgagttttgcagtacccccgcttgcagtgagggaaatagtgattgttactttgggaatggttctgcatacaggggtacccatagccttactgaatccggagcctcatgtctaccttggaattccatgatcctgataggaaaagtttataccgctcaaaacccctccgcacaggcactgggcttaggcaaacacaactactgtcggtgtagaacaggtcgaagcgtctcctcgccggcaaccgcttcaatgcgcccctgcctgctctccattagatctggctag

SEQ ID NO: 17350 - DNA, 1689 bp, Artificial Sequence
  derived and/or modified sequence
atggatgctatgaaaagaggactgtgctgcgttctgctgctatgtggggcagtcttcgtttcaccttcacaggagatacatgcacgcttcaggaggggagctcgcagttaccaagtcatatgtagagacgagaagactcagatgatataccagcagcaccaatcctggctaagaccagtccttcggagcaacagagtggaatattgttggtgcaattctggccgggcccagtgtcactccgtccccgtcaaatcttgcagcgagcccagatgctttaatggcggtacatgtcaacaggccctgtatttttccgattttgtttgccaatgcccagaaggcttcgcaggcaagtgctgtgagatcgacacacgtgcaacatgttacgaggaccaaggcatcagttatcgtggaacatggagcacagctgaatctggtgccgaatgtaccaattggaactctagtgctctggctcagaaaccctacagcgggcgcaggcctgatgctattcggcttggcttaggaaatcacaattactgccggaaccctgatcgagactcaaagccttggtgctacgttttcaaggcaggtaagtattccagcgagttttgctcaactcccgcttgctccgagggcaactctgattgctatttcggaaacgggtccgcatataggggcacccactctttgaccgagtccggcgccagctgcctcccctggaatagcatgatactcattgggaaggtatacaccgcccagaaccctagcgcgcaggcccttggtctggggaaacacaattattgtcgaaatcctgacggagacgcaaaaccctggtgccacgtgctgaagaaccgtaggcttacatgggaatattgtgacgttccaagttgctctacatgcggtttgagacaatattcacagcctcagttcagaatcaaaggggggctattcgcagatatcgctagccacccatggcaggctgcaatctttgccaaacatcgcagatctcctggcgaacgctttctttgcggtggcatcctgatctctagttgctggatcttgagcgcagcccattgtttccaggaacggttccccccccaccatctgactgtgatcctgggacgcacctatagagtcgttcccggcgaggaggagcagaaattcgaagtagagaaatacatcgtgcataaggagttcgatgacgacacatatgacaatgatatcgcactgctgcagctaaagagtgattccagcaggtgtgcccaagaaagttcagtagttagaacggtatgtcttcctccagccgacctgcaattaccagactggaccgaatgcgaactttcaggatacggtaaacacgaagctctgtcgcccttctactcagaaaggctgaaagaagcccacgtccgcctttacccttctagtagatgcacaagccaacatctgctgaaccgcacggtgaccgataatatgctgtgcgcaggcgatacaagatccggtgggccccaggccaatctgcatgatgcttgccagggagactcaggaggacctctggtgtgtctgaacgacggacgcatgacactggtgggaatcatttcatgggggctggggtgtggacagaaggatgtgcccggagtgtatacgaaggttacaaactatctcgattggatcagagacaatatgcggccttag

SEQ ID NO: 17351 - DNA, 1500 bp, Artificial Sequence
  derived and/or modified sequence
atggacgcaatgaagcgtggcctctgctgcgttctgctcctgtgcggcgctgttttcgttagcccatcgcaggagatccatgctcgctttcgcagaggcgccaggtcctaccaagtgatttgtcgagatgagaaaacgcagatgatctaccagcaacatcagagttggttgaggcccgtcctacgcagcaatagagtcgaatactgctggtgtaattcagggagagcccaatgccactctgtgccagtaaagtcgtgttctgagccaaggtgttttaacggtggtacatgccagcaggctctgtatttttccgactttgtatgccaatgtccggaagggtttgccggaaaatgctgcgagatcgactcaaagccatggtgttacgtattcaaagctgggaaatattcaagcgagttctgctctactcccgcttgttcggagggtaactccgattgttattttggcaatggaagcgcatatagagggacacattctctgaccgagagcggcgcgtcttgtttgccgtggaattcaatgatcctgattggcaaggtgtacacagcacaaaacccgagcgcccaggccctcggattaggcaagcacaactactgtaggaacccagacggggacgcaaaaccttggtgtcacgtgctcaaaaaccgcagattgacatgggagtactgcgatgtgccaagttgttcaacatgcggactgaggcagtactcacagccgcagtttagaatcaaaggcggactatttgcagatattgcctcccatccttggcaggcggcaatcttcgctaagcatcgacgcagccctggtgagcggtttctgtgtggtggcattctaatcagctcttgttggatactctctgcagcccattgtttccaggaacgttttcccccccatcatctgacggtcattctgggaagaacgtatcgggtcgtccccggcgaagaagagcaaaagttcgaggtggaaaaatacattgttcacaaggagttcgatgacgacacttatgacaacgatatcgctcttcttcagttaaaaagtgactctagtagatgcgctcaggagagcagcgttgtcagaaccgtttgcctgcccccagccgacctacaactacccgattggaccgagtgcgaactttcagggtatggcaagcatgaggctctgagtccattttactctgagaggttgaaagaagcccatgttagactctatcccagttcacggtgtacttcacagcatctgcttaataggacagtgacagacaatatgctctgtgccggagacacccggtcaggtggaccccaagccaacttgcacgatgcctgtcagggagattctggcggacccctcgtgtgcctgaatgatggtaggatgaccctggtcggtattatctcctggggcctcggatgcggccaaaaagacgtgccaggtgtctatacaaaagtaacaaattatctggattggatccgggataatatgcgcccttag

SEQ ID NO: 17352 - DNA, 537 bp, Artificial Sequence
  derived and/or modified sequence
atggacgcgatgaagagaggactttgttgtgtcctcctcttgtgtggcgctgtttttgttagtccaagccaggaaatacatgccaggtttcgccgcggtgcccgatcatatcaagtaatttgccgggacgaaaaaactcagatgatatatcagcaacatcagtcctggctgcgcccagtcttacgatccaatcgcgtagagtactgctggtgtaatagtggccgtgcccagtgtcactccgtgcctgtgaaatcctgttccgaaccaagatgtttcaacggcggtacctgccaacaggctctttattttagcgactttgtctgccagtgtccagaaggatttgctggcaagtgctgcgaaatcgacactcgcgctacctgttatgaggaccaaggaattagttatcgaggaacctggtcaacagctgagagcggcgccgaatgtacaaattggaatagcagcgctcttgcccagaaaccttacagtggccgccggccagatgccatccggttaggattagggaaccacaactactag

SEQ ID NO: 17353 - DNA, 474 bp, Artificial Sequence
  derived and/or modified sequence
atggatgcaatgaagcgagggttgtgttgcgttttactcctctgtggagcagtctttgtcagcccaagccaggagatccacgctaggttccgaagaggcgcaaggtcttatcaggtgatttgcagagacgagaagacacagatgatctaccaacaacatcaatcttggttacgacctgtgctccgcagcaatcgggtggagtattgctggtgtaattctgggagggcacagtgccattctgtgcctgtaaagtcatgcagcgagcctagatgttttaacggagggacttgccaacaggccctgtacttttcagactttgtgtgccagtgtccagaaggctttgcaggtaaatgttgcgagattgatactcgagctacctgttacgaggatcaaggcatctcataccgtggtacgtggtccaccgcagaatcaggggcagagtgtacaaattggaactcatcagcacttgcttag

SEQ ID NO: 17354 - DNA, 882 bp, Artificial Sequence
  derived and/or modified sequence
atggacgccatgaaaagaggcttgtgttgtgtgctgctgctttgtggcgccgtctttgtatcacccagccaggagatccacgccaggtttcgaaggggcgcaagatcataccaagtgatatgtcgtgacgaaaagacgcagatgatttatcagcagcatcaatcttggctgcgccctgttttaagatctaatcgtgttgagtattgctggtgcaatagcggtagagctcagtgtcactccgtccccgtcaaatcctgtagcgaaccaaggtgtttcaacggtggcacctgccaacaggctctgtacttctccgactttgtctgtcagtgccctgagggctttgccggcaagtgctgtgaaatcgacactagagccacttgttacgaagaccagggaatttcttatcgtggcacatggtcaactgccgaatctggcgcagaatgtactaattggaatagttctgctcttgctcaaaaaccctatagcggccgacgtccagacgctatccgactcgggctaggtaatcacaactattgtagaaaccccgacagagatagtaaaccctggtgttatgtgttcaaggcaggcaagtactcatctgagttttgcagtacccccgcttgcagtgagggaaatagtgattgttactttgggaatggttctgcatacaggggtacccatagccttactgaatccggagcctcatgtctaccttggaattccatgatcctgataggaaaagtttataccgctcaaaacccctccgcacaggcactgggcttaggcaaacacaactactgtcggtgtagaacaggtcgaagcgtctcctcgccggcaaccgcttcaatgcgcccctgcctgctctccattagatctggctag

SEQ ID NO: 17355 - DNA, 1689 bp, Artificial Sequence
  derived and/or modified sequence
atggatgctatgaagagaggcctctgctgtgttcttcttctctgcggcgccgtgttcgtgtccccaagccaggagattcatgctcgatttcgtcggggcgcaaggtcatatcaagtaatatgtcgggacgagaagacccagatgatatatcagcagcaccagtcctggctgcgtcccgtattgaggtcaaatcgagtggaatattgttggtgcaactcaggtagggcccagtgccatagcgtgcccgtgaaatcttgctccgaacccagatgctttaatggaggaacttgtcaacaagcattgtattttagtgatttcgtgtgtcagtgtcccgaaggcttcgccggcaaatgctgcgagattgatacaagagcaacttgctacgaagaccagggtattagctatcgaggaacttggtccactgccgagagtggagctgaatgtaccaactggaactcctccgcccttgcccaaaaaccttacagcgggaggaggccagacgcaattagacttggactcggaaatcataactattgtcgcaacccagaccgcgattccaagccgtggtgttatgtttttaaggcaggaaaatatagtagcgaattttgctcaactccggcctgctcagagggaaatagcgattgttactttggcaacggaagcgcatacagaggtactcattcactgaccgagtctggggcctcatgccttccctggaattctatgatccttattggtaaggtgtacacagctcagaatccatccgcgcaggctctgggacttggtaagcataattactgccgaaaccctgatggagatgccaaaccttggtgccatgttttgaaaaatagacggcttacgtgggaatattgtgatgtgccttcctgttcgacctgcggtcttagacaatactctcagcctcagtttagaatcaaaggcggcctgtttgcagatattgcctcccacccttggcaggccgcaatttttgctaagcaccggagaagtcccggcgaaagattcctctgtgggggaatactcatttcctcctgttggatactcagcgctgctcattgtttccaggaaaggttccctccgcaccacttaacagtcattctcggacgaacctacagagtcgttccaggcgaagaagaacagaagttcgaggtggagaaatatatcgtgcataaagaattcgatgatgatacatatgacaacgatattgccctcttacaacttaagtctgactcctctaggtgcgcccaggagagctctgtcgttagaactgtttgcctgcctccggctgacctgcagctgccagattggacagaatgcgaactctcgggttatggtaagcacgaagcgctttcaccattctatagcgagcggttgaaagaggcgcacgtccgtttgtaccccagttcaagatgtaccagccagcatttactcaaccgtactgtgaccgataacatgctctgcgctggagatacaagaagcggaggcccacaagcgaacctccatgacgcttgtcagggtgactcaggcggaccccttgtgtgtctgaacgacggcagaatgaccttagtgggcattattagctggggactgggatgtggccagaaggacgtgcccggcgtttatacaaaggtgacaaactatttggattggatcagagataacatgaggccatag

SEQ ID NO: 17356 - DNA, 1500 bp, Artificial Sequence
  derived and/or modified sequence
atggacgctatgaaacgcggactgtgctgtgtattactgctatgcggcgctgtcttcgtgagcccttcacaagagatccacgcccgattcagacgcggtgccaggagttaccaggtgatctgcagggatgagaaaacgcaaatgatctatcagcagcaccagtcatggctgagacccgtgcttagatcaaatagagtcgagtattgttggtgcaattcaggccgagcccagtgtcacagcgtaccagttaagagttgctccgagcctcgctgcttcaatggcggaacctgccagcaggccttatacttcagcgattttgtatgtcaatgcccagagggatttgccggcaagtgctgtgagatcgatagtaagccctggtgctatgtgttcaaagccggcaaatattcttccgaattttgctcaacacccgcctgcagcgagggcaatagtgactgttactttggaaacggttcagcgtatagggggacgcatagcctgaccgaatctggagcctcttgtctgccttggaacagcatgatcctcatcggcaaggtctatacagctcagaacccctctgcccaagctctcggcctcggaaaacataattactgtagaaatcccgatggcgacgccaaaccttggtgccatgtgttgaagaacaggagactcacatgggagtactgtgacgtcccgagctgttctacctgtggactaagacaatattctcaaccccaatttcgcataaagggcggactgtttgccgatatcgcttctcatccttggcaggctgcaatcttcgcaaaacacagacgtagcccgggcgagcgctttctctgtgggggtatccttatttcttcttgttggatactttctgcagcacattgctttcaggagcggtttcctccccatcatctgacggtgatcctaggccgaacataccgcgtggtacccggggaagaagagcagaaatttgaagtcgaaaaatacatagtgcacaaagaattcgacgacgacacctacgacaacgatattgcacttttacaactgaagtcagacagctcccgatgtgcgcaagagtcttctgtcgtccggacagtatgcctcccacccgccgacctgcagttacccgattggactgaatgtgagctctcaggctacggcaaacacgaggccctgagccccttctacagcgaaagacttaaggaagcgcacgtgcgcctgtacccatcttcccggtgtaccagtcaacatctactgaataggaccgtgaccgacaacatgttatgcgccggcgacacacgatctggtggcccacaagctaacctccatgatgcatgtcagggcgatagcgggggacccttagtttgtctgaacgatgggagaatgactctagttggtatcatttcttggggactagggtgcggacagaaggatgtgccgggggtttacaccaaagtaacgaactacctcgattggatccgagacaacatgcggccatag

SEQ ID NO: 17357 - DNA, 537 bp, Artificial Sequence
  derived and/or modified sequence
atggatgccatgaagcgaggcctctgttgtgtgcttctgctttgtggggcagtgtttgtctcaccatcacaggaaattcacgctcgtttccggaggggtgcgagatcctaccaggtcatctgtcgggacgaaaaaacccaaatgatataccaacagcatcaatcctggctcagacctgttctgcggtcaaaccgcgtcgagtattgctggtgcaactctggccgcgctcaatgtcactctgtccctgttaaaagctgttcggagccccggtgtttcaatggcggcacctgtcaacaagcactgtatttctccgacttcgtctgccagtgtcccgaaggatttgcagggaaatgttgcgaaatcgacaccagagccacatgctatgaggatcaaggtattagctatcgaggaacatggtctacagccgagagtggcgctgaatgcaccaattggaactcttctgccctcgctcagaaaccgtattccggccgccgccctgatgcaatccgcttaggactgggcaaccataactattag

SEQ ID NO: 17358 - DNA, 474 bp, Artificial Sequence
  derived and/or modified sequence
atggatgcaatgaagagggggctgtgttgtgtattactcctctgtggcgccgtcttcgtttcccccagtcaggagatacacgcacgcttcagacgcggtgcacgtagttaccaagtgatttgcagggacgagaagacacagatgatataccaacaacaccagtcttggctcaggcctgtcctacggtccaatcgggtcgagtattgctggtgcaattcaggtcgcgctcagtgccattcagttccagtgaagagttgtagtgagccaaggtgttttaatggcgggacttgtcagcaggctctatacttttccgattttgtgtgccagtgtccggagggcttcgcaggaaaatgctgcgagattgacaccagagctacatgttacgaggatcaaggcatatcataccgcggtacatggtctaccgccgaatccggtgctgaatgcactaactggaactcatccgccctcgcttag

SEQ ID NO: 17359 - DNA, 2706 bp, Artificial Sequence
  derived and/or modified sequence
gaacttcctccccctgctttataaaaacaggcctgcctcagctccctcatggccctgtccactgagcatcctcccgccacacagaaacccgcccagccggggccaccgaccccaccccctgcctggaaacttaaaggaggccggagctgtggggagctcagagctgagatcctacaggagtccagggctggagagaaaacctctgcgaggaaagggaaggagcaagccgtgaatttaagggacgctgtgaagcaatcatggatgcaatgaagagagggctctgctgtgtgctgctgctgtgtggagcagtcttcgtttcgcccagccaggaaatccatgcccgattcagaagaggagccagatcttaccaagtgatctgcagagatgaaaaaacgcagatgatataccagcaacatcagtcatggctgcgccctgtgctcagaagcaaccgggtggaatattgctggtgcaacagtggcagggcacagtgccactcagtgcctgtcaaaagttgcagcgagccaaggtgtttcaacgggggcacctgccagcaggccctgtacttctcagatttcgtgtgccagtgccccgaaggatttgctgggaagtgctgtgaaatagataccagggccacgtgctacgaggaccagggcatcagctacaggggcacgtggagcacagcggagagtggcgccgagtgcaccaactggaacagcagcgcgttggcccagaagccctacagcgggcggaggccagacgccatcaggctgggcctggggaaccacaactactgcagaaacccagatcgagactcaaagccctggtgctacgtctttaaggcggggaagtacagctcagagttctgcagcacccctgcctgctctgagggaaacagtgactgctactttgggaatgggtcagcctaccgtggcacgcacagcctcaccgagtcgggtgcctcctgcctcccgtggaattccatgatcctgataggcaaggtttacacagcacagaaccccagtgcccaggcactgggcctgggcaaacataattactgccggaatcctgatggggatgccaagccctggtgccacgtgctgaagaaccgcaggctgacgtgggagtactgtgatgtgccctcctgctccacctgcggcctgagacagtacagccagcctcagtttcgcatcaaaggagggctcttcgccgacatcgcctcccacccctggcaggctgccatctttgccaagcacaggaggtcgcccggagagcggttcctgtgcgggggcatactcatcagctcctgctggattctctctgccgcccactgcttccaggagaggtttccgccccaccacctgacggtgatcttgggcagaacataccgggtggtccctggcgaggaggagcagaaatttgaagtcgaaaaatacattgtccataaggaattcgatgatgacacttacgacaatgacattgcgctgctgcagctgaaatcggattcgtcccgctgtgcccaggagagcagcgtggtccgcactgtgtgccttcccccggcggacctgcagctgccggactggacggagtgtgagctctccggctacggcaagcatgaggccttgtctcctttctattcggagcggctgaaggaggctcatgtcagactgtacccatccagccgctgcacatcacaacatttacttaacagaacagtcaccgacaacatgctgtgtgctggagacactcggagcggcgggccccaggcaaacttgcacgacgcctgccagggcgattcgggaggccccctggtgtgtctgaacgatggccgcatgactttggtgggcatcatcagctggggcctgggctgtggacagaaggatgtcccgggtgtgtacaccaaggttaccaactacctagactggattcgtgacaacatgcgaccgtgaccaggaacacccgactcctcaaaagcaaatgagatcccgcctcttcttcttcagaagacactgcaaaggcgcagtgcttctctacagacttctccagacccaccacaccgcagaagcgggacgagaccctacaggagagggaagagtgcattttcccagatacttcccattttggaagttttcaggacttggtctgatttcaggatactctgtcagatgggaagacatgaatgcacactagcctctccaggaatgcctcctccctgggcagaaagtggccatgccaccctgttttcagctaaagcccaacctcctgacctgtcaccgtgagcagctttggaaacaggaccacaaaaatgaaagcatgtctcaatagtaaaagataacaagatctttcaggaaagacggattgcattagaaatagacagtatatttatagtcacaagagcccagcagggcctcaaagttggggcaggctggctggcccgtcatgttcctcaaaagcacccttgacgtcaagtctccttcccctttccccactccctggctctcagaaggtattccttttgtgtacagtgtgtaaagtgtaaatcctttttctttataaactttagagtagcatgagagaattgtatcatttgaacaactaggcttcagcatatttatagcaatccatgttagtttttactttctgttgccacaaccctgttttatactgtacttaataaattcagatatatttttcacagtttttccaaaa

SEQ ID NO: 17360 - DNA, 2665 bp, Artificial Sequence
  derived and/or modified sequence
atggccctgtccactgagcatcctcccgccacacagaaacccgcccagccggggccaccgaccccaccccctgcctggaaacttaaaggaggccggagctgtggggagctcagagctgagatcctacaggagtccagggctggagagaaaacctctgcgaggaaagggaaggagcaagccgtgaatttaagggacgctgtgaagcaatcatggatgcaatgaagagagggctctgctgtgtgctgctgctgtgtggagcagtcttcgtttcgcccagccaggaaatccatgcccgattcagaagaggagccagatcttaccaagtgatctgcagagatgaaaaaacgcagatgatataccagcaacatcagtcatggctgcgccctgtgctcagaagcaaccgggtggaatattgctggtgcaacagtggcagggcacagtgccactcagtgcctgtcaaaagttgcagcgagccaaggtgtttcaacgggggcacctgccagcaggccctgtacttctcagatttcgtgtgccagtgccccgaaggatttgctgggaagtgctgtgaaatagataccagggccacgtgctacgaggaccagggcatcagctacaggggcacgtggagcacagcggagagtggcgccgagtgcaccaactggaacagcagcgcgttggcccagaagccctacagcgggcggaggccagacgccatcaggctgggcctggggaaccacaactactgcagaaacccagatcgagactcaaagccctggtgctacgtctttaaggcggggaagtacagctcagagttctgcagcacccctgcctgctctgagggaaacagtgactgctactttgggaatgggtcagcctaccgtggcacgcacagcctcaccgagtcgggtgcctcctgcctcccgtggaattccatgatcctgataggcaaggtttacacagcacagaaccccagtgcccaggcactgggcctgggcaaacataattactgccgctgccggactggacggagtgtgagctctccggctacggcaagcatgaggccttgtctcctttctattcggagcggctgaaggaggctcatgtcagactgtacccatccagccgctgcacatcacaacatttacttaacagaacagtcaccgacaacatgctgtgtgctggagacactcggagcggcgggccccaggcaaacttgcacgacgcctgccagggcgattcgggaggccccctggtgtgtctgaacgatggccgcatgactttggtgggcatcatcagctggggcctgggctgtggacagaaggatgtcccgggtgtgtacaccaaggttaccaactacctagactggattcgtgacaacatgcgaccgtgaccaggaacacccgactcctcaaaagcaaatgagatcccgcctcttcttcttcagaagacactgcaaaggcgcagtgcttctctacagacttctccagacccaccacaccgcagaagcgggacgagaccctacaggagagggaagagtgcattttcccagatacttcccattttggaagttttcaggacttggtctgatttcaggatactctgtcagatgggaagacatgaatgcacactagcctctccaggaatgcctcctccctgggcagaaagtggccatgccaccctgttttcagctaaagcccaacctcctgacctgtcaccgtgagcagctttggaaacaggaccacaaaaatgaaagcatgtctcaatagtaaaagataacaagatctttcaggaaagacggattgcattagaaatagacagtatatttatagtcacaagagcccagcagggcctcaaagttggggcaggctggctggcccgtcatgttcctcaaaagcacccttgacgtcaagtctccttcccctttccccactccctggctctcagaaggtattccttttgtgtacagtgtgtaaagtgtaaatcctttttctttataaactttagagtagcatgagagaattgtatcatttgaacaactaggcttcagcatatttatagcaatccatgttagtttttactttctgttgccacaaccctgttttatactgtacttaataaattcagatatatttttcacagtttttccaaaatcagagtggaatggttttgttatagatgctgtatcccactctttattcatgttcacattttaaaatcatttggaattctgcttcactcgcttaacatatacacaacacctgtaacatacaaggcaatgggctaggtgctccagaccgggaaaaggagggacaggaatgcttggtctgatgggctaatatggcatttagagaagtaccaaggtacagtggagccggtcacaaaagggcagacttgtagtagaattcagttgcaagagggattggggaatcttaaggaaaaaatagaatcttaaggaaaaaataactgggtgagacgtggactgtggacaggtgtggaaaaggcactctccatggaggtatgaatatgtagagggccaagagaggggagtacagggagaaatgagttgagcttgtctgaagtgaacttcaggaagaggaacataggctggaatttagattatgggggctctgaacaccaaactgagtttggacttaattgacttctg

SEQ ID NO: 17361 - DNA, 2599 bp, Artificial Sequence
  derived and/or modified sequence
agagctgagatcctacaggagtccagggctggagagaaaacctctgcgaggaaagggaaggagcaagccgtgggagggagagaggaagggagggagggaagacgaaaacacgccgaggtcccagaatttaagggacgctgtgaagcaatcatggatgcaatgaagagagggctctgctgtgtgctgctgctgtgtggagcagtcttcgtttcgcccagccaggaaatccatgcccgattcagaagaggagccagatcttaccaagtgatctgcagagatgaaaaaacgcagatgatataccagcaacatcagtcatggctgcgccctgtgctcagaagcaaccgggtggaatattgctggtgcaacagtggcagggcacagtgccactcagtgcctgtcaaaagttgcagcgagccaaggtgtttcaacgggggcacctgccagcaggccctgtacttctcagatttcgtgtgccagtgccccgaaggatttgctgggaagtgctgtgaaatagataccagggccacgtgctacgaggaccagggcatcagctacaggggcacgtggagcacagcggagagtggcgccgagtgcaccaactggaacagcagcgcgttggcccagaagccctacagcgggcggaggccagacgccatcaggctgggcctggggaaccacaactactgcagaaacccagatcgagactcaaagccctggtgctacgtctttaaggcggggaagtacagctcagagttctgcagcacccctgcctgctctgagggaaacagtgactgctactttgggaatgggtcagcctaccgtggcacgcacagcctcaccgagtcgggtgcctcctgcctcccgtggaattccatgatcctgataggcaaggtttacacagcacagaaccccagtgcccaggcactgggcctgggcaaacataattactgccggaatcctgatggggatgccaagccctggtgccacgtgctgaagaaccgcaggctgacgtgggagtactgtgatgtgccctcctgctccacctgcggcctgagacagtacagccagcctcagtttcgcatcaaaggagggctcttcgccgacatcgcctcccacccctggcaggctgccatctttgccaagcacaggaggtcgcccggagagcggttcctgtgcgggggcatactcatcagctcctgctggattctctctgccgcccactgcttccaggagaggtttccgccccaccacctgacggtgatcttgggcagaacataccgggtggtccctggcgaggaggagcagaaatttgaagtcgaaaaatacattgtccataaggaattcgatgatgacacttacgacaatgacattgcgctgctgcagctgaaatcggattcgtcccgctgtgcccaggagagcagcgtggtccgcactgtgtgccttcccccggcggacctgcagctgccggactggacggagtgtgagctctccggctacggcaagcatgaggccttgtctcctttctattcggagcggctgaaggaggctcatgtcagactgtacccatccagccgctgcacatcacaacatttacttaacagaacagtcaccgacaacatgctgtgtgctggagacactcggagcggcgggccccaggcaaacttgcacgacgcctgccagggcgattcgggaggccccctggtgtgtctgaacgatggccgcatgactttggtgggcatcatcagctggggcctgggctgtggacagaaggatgtcccgggtgtgtacaccaaggttaccaactacctagactggattcgtgacaacatgcgaccgtgaccaggaacacccgactcctcaaaagcaaatgagatcccgcctcttcttcttcagaagacactgcaaaggcgcagtgcttctctacagacttctccagacccaccacaccgcagaagcgggacgagaccctacaggagagggaagagtgcattttcccagatacttcccattttggaagttttcaggacttggtctgatttcaggatactctgtcagatgggaagacatgaatgcacactagcctctccaggaatgcctcctccctgggcagaaagtggccatgccaccctgttttcagctaaagcccaacctcctgacctgtcaccgtgagcagctttggaaacaggaccacaaaaatgaaagcatgtctcaatagtaaaagataacaagatctttcaggaaagacggattgcattagaaatagacagtatatttatagtcacaagagcccagcagggcctcaaagttggggcaggctggctggcccgtcatgttcctcaaaagcacccttgacgtcaagtctccttcccctttccccactccctggctctcagaaggtattccttttgtgtacagtgtgtaaagtgtaaatcctttttctttataaactttagagtagcatgagagaattgtatcatttgaacaactaggcttcagcatatttatagcaatccatgttagtttttactttctgttgccacaaccctgttttatactgtacttaataaattcagatatatttttcacagtttttccaaaa

SEQ ID NO: 17362 - DNA, 2030 bp, Artificial Sequence
  derived and/or modified sequence
agagctgagatcctacaggagtccagggctggagagaaaacctctgcgaggaaagggaaggagcaagccgtgaatttaagggacgctgtgaagcaatcatggatgcaatgaagagagggctctgctgtgtgctgctgctgtgtggagcagtcttcgtttcgcccagccaggaaatccatgcccgattcagaagaggagccagatcttaccaagtgatctgcagagatgaaaaaacgcagatgatataccagcaacatcagtcatggctgcgccctgtgctcagaagcaaccgggtggaatattgctggtgcaacagtggcagggcacagtgccactcagtgcctgtcaaaagttgcagcgagccaaggtgtttcaacgggggcacctgccagcaggccctgtacttctcagatttcgtgtgccagtgccccgaaggatttgctgggaagtgctgtgaaatagactcaaagccctggtgctacgtctttaaggcggggaagtacagctcagagttctgcagcacccctgcctgctctgagggaaacagtgactgctactttgggaatgggtcagcctaccgtggcacgcacagcctcaccgagtcgggtgcctcctgcctcccgtggaattccatgatcctgataggcaaggtttacacagcacagaaccccagtgcccaggcactgggcctgggcaaacataattactgccggaatcctgatggggatgccaagccctggtgccacgtgctgaagaaccgcaggctgacgtgggagtactgtgatgtgccctcctgctccacctgcggcctgagacagtacagccagcctcagtttcgcatcaaaggagggctcttcgccgacatcgcctcccacccctggcaggctgccatctttgccaagcacaggaggtcgcccggagagcggttcctgtgcgggggcatactcatcagctcctgctggattctctctgccgcccactgcttccaggagaggtttccgccccaccacctgacggtgatcttgggcagaacataccgggtggtccctggcgaggaggagcagaaatttgaagtcgaaaaatacattgtccataaggaattcgatgatgacacttacgacaatgacattgcgctgctgcagctgaaatcggattcgtcccgctgtgcccaggagagcagcgtggtccgcactgtgtgccttcccccggcggacctgcagctgccggactggacggagtgtgagctctccggctacggcaagcatgaggccttgtctcctttctattcggagcggctgaaggaggctcatgtcagactgtacccatccagccgctgcacatcacaacatttacttaacagaacagtcaccgacaacatgctgtgtgctggagacactcggagcggcgggccccaggcaaacttgcacgacgcctgccagggcgattcgggaggccccctggtgtgtctgaacgatggccgcatgactttggtgggcatcatcagctggggcctgggctgtggacagaaggatgtcccgggtgtgtacaccaaggttaccaactacctagactggattcgtgacaacatgcgaccgtgaccaggaacacccgactcctcaaaagcaaatgagatcccgcctcttcttcttcagaagacactgcaaaggcgcagtgcttctctacagacttctccagacccaccacaccgcagaagcgggacgagaccctacaggagagggaagagtgcattttcccagatacttcccattttggaagttttcaggacttggtctgatttcaggatactctgtcagatgggaagacatgaatgcacactagcctctccaggaatgcctcctccctgggcagaaagtggccatgccaccctgttttcagctaaagcccaacctcctgacctgtcaccgtgagcagctttggaaacaggaccacaaaaatgaaagcatgtctcaatagtaaaagataacaagatctttcaggaaagacggattgcattagaaatagacagtata

SEQ ID NO: 17363 - DNA, 670 bp, Artificial Sequence
  derived and/or modified sequence
aaaaaaaaaaaaggacatgctacagcatggatgcaccttgaagacatttgcaaagtgaaacaaaccagtcgcaaaagaagaaacactgtctcattccacttctaggataatttaagggacgctgtgaagcaatcatggatgcaatgaagagagggctctgctgtgtgctgctgctgtgtggagcagtcttcgtttcgcccagccaggaaatccatgcccgattcagaagaggagccagatcttaccaagtgatctgcagagatgaaaaaacgcagatgatataccagcaacatcagtcatggctgcgccctgtgctcagaagcaaccgggtggaatattgctggtgcaacagtggcagggcacagtgccactcagtgcctgtcaaaagttgcagcgagccaaggtgtttcaacgggggcacctgccagcaggccctgtacttctcagatttcgtgtgccagtgccccgaaggatttgctgggaagtgctgtgaaatagataccagggccacgtgctacgaggaccagggcatcagctacaggggcacgtggagcacagcggagagtggcgccgagtgcaccaactggaacagcagcgcgttggcccagaagccctacagcgggcggaggccagacgccatcaggctgggcctggggaaccacaactactg

SEQ ID NO: 17364 - DNA, 549 bp, Artificial Sequence
  derived and/or modified sequence
agttttgagaaacaggaaatttgaggaaagctgagaaagagaagatctggaaatttaagggacgctgtgaagcaatcatggatgcaatgaagagagggctctgctgtgtgctgctgctgtgtggagcagtcttcgtttcgcccagccaggaaatccatgcccgattcagaagaggagccagatcttaccaagtgatctgcagagatgaaaaaacgcagatgatataccagcaacatcagtcatggctgcgccctgtgctcagaagcaaccgggtggaatattgctggtgcaacagtggcagggcacagtgccactcagtgcctgtcaaaagttgcagcgagccaaggtgtttcaacgggggcacctgccagcaggccctgtacttctcagatttcgtgtgccagtgccccgaaggatttgctgggaagtgctgtgaaatagataccagggccacgtgctacgaggaccagggcatcagctacaggggcacgtggagcacagcggagagtggcgccgagtgcaccaactggaacagcagcgcgttggccc

SEQ ID NO: 17365 - DNA, 1689 bp, Artificial Sequence
  derived and/or modified sequence
atggatgctatgaagcggggcctgtgttgcgtgctgctgttatgtggtgccgtgttcgttagtccctcgcaggagattcacgccaggttccggagaggggccagaagctaccaggtgatttgccgcgatgagaagactcagatgatctaccagcaacatcaaagctggctccgaccagtcttgcgttctaaccgcgtcgaatattgttggtgcaattcaggaagagcacagtgtcatagtgtccccgtaaagagttgtagcgagcctcggtgtttcaacgggggcacttgccagcaggctttgtatttctctgattttgtgtgccagtgcccggaaggattcgcagggaaatgctgtgagatagacaccagagcgacgtgctatgaagatcagggcatctcatatcgcggcacttggtctactgccgagtccggggccgagtgcacaaactggaacagctccgctctggcccaaaagccttatagtggacggaggccagacgcaatccgactgggcctggggaaccacaactattgtcgaaaccccgatagagattctaaaccctggtgctacgtttttaaggccggtaagtattccagcgaattctgcagcacccccgcctgtagtgagggcaactctgactgctatttcgggaatggctctgcctaccgcggcactcattctttgacagagagcggagcttcatgtttgccctggaattctatgattctcattggcaaggtgtacacagctcaaaatccttccgcccaggccctaggtctgggcaagcataactactgccgcaacccagatggagacgcaaagccttggtgccatgtgctgaagaatcgacgactcacctgggaatactgtgatgtgcccagttgctcaacctgcggcttgaggcaatactcacagccccagtttcgaataaaaggcggactgtttgccgatatagccagtcatccatggcaggcggccatcttcgctaagcaccggcgctctcctggggagaggtttctgtgtggcgggatccttataagcagctgttggatactcagcgctgcccactgtttccaggagagatttcccccacaccatctgaccgtaattctggggcgtacctatcgggtggtccctggggaggaggagcagaaatttgaagtagagaaatacatagttcacaaagagtttgatgatgatacttacgacaatgacatcgcactcctccagttgaaaagcgactcgtcccggtgcgcccaggaatcgagcgtggtgagaacggtatgtttacctcccgccgacttacagctgccagattggaccgagtgcgagctatctggctacggcaagcacgaagctttgtccccattttattccgagcgcctgaaggaggcccacgtaagactgtacccttcatcccgctgcacatcacagcacctgctaaatcgcaccgtaacagacaatatgctgtgcgcaggcgatacccgctctggcggcccacaggcaaacctccacgacgcctgtcagggtgattccggcggtccgctcgtttgcttaaacgacggacgcatgacattggttgggatcatttcttggggcctaggctgcggccaaaaagacgtgccaggtgtgtatactaaagtgacgaattacctcgattggattcgggataatatgcgcccatag

SEQ ID NO: 17366 - DNA, 1689 bp, Artificial Sequence
  derived and/or modified sequence
atggacgccatgaagcggggcctgtgctgcgtgctgctgctgtgcggggccgtcttcgtaagcccctcccaggagattcacgccaggtttcgcagaggagcccgaagctatcaggtaatatgcagagacgagaagacccagatgatataccagcaacaccaatcctggctgcgtcccgtcctgagatctaatcgggtggaatattgctggtgtaactcggggcgagcccaatgtcattccgtgccagttaaatcatgttctgaacctaggtgttttaatggcggaacttgccagcaggccctttactttagcgactttgtgtgtcagtgtcccgagggatttgcgggtaagtgctgcgaaatcgataccagagcgacttgttacgaagatcaagggatttcgtatcgggggacgtggtctacagccgagagcggcgctgagtgcactaattggaactccagcgccctagcgcagaagccatatagcgggcgaaggccggatgctattcgcctggggttaggaaaccataactattgtcggaaccccgaccgcgattccaaaccttggtgttacgtcttcaaagccgggaaatatagttccgagttttgctccaccccggcatgctcagagggaaacagtgactgttattttggcaatgggtctgcctatcgcggaacccattctttgactgagtccggagcgtcctgcctgccatggaattcgatgattctcattggaaaagtatacacagcccaaaatccaagcgcccaggctctggggctcggaaaacataactattgccgcaaccctgatggcgacgcaaagccttggtgccatgttctcaagaatagacggcttacatgggagtactgtgacgtgccctcgtgttcaacttgtggcctgaggcaatactcccagcctcagtttcggatcaagggcggcctatttgctgatatcgcaagccacccatggcaggctgctatattcgctaagcacagacggtctccgggcgagagattcttatgcggcggaatactgatttcttcttgttggatactgagtgccgcacactgttttcaggagagattccctccccaccatctcactgtgattctcgggcggacctatcgagtggttcccggagaggaggagcagaagttcgaggtggaaaagtatatagttcataaggaattcgacgacgatacctacgataacgacattgccctgctacagctcaagagcgattcctctaggtgtgcacaagaaagcagcgtggtcagaacggtgtgtttacctcccgcagacctgcagctgcccgattggacagagtgcgagctaagtggctatggaaagcatgaggctctgagtcccttctactcagagcgtctgaaggaggctcacgtgcgactctacccaagttctagatgtacgtcccagcatcttttgaatcgaaccgttacagataacatgttgtgcgccggggataccagaagcggggggcctcaagccaatctacacgacgcctgccaaggcgacagcgggggcccactcgtttgcctgaacgatggaagaatgaccttggtgggcattatttcttggggcttgggatgtggtcagaaagacgtccctggagtgtatactaaagtgaccaattacctcgactggatcagggataacatgcgcccatag

SEQ ID NO: 17367 - DNA, 1689 bp, Artificial Sequence
  derived and/or modified sequence
atggacgctatgaagagagggctgtgctgtgttttacttctatgtggcgcagtctttgtgtccccaagccaggagatccacgctcggttccggaggggggctaggagctatcaggtcatctgccgggatgagaaaactcaaatgatttatcagcagcatcaatcttggcttagacccgtcttgaggagcaatagagtggaatactgttggtgtaacagtggtcgcgctcagtgccattccgttcctgtaaagtcctgtagtgaaccaagatgcttcaacggcggaacttgtcagcaggccctgtacttctcggattttgtgtgccagtgccctgaaggatttgcagggaagtgttgcgaaattgacacaagagccacgtgttatgaggatcaggggatctcctaccggggaacatggtccacggccgagagcggggctgagtgtaccaattggaactcctccgcactagctcagaaaccatactctgggagaagaccagatgccataagactcggcctgggaaaccataattactgtaggaatccagacagggactcaaaaccctggtgctacgtgtttaaggctggcaagtatagctccgagttctgtagtacccctgcatgcagcgagggcaatagcgactgttatttcgggaacggatcagcttatcgcggaactcactccctcacagagtcaggtgcatcttgtttaccttggaactctatgattctgatcggcaaggtttatacagcacagaatcccagtgcgcaggctcttgggctagggaaacacaattactgcaggaaccccgacggcgatgctaaaccttggtgccatgtgttgaagaacaggagattgacctgggaatattgcgacgtaccaagttgctctacctgtggactcagacaatacagccaaccccaatttcgtatcaaaggtggtttgttcgccgacatcgcttcacatccttggcaggccgctattttcgctaaacaccggcgatctcctggcgagcgctttctttgcggaggtattctcataagtagttgctggattctttcagctgctcattgcttccaggaacggtttcctccccatcacttgaccgtaattttgggcagaacataccgggtggtacctggagaggaagaacagaagttcgaggtagagaagtacatagtgcataaagagttcgatgatgacacttatgataatgatattgcattgctccaactgaaatcagatagcagtagatgtgcgcaggagtcttcagtggtgcgcaccgtttgcctgccacccgctgacctccagttacctgattggacggagtgtgagctttcaggatacgggaagcacgaagcgcttagccccttctattcagagcggttgaaagaagcacatgtccgtctttacccaagctctcgatgtacgtcacaacacctcttgaaccgaacagttacagacaacatgctgtgcgcaggagatacccggtccgggggtcctcaggccaacttacatgatgcctgtcagggcgacagcgggggacccctggtgtgtctcaacgacggcaggatgacccttgtcggtattatttcatggggcctgggatgcgggcagaaggatgtgcccggtgtgtacaccaaggtgactaactacctggactggatccgtgacaacatgcggccatag

SEQ ID NO: 17368 - DNA, 1689 bp, Artificial Sequence
  derived and/or modified sequence
atggacgccatgaaaagaggcctatgctgtgtgctgctgctctgcggggcagtctttgtgtcaccatctcaggagatccacgctcggttcagaagaggagcaaggagctaccaagtaatctgtagggacgagaaaactcaaatgatctatcaacagcaccagtcttggctacgccccgtgctgagatcaaatagggttgagtactgctggtgtaattctgggcgtgcccaatgtcatagtgttcctgtaaagagttgcagtgaaccccggtgtttcaatggaggcacctgccaacaagcgctctacttcagtgattttgtgtgccagtgtccagaagggttcgcaggtaaatgctgcgagatcgacacacgggctacctgttatgaggaccaaggcataagctaccgcgggacttggtcaactgcagagtcaggcgctgagtgtacgaactggaactctagcgccctggcccagaagccttacagcggtcggcggcccgatgccatccgcctgggacttggaaaccacaactactgtcggaatccagaccgggatagtaagccttggtgctatgtatttaaagcaggcaaatactcaagcgaattttgcagtaccccagcatgctcggaaggtaatagcgattgttattttggcaatggcagtgcctaccgtggaacccattccctgaccgaaagcggcgcttcctgcctcccttggaactccatgattctgatcggaaaagtctatactgcgcagaatccttcagcccaggccttagggctcggtaagcataattactgtagaaatcccgatggcgatgccaaaccgtggtgccacgttctcaaaaatcgtagacttacgtgggaatactgcgatgtgccaagctgcagcacatgtggactgcgtcaatacagccagcctcagttcagaattaaaggtggcctgttcgccgatattgccagtcatccttggcaggccgccatcttcgcaaaacaccgcaggagcccaggggagagattcttgtgtggcggaattctaatttccagttgctggattctgtccgccgcccactgtttccaagagcgattcccgccgcaccatctgaccgtaattctgggcagaacttacagagtagtgcctggagaggaggagcagaagttcgaggtggaaaagtacatcgtgcataaagaattcgacgacgacacatacgacaacgacattgctcttctgcagctcaagtctgattcttcacggtgcgcccaggaaagtagcgtggttcgtacagtgtgcttgcccccagctgacttgcagctcccagattggactgagtgtgaactctccggctacggcaaacatgaggcattatcccccttttactccgaacgtctgaaagaagcccatgtgaggctatacccatcttcacgctgtacaagccaacacctgctgaatcggacggtgacagataacatgctgtgtgcaggcgacacacggtccggcggacctcaagctaacctccacgacgcctgtcagggcgactccggcgggcccctcgtgtgcctgaatgacggcagaatgacactggtgggcattattagctggggtctgggctgtgggcagaaggacgttcctggtgtttacactaaagtgacaaactacttagactggatcagagataatatgaggccgtag

SEQ ID NO: 17369 - DNA, 1689 bp, Artificial Sequence
  derived and/or modified sequence
atggacgccatgaaacgaggcttatgttgcgttctcctattgtgcggtgccgtgtttgtgagcccatcccaagagattcacgccagatttagacgtggcgcccgatcctaccaggtgatctgcagagacgaaaaaacccagatgatctaccaacaacaccagagctggctgagacccgtgctccggagcaaccgggtggagtactgttggtgcaattccgggagggcgcagtgccactcagttcccgtcaagtcgtgttcggagccacgatgttttaatggagggacatgtcagcaagccttgtacttctccgacttcgtttgccaatgtcctgaaggcttcgcaggaaagtgctgcgagattgacacccgtgccacatgctatgaggatcaagggatctcctaccggggcacctggtctacagcagagtctggagcagaatgcaccaattggaactctagcgcactcgctcagaaaccctactctggcagaagacccgacgcaattcgacttggcctgggcaatcataactactgtagaaatcctgatagggattcaaagccttggtgctacgtttttaaagctggtaagtatagctctgagttctgctctacacctgcctgctcagagggcaattccgattgttacttcgggaatgggtccgcatacagaggcacacatagtcttactgaatccggtgctagctgtcttccttggaatagcatgatccttattggtaaagtatacaccgcacaaaacccaagcgcacaggctttagggctcgggaagcacaactactgtcgaaaccctgacggcgacgcgaaaccttggtgccacgtgctcaagaatcggcgcctgacttgggagtactgcgatgtacccagctgctcaacatgtgggttacggcaatattcgcagcctcaattccgtattaaggggggtttgttcgctgatatcgcttctcacccttggcaggctgccatattcgccaaacaccgacggtccccaggagaaaggttcttgtgtggagggatcctgattagtagttgttggattctgtctgccgctcattgcttccaagaacgctttccacctcaccatcttactgtgatcctaggaaggacgtatcgagtagtgcctggagaagaagaacagaaattcgaggtggaaaagtatatcgtccataaagagtttgatgacgatacctacgacaacgacattgcactgttacagctgaaatctgattcatctcgctgtgcccaggagtctagcgtggtacgaacagtatgtttacctcctgccgacctgcagctgccagattggactgagtgcgaactaagcggctatggaaaacacgaagccctgtcacccttctactcagagcgccttaaggaagcacacgtaaggctctatccctcctctcgctgtacaagccagcaccttcttaaccgaaccgtgacggataacatgctttgcgccggtgacacaagatctgggggaccacaggcaaaccttcatgacgcttgtcagggcgacagtggcggccccttagtttgcttgaatgatggaagaatgacacttgtggggattataagttggggtcttggttgcggccagaaggatgtcccaggcgtgtacactaaggtgactaactaccttgactggattcgtgataatatgcggccttag

SEQ ID NO: 17370 - RNA, 1832 nt, Artificial Sequence
  derived and/or modified sequence
gggaaauaagagagaaaagaagaguaagaagaaauauaagagccaccauggaugccaugaaacggggguuguguugcguacuucuuuugugcggagcgguguucguguccccgucgcaagagauccacgcgcgauucagaaggggugcgcggagcuaccaggucaucugccgagaugagaaaacucagaugaucuaccaacagcaucaguccuggcugcggccuguacugcgcuccaaccgaguggaauacugcugguguaauagcggcagggcccagugccauucaguaccgguaaagucgugcucggaaccgcgcugcuuuaauggcgggacaugucagcaggcgcuuuacuucuccgauuucgugugucagugcccagaaggguucgcgggcaaaugcugcgaaaucgacacacgggcgacguguuaugaagaucagggaauuagcuaccgggguacguggucgacggccgagucgggggcagaguguaccaacuggaacagcucggcgcuggcgcagaagcccuauucgggacgaaggccggacgccaucagauugggacuuggaaaucacaacuacugucgcaacccugacagagacucaaaacccugguguuaugucuuuaaggcggggaaauacucaucggaguucugcucgacccccgcaugcucagaggguaacucggauugcuauuuuggaaaugguuccgccuaccgcggaacgcacuccuugacugaaucgggugccagcugucugcccuggaacucaaugauccugaucggaaaaguguacaccgcgcagaacccaagcgcacaggcacuuggacucgguaaacacaauuacugccgcaaucccgacggggaugcgaagcccuggugucacgucuugaagaauagaaggcucacgugggaguauugugacguccccagcugcucaacgugugggcucaggcaguauucacagccgcaguuccggaucaaggguggacuuuuugcagacaucgcaucgcaccccuggcaggcugccaucuuugcgaagcaucgacggagcccgggagagcgcuucuuguguggcgggauucucauuucaucaugcuggauucucucggcggcucacugcuuucaagaacgauuucccccgcaccauuugacggucauucucgggagaacguaccgcguagugccgggagaggaagaacaaaaguucgagguggagaaguauaucgugcauaaagaguucgacgacgacacguaugacaacgauaucgcucugcuccaguugaagagcgauucaucgcggugugcacaagagucauccguagucagaacgguaugccugcccccugcugacuugcagcugccagauuggacagaaugcgagcuuucgggauauggaaagcaugaagccuugagcccguucuauucggagcgguugaaagaggcccaugugcgccuguacccaucgucacgcuguacaucccagcaccuucucaaccggaccgugaccgacaacaugcuuugugcaggggauacaaggagcgggggaccccaggcgaauuugcacgaugccugucaaggugauucggguggcccgcuugucugccugaacgaugggagaaugacacuggugggaaucauuucguggggguuggggugugggcaaaaggaugucccgggugucuacacuaaagugacaaauuaccuugacuggauuagagacaauaugaggccaugauaagcugccuucugcggggcuugccuucuggccaugcccuucuucucucccuugcaccuguaccucuuggucuuugaauaaagccugaguaggaag

SEQ ID NO: 17371 - RNA, 882 nt, Artificial Sequence
  derived and/or modified sequence
auggacgcuaugaaacguggucucuguugugucuugcugcugugcggggccgucuucgucagcccuucucaggaaauacaugccagguuccgccgcggagcgcggucuuaucagguaaucugccgcgacgagaagacucagaugauuuaccagcagcaucaaucguggcucagacccguccuucggagcaaccgcguagaauauuguuggugcaauagcggccgggcacaaugucauucuguucccgugaaaucauguagcgagccgagaugcuucaacggcggcacaugucagcaggcccucuauuucucggacuuuguuugccaaugucccgagggcuucgccggcaaguguugugagaucgacacgagagcgacaugcuaugaggaccagggaaucucauauagagggacguggucaacugcagaaucaggcgcugaaugcacaaacuggaacuccucagcacucgcccaaaaacccuauucagggaggaggccagacgcuaucagacucggacuggggaaccauaacuauugccguaauccagaucgcgacucaaagcccugguguuacguguucaaggcagggaaguacagcagcgaguuuugcaguacccccgcuugcagugagggaaauagugauuguuacuuugggaaugguucugcauacagggguacccauagccuuacugaauccggagccucaugucuaccuuggaauuccaugauccugauaggaaaaguuuauaccgcucaaaaccccuccgcacaggcacugggcuuaggcaaacacaacuacugucgguguagaacaggucgaagcgucuccucgccggcaaccgcuucaaugcgccccugccugcucuccauuagaucuggcuag

SEQ ID NO: 17372 - RNA, 1689 nt, Artificial Sequence
  derived and/or modified sequence
auggaugcuaugaaaagaggacugugcugcguucugcugcuauguggggcagucuucguuucaccuucacaggagauacaugcacgcuucaggaggggagcucgcaguuaccaagucauauguagagacgagaagacucagaugauauaccagcagcaccaauccuggcuaagaccaguccuucggagcaacagaguggaauauuguuggugcaauucuggccgggcccagugucacuccguccccgucaaaucuugcagcgagcccagaugcuuuaauggcgguacaugucaacaggcccuguauuuuuccgauuuuguuugccaaugcccagaaggcuucgcaggcaagugcugugagaucgacacacgugcaacauguuacgaggaccaaggcaucaguuaucguggaacauggagcacagcugaaucuggugccgaauguaccaauuggaacucuagugcucuggcucagaaacccuacagcgggcgcaggccugaugcuauucggcuuggcuuaggaaaucacaauuacugccggaacccugaucgagacucaaagccuuggugcuacguuuucaaggcagguaaguauuccagcgaguuuugcucaacucccgcuugcuccgagggcaacucugauugcuauuucggaaacggguccgcauauaggggcacccacucuuugaccgaguccggcgccagcugccuccccuggaauagcaugauacucauugggaagguauacaccgcccagaacccuagcgcgcaggcccuuggucuggggaaacacaauuauugucgaaauccugacggagacgcaaaacccuggugccacgugcugaagaaccguaggcuuacaugggaauauugugacguuccaaguugcucuacaugcgguuugagacaauauucacagccucaguucagaaucaaaggggggcuauucgcagauaucgcuagccacccauggcaggcugcaaucuuugccaaacaucgcagaucuccuggcgaacgcuuucuuugcgguggcauccugaucucuaguugcuggaucuugagcgcagcccauuguuuccaggaacgguuccccccccaccaucugacugugauccugggacgcaccuauagagucguucccggcgaggaggagcagaaauucgaaguagagaaauacaucgugcauaaggaguucgaugacgacacauaugacaaugauaucgcacugcugcagcuaaagagugauuccagcaggugugcccaagaaaguucaguaguuagaacgguaugucuuccuccagccgaccugcaauuaccagacuggaccgaaugcgaacuuucaggauacgguaaacacgaagcucugucgcccuucuacucagaaaggcugaaagaagcccacguccgccuuuacccuucuaguagaugcacaagccaacaucugcugaaccgcacggugaccgauaauaugcugugcgcaggcgauacaagauccggugggccccaggccaaucugcaugaugcuugccagggagacucaggaggaccucuggugugucugaacgacggacgcaugacacuggugggaaucauuucaugggggcugggguguggacagaaggaugugcccggaguguauacgaagguuacaaacuaucucgauuggaucagagacaauaugcggccuuag

SEQ ID NO: 17373 - RNA, 1500 nt, Artificial Sequence
  derived and/or modified sequence
auggacgcaaugaagcguggccucugcugcguucugcuccugugcggcgcuguuuucguuagcccaucgcaggagauccaugcucgcuuucgcagaggcgccagguccuaccaagugauuugucgagaugagaaaacgcagaugaucuaccagcaacaucagaguugguugaggcccguccuacgcagcaauagagucgaauacugcugguguaauucagggagagcccaaugccacucugugccaguaaagucguguucugagccaagguguuuuaacggugguacaugccagcaggcucuguauuuuuccgacuuuguaugccaauguccggaaggguuugccggaaaaugcugcgagaucgacucaaagccaugguguuacguauucaaagcugggaaauauucaagcgaguucugcucuacucccgcuuguucggaggguaacuccgauuguuauuuuggcaauggaagcgcauauagagggacacauucucugaccgagagcggcgcgucuuguuugccguggaauucaaugauccugauuggcaagguguacacagcacaaaacccgagcgcccaggcccucggauuaggcaagcacaacuacuguaggaacccagacggggacgcaaaaccuuggugucacgugcucaaaaaccgcagauugacaugggaguacugcgaugugccaaguuguucaacaugcggacugaggcaguacucacagccgcaguuuagaaucaaaggcggacuauuugcagauauugccucccauccuuggcaggcggcaaucuucgcuaagcaucgacgcagcccuggugagcgguuucugugugguggcauucuaaucagcucuuguuggauacucucugcagcccauuguuuccaggaacguuuucccccccaucaucugacggucauucugggaagaacguaucgggucguccccggcgaagaagagcaaaaguucgagguggaaaaauacauuguucacaaggaguucgaugacgacacuuaugacaacgauaucgcucuucuucaguuaaaaagugacucuaguagaugcgcucaggagagcagcguugucagaaccguuugccugcccccagccgaccuacaacuacccgauuggaccgagugcgaacuuucaggguauggcaagcaugaggcucugaguccauuuuacucugagagguugaaagaagcccauguuagacucuaucccaguucacgguguacuucacagcaucugcuuaauaggacagugacagacaauaugcucugugccggagacacccggucagguggaccccaagccaacuugcacgaugccugucagggagauucuggcggaccccucgugugccugaaugaugguaggaugacccuggucgguauuaucuccuggggccucggaugcggccaaaaagacgugccaggugucuauacaaaaguaacaaauuaucuggauuggauccgggauaauaugcgcccuuag

SEQ ID NO: 17374 - RNA, 537 nt, Artificial Sequence
  derived and/or modified sequence
auggacgcgaugaagagaggacuuuguuguguccuccucuuguguggcgcuguuuuuguuaguccaagccaggaaauacaugccagguuucgccgcggugcccgaucauaucaaguaauuugccgggacgaaaaaacucagaugauauaucagcaacaucaguccuggcugcgcccagucuuacgauccaaucgcguagaguacugcugguguaauaguggccgugcccagugucacuccgugccugugaaauccuguuccgaaccaagauguuucaacggcgguaccugccaacaggcucuuuauuuuagcgacuuugucugccaguguccagaaggauuugcuggcaagugcugcgaaaucgacacucgcgcuaccuguuaugaggaccaaggaauuaguuaucgaggaaccuggucaacagcugagagcggcgccgaauguacaaauuggaauagcagcgcucuugcccagaaaccuuacaguggccgccggccagaugccauccgguuaggauuagggaaccacaacuacuag

SEQ ID NO: 17375 - RNA, 474 nt, Artificial Sequence
  derived and/or modified sequence
auggaugcaaugaagcgaggguuguguugcguuuuacuccucuguggagcagucuuugucagcccaagccaggagauccacgcuagguuccgaagaggcgcaaggucuuaucaggugauuugcagagacgagaagacacagaugaucuaccaacaacaucaaucuugguuacgaccugugcuccgcagcaaucggguggaguauugcugguguaauucugggagggcacagugccauucugugccuguaaagucaugcagcgagccuagauguuuuaacggagggacuugccaacaggcccuguacuuuucagacuuugugugccaguguccagaaggcuuugcagguaaauguugcgagauugauacucgagcuaccuguuacgaggaucaaggcaucucauaccgugguacgugguccaccgcagaaucaggggcagaguguacaaauuggaacucaucagcacuugcuuag

SEQ ID NO: 17376 - RNA, 882 nt, Artificial Sequence
  derived and/or modified sequence
auggacgccaugaaaagaggcuuguguugugugcugcugcuuuguggcgccgucuuuguaucacccagccaggagauccacgccagguuucgaaggggcgcaagaucauaccaagugauaugucgugacgaaaagacgcagaugauuuaucagcagcaucaaucuuggcugcgcccuguuuuaagaucuaaucguguugaguauugcuggugcaauagcgguagagcucagugucacuccguccccgucaaauccuguagcgaaccaagguguuucaacgguggcaccugccaacaggcucuguacuucuccgacuuugucugucagugcccugagggcuuugccggcaagugcugugaaaucgacacuagagccacuuguuacgaagaccagggaauuucuuaucguggcacauggucaacugccgaaucuggcgcagaauguacuaauuggaauaguucugcucuugcucaaaaacccuauagcggccgacguccagacgcuauccgacucgggcuagguaaucacaacuauuguagaaaccccgacagagauaguaaacccugguguuauguguucaaggcaggcaaguacucaucugaguuuugcaguacccccgcuugcagugagggaaauagugauuguuacuuugggaaugguucugcauacagggguacccauagccuuacugaauccggagccucaugucuaccuuggaauuccaugauccugauaggaaaaguuuauaccgcucaaaaccccuccgcacaggcacugggcuuaggcaaacacaacuacugucgguguagaacaggucgaagcgucuccucgccggcaaccgcuucaaugcgccccugccugcucuccauuagaucuggcuag

SEQ ID NO: 17377 - RNA, 1689 nt, Artificial Sequence
  derived and/or modified sequence
auggaugcuaugaagagaggccucugcuguguucuucuucucugcggcgccguguucguguccccaagccaggagauucaugcucgauuucgucggggcgcaaggucauaucaaguaauaugucgggacgagaagacccagaugauauaucagcagcaccaguccuggcugcgucccguauugaggucaaaucgaguggaauauuguuggugcaacucagguagggcccagugccauagcgugcccgugaaaucuugcuccgaacccagaugcuuuaauggaggaacuugucaacaagcauuguauuuuagugauuucgugugucagugucccgaaggcuucgccggcaaaugcugcgagauugauacaagagcaacuugcuacgaagaccaggguauuagcuaucgaggaacuugguccacugccgagaguggagcugaauguaccaacuggaacuccuccgcccuugcccaaaaaccuuacagcgggaggaggccagacgcaauuagacuuggacucggaaaucauaacuauugucgcaacccagaccgcgauuccaagccgugguguuauguuuuuaaggcaggaaaauauaguagcgaauuuugcucaacuccggccugcucagagggaaauagcgauuguuacuuuggcaacggaagcgcauacagagguacucauucacugaccgagucuggggccucaugccuucccuggaauucuaugauccuuauugguaagguguacacagcucagaauccauccgcgcaggcucugggacuugguaagcauaauuacugccgaaacccugauggagaugccaaaccuuggugccauguuuugaaaaauagacggcuuacgugggaauauugugaugugccuuccuguucgaccugcggucuuagacaauacucucagccucaguuuagaaucaaaggcggccuguuugcagauauugccucccacccuuggcaggccgcaauuuuugcuaagcaccggagaagucccggcgaaagauuccucugugggggaauacucauuuccuccuguuggauacucagcgcugcucauuguuuccaggaaagguucccuccgcaccacuuaacagucauucucggacgaaccuacagagucguuccaggcgaagaagaacagaaguucgagguggagaaauauaucgugcauaaagaauucgaugaugauacauaugacaacgauauugcccucuuacaacuuaagucugacuccucuaggugcgcccaggagagcucugucguuagaacuguuugccugccuccggcugaccugcagcugccagauuggacagaaugcgaacucucggguuaugguaagcacgaagcgcuuucaccauucuauagcgagcgguugaaagaggcgcacguccguuuguaccccaguucaagauguaccagccagcauuuacucaaccguacugugaccgauaacaugcucugcgcuggagauacaagaagcggaggcccacaagcgaaccuccaugacgcuugucagggugacucaggcggaccccuugugugucugaacgacggcagaaugaccuuagugggcauuauuagcuggggacugggauguggccagaaggacgugcccggcguuuauacaaaggugacaaacuauuuggauuggaucagagauaacaugaggccauag

SEQ ID NO: 17378 - RNA, 1500 nt, Artificial Sequence
  derived and/or modified sequence
auggacgcuaugaaacgcggacugugcuguguauuacugcuaugcggcgcugucuucgugagcccuucacaagagauccacgcccgauucagacgcggugccaggaguuaccaggugaucugcagggaugagaaaacgcaaaugaucuaucagcagcaccagucauggcugagacccgugcuuagaucaaauagagucgaguauuguuggugcaauucaggccgagcccagugucacagcguaccaguuaagaguugcuccgagccucgcugcuucaauggcggaaccugccagcaggccuuauacuucagcgauuuuguaugucaaugcccagagggauuugccggcaagugcugugagaucgauaguaagcccuggugcuauguguucaaagccggcaaauauucuuccgaauuuugcucaacacccgccugcagcgagggcaauagugacuguuacuuuggaaacgguucagcguauagggggacgcauagccugaccgaaucuggagccucuugucugccuuggaacagcaugauccucaucggcaaggucuauacagcucagaaccccucugcccaagcucucggccucggaaaacauaauuacuguagaaaucccgauggcgacgccaaaccuuggugccauguguugaagaacaggagacucacaugggaguacugugacgucccgagcuguucuaccuguggacuaagacaauauucucaaccccaauuucgcauaaagggcggacuguuugccgauaucgcuucucauccuuggcaggcugcaaucuucgcaaaacacagacguagcccgggcgagcgcuuucucuguggggguauccuuauuucuucuuguuggauacuuucugcagcacauugcuuucaggagcgguuuccuccccaucaucugacggugauccuaggccgaacauaccgcgugguacccggggaagaagagcagaaauuugaagucgaaaaauacauagugcacaaagaauucgacgacgacaccuacgacaacgauauugcacuuuuacaacugaagucagacagcucccgaugugcgcaagagucuucugucguccggacaguaugccucccacccgccgaccugcaguuacccgauuggacugaaugugagcucucaggcuacggcaaacacgaggcccugagccccuucuacagcgaaagacuuaaggaagcgcacgugcgccuguacccaucuucccgguguaccagucaacaucuacugaauaggaccgugaccgacaacauguuaugcgccggcgacacacgaucugguggcccacaagcuaaccuccaugaugcaugucagggcgauagcgggggacccuuaguuugucugaacgaugggagaaugacucuaguugguaucauuucuuggggacuagggugcggacagaaggaugugccggggguuuacaccaaaguaacgaacuaccucgauuggauccgagacaacaugcggccauag

SEQ ID NO: 17379 - RNA, 537 nt, Artificial Sequence
  derived and/or modified sequence
auggaugccaugaagcgaggccucuguugugugcuucugcuuuguggggcaguguuugucucaccaucacaggaaauucacgcucguuuccggaggggugcgagauccuaccaggucaucugucgggacgaaaaaacccaaaugauauaccaacagcaucaauccuggcucagaccuguucugcggucaaaccgcgucgaguauugcuggugcaacucuggccgcgcucaaugucacucugucccuguuaaaagcuguucggagccccgguguuucaauggcggcaccugucaacaagcacuguauuucuccgacuucgucugccagugucccgaaggauuugcagggaaauguugcgaaaucgacaccagagccacaugcuaugaggaucaagguauuagcuaucgaggaacauggucuacagccgagaguggcgcugaaugcaccaauuggaacucuucugcccucgcucagaaaccguauuccggccgccgcccugaugcaauccgcuuaggacugggcaaccauaacuauuag

SEQ ID NO: 17380 - RNA, 474 nt, Artificial Sequence
  derived and/or modified sequence
auggaugcaaugaagagggggcuguguuguguauuacuccucuguggcgccgucuucguuucccccagucaggagauacacgcacgcuucagacgcggugcacguaguuaccaagugauuugcagggacgagaagacacagaugauauaccaacaacaccagucuuggcucaggccuguccuacgguccaaucgggucgaguauugcuggugcaauucaggucgcgcucagugccauucaguuccagugaagaguuguagugagccaagguguuuuaauggcgggacuugucagcaggcucuauacuuuuccgauuuugugugccaguguccggagggcuucgcaggaaaaugcugcgagauugacaccagagcuacauguuacgaggaucaaggcauaucauaccgcgguacauggucuaccgccgaauccggugcugaaugcacuaacuggaacucauccgcccucgcuuag

SEQ ID NO: 17381 - protein, 1194 aa, Artificial Sequence
  derived and/or modified sequence
MAKPYEFNWQKEVPSFLQEGAVFDRYEEESFVFEPNCLFKVDEFGFFLTWRSEGKEGQVLECSLINSIRSGAIPKDPKILAALEAVGKSENDLEGRIVCVCSGTDLVNISFTYMVAENPEVTKQWVEGLRSIIHNFRANNVSPMTCLKKHWMKLAFMTNTNGKIPVRSITRTFASGKTEKVIFQALKELGLPSGKNDEIEPTAFSYEKFYELTQKICPRTDIEDLFKKINGDKTDYLTVDQLVSFLNEHQRDPRLNEILFPFYDAKRAMQIIEMYEPDEDLKKKGLISSDGFCRYLMSDENAPVFLDRLELYQEMDHPLAHYFISSSHNTYLTGRQFGGKSSVEMYRQVLLAGCRCVELDCWDGKGEDQEPIITHGKAMCTDILFKDVIQAIKETAFVTSEYPVILSFENHCSKYQQYKMSKYCEDLFGDLLLKQALESHPLEPGRALPSPNDLKRKILIKNKRLKPEVEKKQLEALRSMMEAGESASPANILEDDNEEEIESADQEEEAHPEFKFGNELSADDLGHKEAVANSVKKGLVTVEDEQAWMASYKYVGATTNIHPYLSTMINYAQPVKFQGFHVAEERNIHYNMSSFNESVGLGYLKTHAIEFVNYNKRQMSRIYPKGGRVDSSNYMPQIFWNAGCQMVSLNYQTPDLAMQLNQGKFEYNGSCGYLLKPDFMRRPDRTFDPFSETPVDGVIAATCSVQVISGQFLSDKKIGTYVEVDMYGLPTDTIRKEFRTRMVMNNGLNPVYNEESFVFRKVILPDLAVLRIAVYDDNNKLIGQRILPLDGLQAGYRHISLRNEGNKPLSLPTIFCNIVLKTYVPDGFGDIVDALSDPKKFLSITEKRADQMRAMGIETSDIADVPSDTSKNDKKGKANTAKANVTPQSSSELRPTTTAALASGVEAKKGIELIPQVRIEDLKQMKAYLKHLKKQQKELNSLKKKHAKEHSTMQKLHCTQVDKIVAQYDKEKSTHEKILEKAMKKKGGSNCLEMKKETEIKIQTLTSDHKSKVKEIVAQHTKEWSEMINTHSAEEQEIRDLHLSQQCELLKKLLINAHEQQTQQLKLSHDRESKEMRAHQAKISMENSKAISQDKSIKNKAERERRVRELNSSNTKKFLEERKRLAMKQSKEMDQLKKVQLEHLEFLEKQNEQLLKSCHAVSQTQGEGDAADGEIGSRDGPQTSNSSMKLQNAN

SEQ ID NO: 17382 - protein, 113 aa, Artificial Sequence
  derived and/or modified sequence
MAKPYEFNWQKEVPSFLQEGAVFDRYEEESFVFEPNCLFKVDEFGFFLTWRSEGKEGQVLECSLINSIRSGAIPKDPKILAALEAVGKSENDLEGRIVCVCSGTDLVNISFTY

SEQ ID NO: 17383 - DNA, 3585 bp, Artificial Sequence
  derived and/or modified sequence
atggctaagccttacgagttcaactggcaaaaggaagtaccgtccttcctgcaggagggagccgtcttcgacagatacgaagaagaaagtttcgtgtttgagcctaactgcctcttcaaggtggacgagttcggctttttcctcacatggaggtctgagggaaaagaaggtcaagttctggagtgttcccttatcaattcgatcaggtccggggccatcccgaaggatcctaaaatactggccgccctggaggccgtgggcaagagtgagaacgacctggaaggccggatcgtctgcgtctgctccggaactgacctggtgaacatctcattcacttatatggttgctgagaatcccgaggtgacaaaacagtgggtggaggggctcaggtccatcatccataatttcagggcgaacaacgtatcgccaatgacctgcctcaaaaagcattggatgaaacttgctttcatgactaacacgaacggaaaaatccctgttcgcagcataactcgtacgttcgccagcggtaagacagagaaagtcatttttcaggcgctcaaggagctaggactcccgtcgggaaagaatgatgagatcgaacccacagctttctcctacgagaagttctacgagctgacccagaagatatgtcccaggacagacatcgaagacctgtttaaaaagatcaacggagacaaaaccgattatttgacagtggaccaacttgtcagctttctcaacgaacaccaaagagacccccgactcaacgaaattttgttccccttctatgacgccaagcgggcaatgcagataattgagatgtatgagccagacgaagacctgaaaaagaagggactgatatcgtccgacggcttctgtcgatacctgatgtcagatgagaacgcccctgtctttctggacagactggaactgtatcaggaaatggatcatcccctggcccattatttcatcagctcatcacacaatacgtacctcacaggcaggcagttcgggggaaagtcctccgtggagatgtatagacaggtgctgctagccgggtgtagatgtgtggagttggattgttgggatggtaaaggggaggaccaggaacctatcattacccacggcaaagccatgtgtaccgatatcctcttcaaggatgtgatccaggctattaaggagactgcgttcgttacttcggagtacccagtcattctatcctttgaaaaccactgttctaaataccagcaatataagatgagcaagtattgtgaagatctttttggggatctccttctcaaacaggcactggagtcccatcccttggagcccggacgagcattgccatcaccaaacgaccttaagagaaaaatcctgataaagaataaacgcctgaagcccgaggtagagaaaaagcagcttgaggccttgagatcaatgatggaagccggcgaaagcgcttctcctgcgaacattctggaagatgataatgaagaagaaatcgagtccgccgatcaggaggaggaagcccatcctgagtttaagtttggaaatgaactgtctgctgatgacctaggtcacaaagaagccgtggccaactccgtgaaaaagggccttgtcaccgtcgaggacgaacaagcatggatggcaagctacaaatatgttggcgccacgactaacattcatccgtatctttcgaccatgatcaattatgcccagccggttaagtttcagggctttcatgtagccgaagagagaaacatccattacaatatgtcctcatttaacgagagcgtgggcctggggtacttgaaaacacatgccatcgagttcgtgaattacaataaaaggcaaatgagccggatctatccaaaggggggtagagtggactcctctaattatatgccccaaatattttggaatgctggttgtcaaatggtgagcctgaattatcaaactcctgacctggcgatgcagctcaatcaaggcaaattcgagtataacggttcttgcggctacttactcaagcctgactttatgcggagacccgacaggacttttgaccccttctcagagacccctgtggacggagtcatagcagcgacttgttctgtgcaggttatcagtgggcagttcttgagtgacaagaagattggcacctacgtggaggttgacatgtacggcttgcctacagacacaattaggaaagaattccgcacgagaatggtcatgaacaatggtcttaatccagtctataacgaggagagcttcgtgttcaggaaggtgatactccccgaccttgccgttctgcgaatcgcagtgtacgatgataacaataaactcattggccagaggatcctgccgctggacgggctgcaggctgggtaccgacacattagcttacgcaacgaggggaataagccgctgagcctgcccacgattttttgcaatatcgttctcaagacgtatgtccccgacggcttcggcgacatcgtggacgcattatccgaccctaagaaattcctgtccatcacagaaaagcgggctgaccagatgagagcaatgggtatagaaacatccgatattgcggatgtgccaagcgacacttctaaaaatgacaaaaaaggcaaagcaaacactgccaaggctaacgtcaccccccagtcatcatctgaactgcgccctaccacaactgccgctctggcctccggagttgaagctaaaaaagggatcgaattgatcccacaagttaggattgaggacctaaagcagatgaaggcttatttgaagcacctcaaaaaacagcagaaggagcttaactcgctcaagaaaaagcacgccaaggagcatagcactatgcaaaagctccactgcacccaggtggacaaaatcgtcgcccagtatgataaggaaaaaagcacccacgagaagatcttggagaaggcaatgaaaaagaaaggggggagtaactgcctggagatgaagaaggagaccgaaatcaagatccagacccttacgagcgaccataagagcaaggttaaagagattgtggcacagcataccaaagagtggagtgaaatgattaatacccactcagccgaggagcaggaaattagggatctgcatctttcacagcaatgtgagcttctgaagaaactgctcataaacgcccacgagcaacaaacacaacaactgaagctgagccatgatcgggagtccaaagagatgcgggcccaccaagccaagattagcatggagaactccaaagccatatctcaggacaaaagcatcaagaacaaagctgagagagaaaggcgcgttcgtgagttaaattcctccaacacaaagaaattccttgaagagagaaaacgcctggccatgaagcagtctaaagagatggaccaactcaagaaggtacaactcgagcatttggagtttctggaaaaacagaacgagcagttgctgaagagctgccatgcagtatctcaaacccagggggaaggtgatgccgcagatggggagatcgggtcccgagacggacctcagacatctaacagttccatgaagctgcaaaatgctaactag

SEQ ID NO: 17384 - DNA, 3585 bp, Artificial Sequence
  derived and/or modified sequence
atggctaagccctacgaatttaactggcaaaaggaagtgccctctttcctacaggaaggcgcagtctttgaccgctatgaggaggagtcgtttgtgttcgagcctaactgtctatttaaagtggatgagtttggcttttttttaacatggaggtcagagggtaaagaaggccaagtactggaatgctctctgattaacagtattaggtccggggcgatccccaaggaccccaaaatcctcgccgcgctggaagccgtcggcaagtcagagaacgacctggagggacggattgtatgtgtctgttcagggacagacctagtaaatatctcttttacttatatggtcgccgagaaccctgaggtgacaaagcagtgggtggaggggctgcggtccattattcacaatttcagggctaataacgtctctcccatgacatgcctgaagaagcactggatgaagctggctttcatgactaacactaatggcaagattcccgtacgttccataacccggacattcgcgagcggaaaaactgaaaaagttatcttccaagctcttaaggaactggggctgccgtcagggaagaacgatgagatcgagcccaccgccttctcatacgaaaaattctatgagctgacacagaaaatctgcccccgcacagatattgaagatctttttaaaaaaatcaacggcgacaaaactgattatctgactgtggaccagcttgtgtcgttcttaaacgagcatcagcgggaccctagactgaatgaaattctgtttcccttttacgatgctaaacgcgcaatgcaaataatagaaatgtatgagcctgatgaagatctgaaaaaaaaaggactgatttctagcgatggcttctgccgttacctgatgagcgatgagaacgcccctgtcttccttgataggctggaactttatcaagaaatggatcaccctttggcccattactttatctctagctcccataacacttatctcaccgggcggcaattcggaggaaaatcttctgtcgagatgtatcgacaagtgctgttagctggatgtcggtgcgtcgagctggactgttgggatggcaaaggcgaagatcaagagccaatcatcacacacgggaaggcaatgtgtaccgacatcctgttcaaagatgtcattcaggcaattaaggaaaccgcctttgtgacgagcgaatatccggtgatactttcttttgaaaaccattgcagcaagtaccagcagtataagatgagcaagtactgtgaggacttatttggggaccttctgctcaagcaggcactagaaagtcacccattggagcctggacgggccctgccctctcccaatgatcttaaacgtaagatcttaattaaaaacaaacgcctgaagcctgaagtggaaaaaaaacagctcgaagctttgcgctccatgatggaggccggtgagtccgcctctcctgcgaatattctcgaggatgataacgaggaagagattgagagtgcagaccaagaagaagaagcccacccggagtttaagttcggaaacgagctgagcgcagacgaccttggtcataaagaagcagtcgccaatagcgtgaaaaaaggcctagtgaccgtggaggatgagcaggcttggatggcatcctacaagtacgtaggcgcaaccactaacattcacccctacctttctaccatgatcaattatgctcagccggtcaaattccaaggcttccacgtggcagaggaaaggaacatacactataacatgagctcgtttaatgagagcgtgggactgggttatttgaagacacacgcaattgaatttgtgaattataataaacgccagatgagcaggatataccccaaagggggccgggtggatagctccaattacatgccccagattttttggaatgccgggtgccagatggtcagcctgaactatcaaaccccagatctggcgatgcaactgaaccagggcaagtttgaatataatggatcctgtggctatctccttaagcccgacttcatgcgtcgccctgatcggacttttgaccccttcagcgagacacccgtggacggagtgatcgctgccacatgttcagttcaggttataagtggtcagttcctgtccgacaagaaaataggcacctacgtggaggttgacatgtatggcttgcccacagacacgatccgcaaggagtttaggacccggatggtgatgaacaacgggcttaatcccgtgtacaacgaggagagtttcgtgttccgcaaagtaatacttcctgacctggccgtactgagaattgcagtgtatgacgacaataataagttaattggacagaggatcctgccactcgacggactccaagcagggtacaggcacatttctcttagaaacgaaggaaataaacctctgtcactccccacaattttctgtaacattgtactcaagacgtacgtccctgacggtttcggtgacatcgtggacgctctgagcgatcctaaaaagttcctttcaataacagaaaaacgtgcagatcaaatgagagctatgggcatcgaaacatcagacatcgctgacgtgccctccgatactagcaagaacgataagaaggggaaagctaacacagccaaagcaaatgtcactccgcaatcaagctcagaattgcgcccaactaccactgcagccctggcaagtggcgtggaggccaaaaagggtatagagctgattccccaagtgcgtatcgaggacttaaaacaaatgaaagcctacctcaagcacctgaaaaaacagcagaaagagttgaattccctaaaaaaaaagcacgccaaggagcactccaccatgcagaagctgcactgtactcaggttgacaaaatcgttgcccagtatgataaagagaagtcaacccatgaaaagatcctcgagaaggcaatgaaaaagaagggaggatctaattgtcttgagatgaagaaagagacagagatcaagatccagaccctgacctctgatcacaagtcaaaggtcaaggagatcgtcgcgcagcatactaaggagtggtccgagatgattaacacccattcggccgaagagcaggagatccgcgatctccacctcagccagcagtgcgaacttttgaagaagcttctcatcaatgcccacgaacagcagacccagcagcttaaactgtctcatgatcgagaatcaaaggaaatgcgtgcacaccaggccaagatcagcatggaaaacagcaaggccatctcacaggataagtccatcaagaataaggcggagcgggaacgccgtgtgagggaactgaactcgtccaacaccaagaaattcctggaggagcgaaaacgactggcaatgaaacagtcaaaagaaatggaccaactgaagaaggtccaattagaacatctagaattcctggagaagcagaacgagcagctcttaaagagctgtcacgcagtgtcacagacacagggggagggtgacgccgcggacggcgagattggttctcgagacggaccacagactagcaattccagtatgaagctgcaaaacgctaattag

SEQ ID NO: 17385 - DNA, 3585 bp, Artificial Sequence
  derived and/or modified sequence
atggccaagccctatgagttcaactggcagaaggaggtgcccagcttcctgcaggagggcgctgtgtttgacagatatgaggaggagagctttgtgtttgagcccaactgcctcttcaaggtggatgaatttggcttcttcctgacctggaggtctgagggcaaggagggccaggtgctggagtgcagcctcatcaacagcatccgcagcggggccatccccaaggaccccaagatcctggccgccctggaggccgtgggcaagtcagaaaatgacctggagggcagaattgtgtgtgtgtgcagcggcacagacctggtgaacatctccttcacctacatggtggctgaaaatcctgaggtgaccaagcagtgggtggagggcctgcggagcatcatccacaacttccgggccaacaacgtgagccccatgacctgcctgaagaagcactggatgaagctggccttcatgaccaacaccaacgggaagatccctgtgcgcagcatcaccaggacctttgccagcggcaagacagagaaggtgatcttccaggccctgaaggagctgggcctgcccagcggcaagaatgatgaaattgagcccacagccttctcctatgagaagttctatgagctgacccagaagatctgccccaggacagacattgaagatctcttcaagaagatcaacggggacaagacagactacctgactgtggaccagctggtgtccttcctgaatgagcaccagagggacccccggctgaatgagatcctcttccccttctatgatgccaagagggccatgcagatcatcgagatgtatgagccagatgaggacctgaagaagaagggcctcatcagcagtgatggcttctgccgctacctgatgtctgatgaaaatgcccctgtgttcctggaccggctggagctgtaccaggagatggaccaccccctggcccactacttcatcagcagcagccacaacacctacctgaccggccggcagtttggaggcaagagctctgtggagatgtaccggcaggtgctgctggccggctgccgctgtgtggagctggactgctgggatggaaaaggagaggaccaggagcccatcatcacccacggcaaggccatgtgcacagacatcctcttcaaggatgtgatccaggccatcaaggagacagcctttgtgaccagcgagtaccctgtgatcctgagctttgagaaccactgcagcaagtaccagcagtacaagatgagcaagtactgtgaggacctgtttggagacctgctgctgaagcaggccctggagagccaccccctggagcccggccgggccctgcccagccccaatgacctgaagaggaagatcctgatcaagaacaagaggctgaagccagaggtggagaagaagcagctggaggccctgcgctccatgatggaggccggggagagcgccagccctgccaacatcctggaggatgacaatgaggaggagattgaatctgctgaccaggaggaggaggcccaccctgagttcaagtttggaaatgagctgtctgcagatgacctgggccacaaggaggccgtggccaacagcgtgaagaagggcctggtgacagtggaggatgagcaggcctggatggccagctacaagtatgtgggcgccaccaccaacatccacccctacctgagcaccatgatcaactatgcccagcctgtgaagttccagggcttccacgtggccgaggagaggaacatccactacaacatgagcagcttcaatgaatctgtgggcctgggctacctgaagacccacgccattgaatttgtgaactacaacaagaggcagatgagccgcatctaccccaagggcggccgggtggacagcagcaactacatgccccagatcttctggaatgccggctgccagatggtgtccctgaactaccagaccccagacctggccatgcagctgaaccagggcaagtttgagtacaacggcagctgtggctacctgctgaagccagacttcatgagaagaccagacaggacctttgaccccttcagcgagacccctgtggatggagtgattgctgccacctgcagcgtgcaggtgatcagcggccagttcctgagtgacaagaagattggcacctacgtggaggtggacatgtatggcctgcccacagacaccatcaggaaggagttccgcaccaggatggtgatgaacaacggcctgaaccctgtgtacaatgaggagagctttgtgttcaggaaggtgatcctgcctgacctggccgtgctgagaattgctgtgtatgatgacaacaacaagctgattggccagaggatcctgcccctggatggcctgcaggccggctaccgccacatcagcctgagaaatgaaggcaacaagcccctgagcctgcccaccatcttctgcaacatcgtgctgaagacctacgtgcctgatggctttggagacatcgtggatgccctgagtgaccccaagaagttcctgagcatcacagagaagagagctgaccagatgagggccatgggcatcgagaccagtgacattgctgatgtgcccagcgacaccagcaagaatgacaagaagggcaaggccaacacagccaaggccaacgtgaccccccagagcagcagcgagctgcggcccaccaccacagctgccctggccagcggcgtggaggccaagaagggcatcgagctgatcccccaggtgagaattgaggacctgaagcagatgaaggcctacctgaagcacctgaagaagcagcagaaggagctgaacagcctgaagaagaagcacgccaaggagcacagcaccatgcagaagctgcactgcacccaggtggacaagatcgtggcccagtatgacaaggagaagagcacccatgagaagatcctggagaaggccatgaagaagaagggcggcagcaactgcctggagatgaagaaggagacagagatcaagatccagaccctgaccagtgaccacaagagcaaggtgaaggagatcgtggcccagcacaccaaggagtggagcgagatgatcaacacccacagcgctgaggagcaggagatccgggacctgcacctgagccagcagtgtgagctgctgaagaagctgctgatcaatgcccacgagcagcagacccagcagctgaagctgagccatgaccgggagagcaaggagatgagggcccaccaggccaagatctccatggagaacagcaaggccatcagccaggacaagagcatcaagaacaaggccgagcgggagaggagagtgcgggagctgaacagcagcaacaccaagaagttcctggaggagaggaagaggctggccatgaagcagagcaaggagatggaccagctgaagaaggtgcagctggagcacctggagttcctggagaagcagaatgagcagctgctgaagagctgccacgctgtgtcccagacccagggcgagggagatgctgctgatggagaaattggcagcagagatggcccccagaccagcaacagctccatgaagctgcagaatgccaactag

SEQ ID NO: 17386 - DNA, 3585 bp, Artificial Sequence
  derived and/or modified sequence
atggccaagccctacgagttcaactggcagaaggaggtgcccagctttctccaagaaggagcagttttcgaccgatacgaggaagaatctttcgtctttgaaccaaactgcctgttcaaggttgacgaattcggcttttttctgacctggcgctctgaaggtaaagagggacaggtactggagtgctccctgatcaattctattcggagcggagctattcctaaggatccaaaaatcttggctgcattggaagctgtaggaaagagcgagaacgatcttgaaggaagaattgtgtgtgtgtgttctggcaccgatttggtgaacatatccttcacttacatggttgccgagaaccctgaagtgacgaagcagtgggtggagggtctccgatcgattatccacaactttcgggccaacaacgtgagccccatgacctgccttaagaagcactggatgaaactggcgtttatgacgaacactaatggcaaaattcccgtgagaagtatcaccaggacatttgcgagtggcaaaacggaaaaagtcatttttcaggccttaaaggaactggggctgccgtcaggcaagaatgatgaaatagagcccacggcattcagctacgaaaagttctatgagttgacgcagaagatttgtccccgaaccgacatagaggacctgttcaagaagataaatggggacaaaaccgattatctgactgtggaccaactggtgagttttcttaacgaacatcaaagagaccctcgacttaacgagatccttttcccattttacgatgcaaaaagagccatgcagatcatcgagatgtatgagcccgacgaggacctcaagaaaaaaggtctgataagttctgacggattttgtcggtaccttatgtcggacgagaacgcccctgtttttctggacaggctggaactttaccaggaaatggatcaccctctggcacactacttcatttcatccagccacaatacctatttaactggtaggcagtttgggggaaagtcatctgttgaaatgtatcgccaggtgctcttagccggatgcaggtgtgtggagctggattgctgggacggcaaaggagaagatcaggagcctattatcacccatggtaaagccatgtgcacagacattctgtttaaggatgtgattcaggctataaaggagacggcctttgttactagcgaatatcctgtgattctgtcctttgaaaatcattgtagtaagtaccaacagtacaaaatgtcgaagtactgcgaggacctgttcggagacctcttgctgaagcaggcgctcgagtcccatcccctggagccaggccgcgccctccccagcccgaatgacctcaaacggaagatcctcataaaaaacaaacgcctgaagcctgaagtcgagaaaaagcagctcgaggctctcagatctatgatggaagccggggagtctgccagcccagccaacatcttggaggacgacaacgaggaagaaattgagtcagctgaccaagaggaagaagcccatccagaattcaaattcggaaacgagctctcagctgacgatttgggacacaaggaggccgtcgctaactctgtcaagaagggcctcgttactgtggaagatgagcaggcttggatggcgtcctacaaatacgttggagcaacaacgaacatccatccctatctgtcaacaatgatcaactatgcgcagcccgtaaaatttcagggatttcacgtagcagaggaaaggaatatacactacaatatgtcttcattcaatgagtctgtgggtctcggctatctcaagacacacgccatagagttcgtgaattacaacaagcggcagatgagccggatctaccctaaaggtggccgggtggactcctccaactacatgccacagattttctggaacgccggctgccagatggtaagcctgaactaccagaccccagatttggctatgcagttaaatcaggggaagtttgagtacaatggctcctgcggatacctgcttaagcccgattttatgagacggcccgatagaacctttgaccctttcagtgaaacaccagtagacggcgtgattgcagcaacatgttccgtccaggtaatcagtggtcaatttctgtccgacaagaagataggcacctacgtagaggtggatatgtatgggctacctacggatacaatcaggaaggagttccgcacacgaatggtgatgaacaatgggctgaacccagtatacaatgaagagagctttgtctttcgcaaagtcatcctccccgatctcgccgtccttagaattgctgtgtacgatgataataataagctgatcggccagaggatactacctctcgacgggctacaggctgggtatcgacatatcagcttgcgtaatgagggaaataagccattgagcctgccaactatcttctgtaatatcgtgttaaagacatacgtgccagacggattcggagacatcgtcgatgcactttcagatcctaagaaattcctgtctatcacagaaaagagagcagaccagatgagagcgatgggaatcgaaacatctgatatcgctgacgtgccaagcgacacctcgaaaaatgacaaaaagggaaaggccaatactgcgaaggccaatgttacgcctcaaagcagctccgagctgcgcccaacaaccacagccgcactggcaagtggggtggaagctaaaaaaggaatcgaactgattccacaggtgcggattgaggatttaaagcagatgaaagcctacctgaaacatctcaaaaagcagcagaaagagctaaactccctgaaaaagaagcatgctaaagaacatagtaccatgcagaaacttcactgcactcaagtagacaaaattgtcgcccagtacgacaaagagaaaagcactcacgaaaagatcctggagaaggctatgaaaaaaaaagggggaagcaattgtctcgagatgaagaaggaaactgaaattaagatccagactttgacctctgaccataaaagtaaggttaaggagattgtggcgcagcacactaaggaatggagtgagatgatcaacacacattccgccgaagagcaagagattagggatttgcatctgagccaacagtgcgagctcctaaagaaactgttgattaacgcccacgaacagcagacccagcagttgaagctctctcacgatcgagaatctaaggagatgcgggctcatcaggccaagatttcaatggagaacagcaaagcgattagccaggataagagcattaagaacaaggcggaacgcgagcgcagagtaagggaactgaatagttctaacaccaagaagtttcttgaagagaggaaaagactggccatgaaacagtctaaagagatggatcagctgaagaaagtccagctagaacacttagagtttttggagaagcagaatgagcagctactcaaatcttgtcatgccgtttcacagacacagggggagggagatgctgcagatggtgagattggatcacgcgacggtcctcaaacttcaaacagctccatgaagctccagaatgcaaactag

SEQ ID NO: 17387 - DNA, 3585 bp, Artificial Sequence
  derived and/or modified sequence
atggccaagccctacgagttcaactggcagaaggaggtgcccagctttctgcaggagggcgccgtttttgaccggtacgaagaagaatcattcgtatttgagccgaattgcctgttcaaggttgacgaatttgggtttttcctaacctggaggtctgaagggaaagaaggtcaggtgctggagtgctcactgattaacagtatcagatccggagctattcccaaagaccccaagattctggccgctctcgaagcagtcggtaagtctgagaacgacttagagggcaggatcgtatgtgtgtgttcgggaaccgatcttgtcaatatttctttcacatacatggttgccgagaatccagaagttacaaaacagtgggtcgagggtctgagatcaatcatccacaacttcagagctaacaacgttagtcccatgacctgtctgaaaaaacattggatgaagctggcttttatgactaatacaaacggcaaaatcccagtacgtagcatcaccagaacctttgctagcggcaagactgaaaaagtgatcttccaggctctgaaggaactcggcctgcccagcggcaaaaacgacgaaatcgagcccaccgccttttcctatgagaagttctatgaactgactcagaagatttgcccccggaccgatattgaggatttattcaagaaaattaacggggacaagactgattacctgaccgtggatcagctggtcagctttctgaatgagcaccagagggaccctagactgaacgaaatcctgttccccttttatgacgccaaacgggccatgcaaatcatcgagatgtacgagcccgacgaggaccttaagaagaaaggtttaataagcagcgacggtttctgtcggtatctgatgtctgacgaaaatgccccagtctttttagaccgattagagctgtatcaggagatggatcatccactggcgcactacttcattagctcgagccacaacacataccttactggacggcagttcggtggcaagtcttcagtcgagatgtaccgacaagtgttgttggccgggtgccgttgcgtggagcttgactgttgggatggcaaaggggaagatcaggaaccgataatcacacacggtaaggcgatgtgcacggatatactgtttaaagacgtgattcaggctattaaagagaccgcattcgttacctccgaatacccggtgattctgtccttcgagaatcactgctcgaaataccagcaatataagatgtcaaaatactgtgaagacctctttggagatctcctgctgaagcaggctctggaatcgcatcccctcgagcctggccgtgcgctgccttcgcctaacgatctgaaaagaaagatccttatcaagaataagcgactaaagcccgaagtggaaaagaaacagttggaagccctcaggagtatgatggaagcaggcgagtccgctagccctgctaacattctggaagacgataacgaggaggagattgaaagcgccgatcaggaggaggaagcccacccggagttcaagtttgggaacgaactgtccgctgatgatctggggcacaaggaggcggtagccaacagtgtcaagaagggcctggtgactgtggaagatgagcaggcatggatggcaagctacaaatacgttggggccacaacaaatatccacccctacctgagcaccatgattaactacgcacagccggtgaaattccaggggttccacgtcgccgaagagaggaatatccactataacatgagcagcttcaatgagagcgtggggctcggctacttgaagacccatgcaatcgaatttgttaactataacaagcgacagatgtcacggatctatccaaaagggggtcgcgtcgatagtagtaattatatgcctcagatattttggaatgccggctgccagatggtgagcctgaattatcagacaccagacctggcaatgcagttaaatcaggggaagttcgagtataacggcagctgcggatatctcctcaagcctgactttatgaggagacctgaccgaacttttgacccctttagtgaaacgccagtggacggagtcatcgcagcaacttgcagtgtgcaagtgattagtgggcaatttttgagcgataaaaaaattggcacttacgtcgaagtggatatgtatggcctacctaccgacaccattcgcaaggagtttcgaactcggatggtaatgaataacggactgaatcctgtatacaatgaagaatcatttgtttttcgtaaagtgattctcccagatctggccgtactgcgcatcgccgtgtacgatgacaacaataagctaataggccaacgcattctacctttggatggacttcaggccggataccggcacatatccctaagaaatgagggtaacaaaccccttagcttgccaactatcttttgtaatatcgttctaaaaacttacgttccagatggctttggcgacattgttgacgcactttccgatccaaagaagtttttaagtattacagaaaaaagagcggatcagatgagggcaatgggcatagaaacatctgatatcgctgatgttccctctgatacatcgaaaaacgacaaaaagggaaaggccaatactgccaaggccaatgttacgccccagtcatcctccgaactaaggccaacaacaaccgccgcccttgcatctggtgtggaggcaaagaagggtattgagctcataccccaggttagaatcgaggacttgaagcagatgaaagcttaccttaagcatttgaagaaacagcagaaggaacttaacagtcttaaaaaaaaacacgcaaaagagcactctacaatgcagaagctgcactgtacacaggtggacaagattgttgcccagtatgacaaggagaaatccacccacgaaaagatcctggagaaggcaatgaaaaaaaaaggtggctcaaactgtctcgaaatgaagaaggaaactgagattaaaatacaaactctcacctcagaccacaagtccaaggttaaagagattgtggcccagcatactaaggaatggagcgaaatgattaatacgcactccgcagaagagcaggagattcgggaccttcacctgtcccagcagtgtgaactgctgaaaaaactcctgattaacgctcacgagcagcaaactcagcagctaaaactgagccacgaccgggagagcaaagaaatgagggcgcaccaggctaagatttccatggagaattcaaaggccatctcccaggacaagtccattaagaataaagccgagcgagaacgacgcgtacgagagctcaactcgtcgaacaccaaaaagttcctcgaggagcgcaagcgactggcgatgaaacaaagtaaggagatggaccagctgaaaaaagttcagctagaacacttagagtttttagaaaagcagaacgaacagctgcttaaatcatgtcacgccgtgagccagacccagggggagggcgacgcggctgatggagagatcggctcgcgagatggacctcaaacctccaactcatcaatgaaacttcagaatgccaattag

SEQ ID NO: 17388 - DNA, 5620 bp, Artificial Sequence
  derived and/or modified sequence
agtaagtgagctgcaccgccaacaagatctctcacacacagacacacacacgcacacgcacacacgggcgcgcacacacacgcgcgtacacactgggtctccaggcagcggccgtcgccgcatccccggcagcagctccaggcaaagtgacagaggacagtgctgctgtgagtttgacgaagtggacatcacctgcagtcagtccagagctgcccagtcttgaatataatcatggccaaaccttatgaatttaactggcagaaggaagttccctcctttttgcaagaaggagcagtttttgacagatacgaggaggaatcctttgtgtttgaacccaactgcctcttcaaagtggatgagtttggcttctttctgacatggagaagtgaaggcaaggaaggacaggtgctagaatgctccctcatcaacagtattcggtcgggagccataccaaaggatcccaaaatcttggctgctcttgaagctgttggaaaatcagaaaatgatctggaagggcggatagtttgtgtctgcagtggcacagatctagtgaacattagttttacctacatggtggctgaaaatccagaagtaactaagcaatgggtagaaggcctgagatcaatcatacacaacttcagggccaacaacgtcagtccaatgacatgcctcaagaaacactggatgaaattggcatttatgaccaacacaaatggtaaaattccagttaggagtattactagaacatttgcatcgggaaaaacagaaaaggtgatctttcaagcactcaaggagttaggtcttcccagtggaaagaatgatgaaattgagcccacagcattttcttatgaaaagttctatgaactgacacaaaagatttgtcctcggacagatatagaagatcttttcaaaaaaatcaatggagacaaaactgattatttaacggtagaccaattagtgagctttctaaatgaacatcaacgagatcctcgattgaatgaaattttatttccattttatgatgccaaaagggcaatgcagatcattgagatgtatgaacctgatgaagatttgaagaaaaaaggccttatatcaagtgatgggttttgcagatatctgatgtcagatgaaaacgccccagtcttcctagatcgtttagaactttaccaagaaatggaccatcctctggctcactacttcatcagttcttcccataacacttatctcactggcagacagttcggcgggaagtcttcggtagaaatgtacagacaggttctcctggctggttgcagatgtgttgaacttgactgctgggatggaaaaggtgaagaccaagaaccaataataactcatggaaaagcaatgtgtacagatatcctttttaaggatgtaattcaagccatcaaggaaactgcatttgtcacatcagaatatcctgtaattctctcctttgaaaatcactgcagcaaatatcaacagtacaagatgtccaaatattgcgaagatctatttggggatctcctgttgaaacaagcacttgaatcacatccacttgaaccaggcagggctttgccatcccccaatgacctcaaaagaaaaatactcataaaaaacaagcggctgaaacctgaagttgaaaaaaaacagctggaagctttgagaagcatgatggaagctggagaatctgcctccccagcaaacatcttagaggacgataatgaagaggagatcgaaagtgctgaccaagaggaggaagctcaccccgaattcaaatttggaaatgaactttctgctgatgacttgggtcacaaggaagctgttgcaaatagcgtcaagaagggcctggtcactgtagaagatgagcaggcgtggatggcatcttataaatatgtaggtgctaccactaatatccatccatatttgtccacaatgatcaactacgcccagcctgtaaagtttcaaggtttccatgtggcagaagaacgcaatattcattataacatgtcttcttttaatgaatcagtcggtcttggctacttgaagacacatgcaattgaatttgtcaattataacaaacggcaaatgagtcgcatttaccccaagggaggccgagtcgattccagtaattacatgcctcagattttctggaacgctggctgccagatggtttcactgaactatcaaaccccagatttagcgatgcaattgaatcagggaaaatttgagtataatggatcgtgcgggtaccttctcaaaccagatttcatgaggcggcctgatcgaacatttgaccccttctctgaaactcctgttgatggtgttattgcagccacttgctcagtgcaggttatatcaggtcaattcttatcagataagaaaattggcacctacgtagaggtggatatgtatgggttgcccactgacaccatacgtaaggaattccgaactcgcatggttatgaataatggactcaatccagtttacaatgaagagtcatttgtatttcggaaggtgatcctgccggacctggctgtcttgagaatagctgtgtatgatgataacaacaagctgattggccagaggatcctcccgcttgatggcctccaagccggatatcgacacatttcccttcgaaatgagggaaataaaccattatcactaccaacaattttctgcaatattgttcttaaaacatatgtgcctgatggatttggagatatcgtggatgctttatcagatccaaagaaatttctctcaattacagaaaagagagcagaccaaatgagagctatgggcattgaaactagtgacatagccgacgtgcccagtgacacttccaaaaatgacaagaaaggaaaggccaacaccgccaaagcaaatgtgacccctcagagtagctctgagctcagaccaaccaccacggctgccctggcctctggtgtggaagccaagaaaggtattgaacttatccctcaagtaaggatagaagacttaaagcagatgaaggcttacttgaagcatttaaagaaacagcagaaggagctaaattctttaaagaagaaacatgcaaaggaacacagtaccatgcagaagttacactgcacgcaagttgacaaaattgtggcacagtatgacaaagagaagtcgactcatgagaaaatcctagagaaggcaatgaagaagaaggggggaagtaattgtctcgaaatgaaaaaagaaacagaaatcaaaattcagacgctgacatcagatcacaaatctaaggtcaaagagattgtagcacagcacacaaaggaatggtcagaaatgatcaatacccacagtgctgaggagcaagaaatccgagacctgcacctcagccagcagtgtgagctgctgaaaaagctactcatcaatgcccacgagcagcaaacccagcagctgaaactgtcccatgacagggaaagcaaggaaatgcgagcacaccaggctaagatttctatggaaaatagcaaagccatcagccaagataaatctatcaagaataaagcagaacgggaaaggcgagtcagggagttaaacagcagcaacactaaaaagtttctggaagaaagaaagagacttgccatgaagcagtccaaagaaatggatcagttgaaaaaagtccagcttgaacatctagaattcctagagaaacagaatgagcagcttttgaaatcctgtcatgcagtgtcccaaacgcaaggcgaaggagatgcagcagatggtgaaattggaagccgagatggaccgcagaccagcaacagtagtatgaaactccaaaatgcaaactgaagcagcaaacccacaaagcatcaaaagactcactcacaaacttctgaacacaaactccatggatgaaagctgtttattttgtttcctttatgtgtaaacaagatgatatctgaaaccagagagacttggaatgtctgactgacttctatttaacagcttgagtattgcatttccttggccaaacaaaaatagctacaaatccacaaaaatttactattccagtaaggcagagtccaaccattgataatacaacttaaacatgtttgctataaaataccatcacaagtaaatgagcttggtgtgaacaactctcctttgtgatgccttaggacatgtttgaactgcagcaaaaaacaaaaacaaaaaacagtgcattagcaatttcatagcaagtgcatgcactaggaaaagaaaactctgtctacaagtttattagcagaagtggtggtctgctagacaaataattttgcaaaatttttctacatctaagttacctcatcagtaagtgccatgtctctaccatgccatcagaggctaatttcctgtaaaagttgtggaaattgttagaacaatagaaaaatagagcagtgtatgtgtgccaaaactcatcattactcaaaggagaactgtgttaggcacatttaagaaagtttacatctgacattgctttataggaattgtttctgcagattccggatattataattcacaccataaagattgtgaagtggttattggcaaacgtttgtaaatgtgaccatgtataaagtatttatactctttaattcacactgttagagagcaaaatcatctaagtattgccacatgacaagattagtaaacaggaatactagaactatgtttgcatgatacacaagcaccaataaagactaatccatacacagttaacctaatgccaaataaatactggttaaataaatgtatggcacagaatataatttgactatcaagacttttagcataatgaaaaaccctctctctatatatatatgtgtatatgaattatgtgggcattcttgatacttcaagttctagtttgaaaaaaatacataactaatttaattttacacaaaaatatttatgcagattttcagaatttcatatcaggaaatgacctttttatgtctgttaaatatcaaaacaatttgctacagtgttaatctgcatggtctttaagcctgctgtagttgagttgcagacagtgcatgaaaaagtattccgctgggaattgagccatgccaccaaagccaagaggagcgcatggaaacccggtagtctagaactaatcagattactgattttagggcacagcaccagatgaattgttgtatatgcttgtaaaaattgattctgtgtgttcctctgaacaaagcggagaaaatgatgataccatcaatattgaaattaaacttccaacttctctaataaaaaattaaaacacgcataacactcgtcaagagtatttgctcccaagacacattctagcaaatgttttgcctttttcatatacatgatatcatcgttattttcaaagggggcttattaataccctcagcatgtttttcacccaaatgatgcaaaacatgcagattctagttgacttcagttgtaatagacttgtttttctcctatttatgatttgaagtggattctgtaaaatatctcttgttcttagtttccttatctgtaaaacagtggagttagactacatatcttttggcactaacatctcatgaaaaattatggttaataaaatatcaccacatttggattgccaattttc

SEQ ID NO: 17389 - DNA, 5833 bp, Artificial Sequence
  derived and/or modified sequence
gtcttgaatataatcatggccaaaccttatgaatttaactggcagaaggaagttccctcctttttgcaagaaggagcagtttttgacagatacgaggaggaatcctttgtgtttgaacccaactgcctcttcaaagtggatgagtttggcttctttctgacatggagaagtgaaggcaaggaaggacaggtgctagaatgctccctcatcaacagtattcggtcgggagccataccaaaggatcccaaaatcttggctgctcttgaagctgttggaaaatcagaaaatgatctggaagggcggatagtttgtgtctgcagtggcacagatctagtgaacattagttttacctacatggtggctgaaaatccagaagtaactaagcaatgggtagaaggcctgagatcaatcatacacaacttcagggccaacaacgtcagtccaatgacatgcctcaagaaacactggatgaaattggcatttatgaccaacacaaatggtaaaattccagttaggagtattactagaacatttgcatcgggaaaaacagaaaaggtgatctttcaagcactcaaggagttaggtcttcccagtggaaagaatgatgaaattgagcccacagcattttcttatgaaaagttctatgaactgacacaaaagatttgtcctcggacagatatagaagatcttttcaaaaaaatcaatggagacaaaactgattatttaacggtagaccaattagtgagctttctaaatgaacatcaacgagatcctcgattgaatgaaattttatttccattttatgatgccaaaagggcaatgcagatcattgagatgtatgaacctgatgaagatttgaagaaaaaaggccttatatcaagtgatgggttttgcagatatctgatgtcagatgaaaacgccccagtcttcctagatcgtttagaactttaccaagaaatggaccatcctctggctcactacttcatcagttcttcccataacacttatctcactggcagacagttcggcgggaagtcttcggtagaaatgtacagacaggttctcctggctggttgcagatgtgttgaacttgactgctgggatggaaaaggtgaagaccaagaaccaataataactcatggaaaagcaatgtgtacagatatcctttttaaggatgtaattcaagccatcaaggaaactgcatttgtcacatcagaatatcctgtaattctctcctttgaaaatcactgcagcaaatatcaacagtacaagatgtccaaatattgcgaagatctatttggggatctcctgttgaaacaagcacttgaatcacatccacttgaaccaggcagggctttgccatcccccaatgacctcaaaagaaaaatactcataaaaaacaagcggctgaaacctgaagttgaaaaaaaacagctggaagctttgagaagcatgatggaagctggagaatctgcctccccagcaaacatcttagaggacgataatgaagaggagatcgaaagtgctgaccaagaggaggaagctcaccccgaattcaaatttggaaatgaactttctgctgatgacttgggtcacaaggaagctgttgcaaatagcgtcaagaagggcctggtcactgtagaagatgagcaggcgtggatggcatcttataaatatgtaggtgctaccactaatatccatccatatttgtccacaatgatcaactacgcccagcctgtaaagtttcaaggtttccatgtggcagaagaacgcaatattcattataacatgtcttcttttaatgaatcagtcggtcttggctacttgaagacacatgcaattgaatttgtcaattataacaaacggcaaatgagtcgcatttaccccaagggaggccgagtcgattccagtaattacatgcctcagattttctggaacgctggctgccagatggtttcactgaactatcaaaccccagatttagcgatgcaattgaatcagggaaaatttgagtataatggatcgtgcgggtaccttctcaaaccagatttcatgaggcggcctgatcgaacatttgaccccttctctgaaactcctgttgatggtgttattgcagccacttgctcagtgcaggttatatcaggtcaattcttatcagataagaaaattggcacctacgtagaggtggatatgtatgggttgcccactgacaccatacgtaaggaattccgaactcgcatggttatgaataatggactcaatccagtttacaatgaagagtcatttgtatttcggaaggtgatcctgccggacctggctgtcttgagaatagctgtgtatgatgataacaacaagctgattggccagaggatcctcccgcttgatggcctccaagccggatatcgacacatttcccttcgaaatgagggaaataaaccattatcactaccaacaattttctgcaatattgttcttaaaacatatgtgcctgatggatttggagatatcgtggatgctttatcagatccaaagaaatttctctcaattacagaaaagagagcagaccaaatgagagctatgggcattgaaactagtgacatagccgacgtgcccagtgacacttccaaaaatgacaagaaaggaaaggccaacaccgccaaagcaaatgtgacccctcagagtagctctgagctcagaccaaccaccacggctgccctggcctctggtgtggaagccaagaaaggtattgaacttatccctcaagtaaggatagaagacttaaagcagatgaaggcttacttgaagcatttaaagaaacagcagaaggagctaaattctttaaagaagaaacatgcaaaggaacacagtaccatgcagaagttacactgcacgcaagttgacaaaattgtggcacagtatgacaaagagaagtcgactcatgagaaaatcctagagaaggcaatgaagaagaaggggggaagtaattgtctcgaaatgaaaaaagaaacagaaatcaaaattcagacgctgacatcagatcacaaatctaaggtcaaagagattgtagcacagcacacaaaggaatggtcagaaatgatcaatacccacagtgctgaggagcaagaaatccgagacctgcacctcagccagcagtgtgagctgctgaaaaagctactcatcaatgcccacgagcagcaaacccagcagctgaaactgtcccatgacagggaaagcaaggaaatgcgagcacaccaggctaagatttctatggaaaatagcaaagccatcagccaagataaatctatcaagaataaagcagaacgggaaaggcgagtcagggagttaaacagcagcaacactaaaaagtttctggaagaaagaaagagacttgccatgaagcagtccaaagaaatggatcagttgaaaaaagtccagcttgaacatctagaattcctagagaaacagaatgagcagcttttgaaatcctgtcatgcagtgtcccaaacgcaaggcgaaggagatgcagcagatggtgaaattggaagccgagatggaccgcagaccagcaacagtagtatgaaactccaaaatgcaaactgaagcagcaaacccacaaagcatcaaaagactcactcacaaacttctgaacacaaactccatggatgaaagctgtttattttgtttcctttatgtgtaaacaagatgatatctgaaaccagagagacttggaatgtctgactgacttctatttaacagcttgagtattgcatttccttggccaaacaaaaatagctacaaatccacaaaaatttactattccagtaaggcagagtccaaccattgataatacaacttaaacatgtttgctataaaataccatcacaagtaaatgagcttggtgtgaacaactctcctttgtgatgccttaggacatgtttgaactgcagcaaaaaacaaaaacaaaaaacagtgcattagcaatttcatagcaagtgcatgcactaggaaaagaaaactctgtctacaagtttattagcagaagtggtggtctgctagacaaataattttgcaaaatttttctacatctaagttacctcatcagtaagtgccatgtctctaccatgccatcagaggctaatttcctgtaaaagttgtggaaattgttagaacaatagaaaaatagagcagtgtatgtgtgccaaaactcatcattactcaaaggagaactgtgttaggcacatttaagaaagtttacatctgacattgctttataggaattgtttctgcagattccggatattataattcacaccataaagattgtgaagtggttattggcaaacgtttgtaaatgtgaccatgtataaagtatttatactctttaattcacactgttagagagcaaaatcatctaagtattgccacatgacaagattagtaaacaggaatactagaactatgtttgcatgatacacaagcaccaataaagactaatccatacacagttaacctaatgccaaataaatactggttaaataaatgtatggcacagaatataatttgactatcaagacttttagcataatgaaaaaccctctctctatatatatatgtgtatatgaattatgtgggcattcttgatacttcaagttctagtttgaaaaaaatacataactaatttaattttacacaaaaatatttatgcagattttcagaatttcatatcaggaaatgacctttttatgtctgttaaatatcaaaacaatttgctacagtgttaatctgcatggtctttaagcctgctgtagttgagttgcagacagtgcatgaaaaagtattccgctgggaattgagccatgccaccaaagccaagaggagcgcatggaaacccggtagtctagaactaatcagattactgattttagggcacagcaccagatgaattgttgtatatgcttgtaaaaattgattctgtgtgttcctctgaacaaagcggagaaaatgatgataccatcaatattgaaattaaacttccaacttctctaataaaaaattaaaacacgcataacactcgtcaagagtatttgctcccaagacacattctagcaaatgttttgcctttttcatatacatgatatcatcgttattttcaaagggggcttattaataccctcagcatgtttttcacccaaatgatgcaaaacatgcagattctagttgacttcagttgtaatagacttgtttttctcctatttatgatttgaagtggattctgtaaaatatctcttgttcttagtttccttatctgtaaaacagtggagttagactacatatcttttggcactaacatctcatgaaaaattatggttaataaaatatcaccacatttggattgccaattttcaaagattctgagtggcttctcatcatcaaatcaaatcaaatccaagagctcaactatgctcaccattctgtaacacttgactgaattcatcacttgcctcctcttgtttctgctttggagaggtactactagtttttccatttttcttatttcttccctcttttcatcctcctaggccaccataagcatttatattttccagtgttatacatggaaccagtttgtttttctttgatccaggttacttttagtatttgagacatcataccattaatccattgtagtaggattaaaatgtacacacaactcaaatgtgcaacaaaagcatgtgttacctgctattgtcagttcatattgcactcaaaccttgcattatcccttattatgaagaaaaattaatagccaattaaagtaactcagtgtcttcca

SEQ ID NO: 17390 - DNA, 3585 bp, Artificial Sequence
  derived and/or modified sequence
atggccaagccttatgagttcaactggcagaaagaggtgccttcttttcttcaggagggtgccgtgtttgacagatatgaggaggagagcttcgtcttcgagccaaattgtctctttaaggttgacgaatttggcttttttctcacttggcggtctgaaggcaaagaaggacaggtcctggagtgtagcctcattaactccatacgctctggtgctatcccaaaggatcctaagattcttgccgcattggaggccgtggggaagtctgagaatgatttggaggggagaattgtttgcgtctgctcaggtacagatctcgtcaacatttcgtttacctacatggtggctgaaaatccagaggtaacgaagcagtgggttgaaggtctgaggagtataatccataattttagagcgaataatgtcagtcctatgacctgcctaaaaaaacattggatgaagctcgccttcatgaccaacactaacggcaagattcctgtgcggtccatcaccagaactttcgcctctggaaaaactgaaaaagtgatctttcaggcactcaaagagctaggattacctagcggaaaaaatgatgagatcgagcctaccgccttttcctatgagaaattttacgagctcactcagaaaatctgtcctaggaccgacattgaagatctgtttaagaagattaacggcgacaagaccgactatctgaccgtggaccagcttgtttcattcttgaatgagcaccagagagaccccaggcttaatgagatacttttccctttctatgacgcaaaaagggcgatgcaaattatcgaaatgtatgagccagatgaagacctcaagaaaaaaggcctgatttcatccgacgggttttgcaggtatttgatgtctgatgagaacgcccctgtgtttctcgaccgactcgagttatatcaggaaatggatcacccactggcacattactttatttcgtcaagtcacaacacatacctgacaggcaggcagtttggcggaaaaagctccgtggaaatgtatagacaggttcttctcgcaggttgccggtgcgtggaactcgactgctgggatgggaagggcgaggatcaggaaccaattatcacccatggtaaagccatgtgtaccgacattctttttaaggatgttattcaggctataaaagaaactgctttcgtgactagtgagtatcctgtaatcttgtcttttgagaatcactgctccaaatatcaacagtacaagatgagcaagtattgcgaagatctgttcggtgatctcctgctgaaacaggctctggaaagtcatcccctggagcctggcagagccctgccttctcctaacgacttaaaacgcaaaattcttatcaaaaataagcggcttaaacctgaagtcgaaaaaaagcagctggaggctctcaggagtatgatggaggccggtgagtccgcctcccccgctaacatcctggaggatgacaacgaagaggaaattgaatctgctgaccaagaggaggaagctcacccagaatttaagttcggcaacgagctgtccgccgatgacctgggccacaaggaagccgtagctaattctgttaaaaaaggccttgtgaccgtcgaagatgagcaggcatggatggcatcatacaagtatgtgggtgcaactacaaatatacacccttacctgtctacaatgattaactatgctcaacccgtgaaattccaaggctttcatgtcgccgaggaacgcaatatacactataacatgtcctcatttaacgagtccgttggcctgggctatttgaagacacatgccatagagttcgtcaactacaataaacgacagatgagcagaatttatcccaagggaggcagagtggacagctcaaattacatgcctcagattttctggaacgctgggtgtcaaatggtcagtctgaattaccagactccagatcttgcaatgcagctgaatcaggggaagtttgaatacaacggtagttgcggttatctgctcaaaccggactttatgagacggccagatcgcactttcgaccctttttccgaaactccagtggatggcgtgattgccgcaacctgttcagtgcaggtgatctctggacagtttctgtcggacaaaaagataggaacctatgtggaagtagatatgtacggactacccaccgacactatcagaaaggagttccgaacccgaatggtgatgaacaacggcttgaacccagtgtataatgaggaaagcttcgtgtttagaaaagtgattctccctgatcttgcagtccttagaatcgctgtctacgacgataacaataaattgatcggacagcggattctacctctcgacgggctgcaggctgggtatcggcatatcagtctgcgaaatgaagggaacaagccgctctcgctaccaacgattttttgtaacattgtgctgaaaacttacgtcccagatggctttggtgacatagtggatgccctatccgaccctaaaaaattcctgtctatcactgagaagcgcgctgaccaaatgcgggctatgggaatagagaccagcgacattgctgacgttccctcagatacatctaaaaatgataagaagggcaaagccaacactgcgaaggcaaacgtcaccccccagtcaagctccgagctgcgcccaacaactaccgcagcactggcttctggagtcgaagctaagaaaggtatcgagctcatcccacaggtgcgcattgaggatctgaaacagatgaaggcttacttgaagcatcttaagaagcagcagaaggagctcaattcactgaagaaaaagcacgccaaagaacatagtaccatgcagaaattgcactgtacacaggtggacaaaatagtggcccagtacgacaaggaaaagtcgacacatgaaaaaatcctggagaaggctatgaaaaagaaagggggatccaactgtctggagatgaagaaggaaaccgaaatcaaaatacagacgctcacctccgaccacaaatcaaaggttaaagagatcgtggctcagcatacaaaagaatggtctgaaatgattaacactcattccgccgaagagcaagaaattcgggatctgcatctatcacaacagtgcgaactgctgaagaaactgctaatcaacgctcacgagcaacaaacacagcagcttaaattatcccatgatcgggaatccaaagagatgcgggctcaccaggccaaaatatctatggagaactctaaagctattagccaggacaaaagcatcaagaacaaagctgagagggagaggagggtccgggagcttaactcttcaaataccaaaaaattcctggaggaaagaaaacggcttgcaatgaaacagagtaaagaaatggaccagctgaaaaaagtgcagctggaacatctggagttcttggagaagcaaaatgaacaactgctaaagtcctgtcatgccgttagtcagacccagggagaaggggacgctgccgacggcgaaatcggcagtcgagatggcccacaaacttctaactcctccatgaaactgcaaaatgctaattag

SEQ ID NO: 17391 - DNA, 3585 bp, Artificial Sequence
  derived and/or modified sequence
atggcgaaaccttatgagttcaactggcaaaaggaggtcccgtcttttcttcaggaaggagcagtgtttgatcggtatgaagaagaatctttcgtgtttgaacctaactgcctcttcaaagtggatgaatttgggttctttctgacttggcggagcgagggaaaggaggggcaggtgctggagtgctccctgataaattctattcgcagcggtgcaattcctaaggaccctaaaattctggccgctctggaggctgtcggaaagtcagagaatgatctggaggggaggattgtgtgcgtgtgcagtggaacggacctggtaaacatcagttttacatatatggtggcagagaaccccgaggttacaaagcagtgggttgaaggtctgcgatccataatccataactttcgcgctaacaatgtgagccccatgacatgtttgaagaagcattggatgaaactcgcgttcatgaccaacactaacgggaaaattcctgttcgcagtatcacgaggactttcgcctccggaaagaccgaaaaagtgatcttccaagccctgaaggagcttggactgcccagcgggaaaaatgacgagatcgagcctaccgccttttcttacgaaaagttctatgagcttactcagaagatctgccccaggacagatattgaagacctctttaaaaagatcaatggcgataaaaccgactacctcacagtggatcagctcgtgagctttctcaacgagcatcagcgggaccctaggctaaacgaaatactgtttcccttttatgacgccaagagagccatgcaaataatcgaaatgtatgagccagacgaggacctgaagaagaaggggcttatttccagtgacggtttttgcaggtacctcatgtcagatgagaatgctccggttttcctggacaggctcgagttataccaagagatggatcacccactcgcacattacttcatctcttcttcacacaacacgtaccttacaggacggcaattcgggggtaaatcttcagttgagatgtacaggcaggtgctgcttgctggatgcagatgcgtagaactggactgctgggatgggaagggtgaggatcaggaaccgattattacacatgggaaagccatgtgcactgacattctcttcaaggatgtgatccaggcaattaaagaaaccgcattcgttacaagcgagtatcccgtgatactgtcgttcgaaaaccactgcagtaaataccagcagtacaaaatgagtaagtactgcgaggacttgtttggcgatctcttacttaagcaagctttggagtcgcatccactggagcctggaagagccttaccctctcctaatgatctcaaaaggaagattctgattaaaaacaagagactgaaacccgaagtagaaaaaaagcagcttgaagccctgcggtccatgatggaagccggagagagcgcaagcccagcgaatatcttggaggatgataatgaggaagagattgaaagcgctgaccaggaagaggaggctcaccctgaattcaagtttggaaatgaactgagcgccgatgacttgggtcacaaggaagccgtcgcgaactctgtaaagaagggcttagttacagtggaagacgagcaggcatggatggcctcatacaaatacgtgggggcaactactaatatccatccctatttatctactatgattaattatgcacaaccggtgaaattccagggcttccatgttgccgaagaacggaatatccactacaatatgtcttcctttaatgaaagcgtgggcctgggctaccttaagacccacgcgattgagttcgtcaactataacaaacggcagatgtctaggatctacccaaagggcggacgagtggacagctccaactacatgccccagatcttttggaatgcaggatgtcagatggtaagcctgaactaccagaccccagacctggctatgcagctgaatcagggcaagtttgaatataacggatcctgcggatacctactgaaaccagatttcatgcgcaggcccgatcgaacattcgacccattctcagagacccccgtcgatggggtgattgccgctacatgttctgttcaggtcatctcgggccagttccttagtgacaagaagatcgggacgtatgtcgaggtggacatgtatggactcccaaccgatacaatacggaaggagttccgcacaagaatggttatgaacaacggactcaatcccgtttacaatgaagagagctttgttttcagaaaagtcattcttccagatttagctgtgttgcggatagccgtgtatgatgataataacaagctaattgggcaacgcattttacccctggacggccttcaggctggttatcgccacatttccctgcggaacgaggggaacaagcccttaagcttgcctacgatcttttgtaatatcgtccttaagacatacgtccccgatggcttcggggacattgtagacgctctctcggaccccaaaaaattcctctcgataaccgagaagcgcgcagatcaaatgagagcaatgggaatcgagacatcagatatagccgatgttcctagcgacacaagtaaaaacgacaagaaggggaaggccaatacggccaaggccaatgttaccccgcagtcttcctctgagcttcgaccaacgaccacagctgcccttgcctctggggtggaagccaagaagggtattgagttgataccacaggttcggattgaagatctcaaacaaatgaaggcctacctgaagcacctgaaaaagcaacagaaggagttgaattccttgaagaaaaaacatgccaaggagcattccactatgcagaagctgcattgcactcaggtcgacaagatagttgcccagtatgataaggaaaagtccacccatgagaagatcttggaaaaggcgatgaaaaaaaaaggcggttccaactgtctggagatgaaaaaagaaaccgagatcaaaattcagacactgacatcagaccataaaagcaaggtgaaggagattgttgcccagcacactaaagagtggtccgaaatgataaacacacacagcgccgaagagcaggagatacgtgaccttcatctgagccagcaatgcgagttgctcaagaagcttcttataaacgcccacgagcagcagactcaacagctgaagttgtcgcatgatcgagagagtaaggagatgagagcacatcaggccaaaatcagcatggaaaacagtaaggccatctcccaggataaatctatcaaaaacaaggcggaacgagaaagacgcgtgagggaactgaacagctcaaataccaagaaatttctagaggagaggaagagactggcgatgaaacagtcgaaggagatggaccagcttaaaaaggtccaactagagcatttagagtttctcgaaaagcagaacgaacagctgctgaagtcctgccatgccgtgagccagacccagggtgagggagatgctgcagacggggagataggttcgcgagatgggcctcagacctctaattccagtatgaagttacagaatgctaattag

SEQ ID NO: 17392 - DNA, 3585 bp, Artificial Sequence
  derived and/or modified sequence
atggccaagccctacgagttcaactggcagaaggaggtgcccagcttcctgcaggagggcgccgtgttcgacagatacgaggaggagagcttcgtgttcgagcccaactgcctgttcaaggtggacgagttcggcttcttcctgacctggagaagcgagggcaaggagggccaggtgctggagtgcagcctgatcaacagcatcagaagcggcgccatccccaaggaccccaagatcctggccgccctggaggccgtgggcaagagcgagaacgacctggagggcagaatcgtgtgcgtgtgcagcggcaccgacctggtgaacatcagcttcacctacatggtggccgagaaccccgaggtgaccaagcagtgggtggagggcctgagaagcatcatccacaacttcagagccaacaacgtgagccccatgacctgcctgaagaagcactggatgaagctggccttcatgaccaacaccaacggcaagatccccgtgagaagcatcaccagaaccttcgccagcggcaagaccgagaaggtgatcttccaggccctgaaggagctgggcctgcccagcggcaagaacgacgagatcgagcccaccgccttcagctacgagaagttctacgagctgacccagaagatctgccccagaaccgacatcgaggacctgttcaagaagatcaacggcgacaagaccgactacctgaccgtggaccagctggtgagcttcctgaacgagcaccagagagaccccagactgaacgagatcctgttccccttctacgacgccaagagagccatgcagatcatcgagatgtacgagcccgacgaggacctgaagaagaagggcctgatcagcagcgacggcttctgcagatacctgatgagcgacgagaacgcccccgtgttcctggacagactggagctgtaccaggagatggaccaccccctggcccactacttcatcagcagcagccacaacacctacctgaccggcagacagttcggcggcaagagcagcgtggagatgtacagacaggtgctgctggccggctgcagatgcgtggagctggactgctgggacggcaagggcgaggaccaggagcccatcatcacccacggcaaggccatgtgcaccgacatcctgttcaaggacgtgatccaggccatcaaggagaccgccttcgtgaccagcgagtaccccgtgatcctgagcttcgagaaccactgcagcaagtaccagcagtacaagatgagcaagtactgcgaggacctgttcggcgacctgctgctgaagcaggccctggagagccaccccctggagcccggcagagccctgcccagccccaacgacctgaagagaaagatcctgatcaagaacaagagactgaagcccgaggtggagaagaagcagctggaggccctgagaagcatgatggaggccggcgagagcgccagccccgccaacatcctggaggacgacaacgaggaggagatcgagagcgccgaccaggaggaggaggcccaccccgagttcaagttcggcaacgagctgagcgccgacgacctgggccacaaggaggccgtggccaacagcgtgaagaagggcctggtgaccgtggaggacgagcaggcctggatggccagctacaagtacgtgggcgccaccaccaacatccacccctacctgagcaccatgatcaactacgcccagcccgtgaagttccagggcttccacgtggccgaggagagaaacatccactacaacatgagcagcttcaacgagagcgtgggcctgggctacctgaagacccacgccatcgagttcgtgaactacaacaagagacagatgagcagaatctaccccaagggcggcagagtggacagcagcaactacatgccccagatcttctggaacgccggctgccagatggtgagcctgaactaccagacccccgacctggccatgcagctgaaccagggcaagttcgagtacaacggcagctgcggctacctgctgaagcccgacttcatgagaagacccgacagaaccttcgaccccttcagcgagacccccgtggacggcgtgatcgccgccacctgcagcgtgcaggtgatcagcggccagttcctgagcgacaagaagatcggcacctacgtggaggtggacatgtacggcctgcccaccgacaccatcagaaaggagttcagaaccagaatggtgatgaacaacggcctgaaccccgtgtacaacgaggagagcttcgtgttcagaaaggtgatcctgcccgacctggccgtgctgagaatcgccgtgtacgacgacaacaacaagctgatcggccagagaatcctgcccctggacggcctgcaggccggctacagacacatcagcctgagaaacgagggcaacaagcccctgagcctgcccaccatcttctgcaacatcgtgctgaagacctacgtgcccgacggcttcggcgacatcgtggacgccctgagcgaccccaagaagttcctgagcatcaccgagaagagagccgaccagatgagagccatgggcatcgagaccagcgacatcgccgacgtgcccagcgacaccagcaagaacgacaagaagggcaaggccaacaccgccaaggccaacgtgaccccccagagcagcagcgagctgagacccaccaccaccgccgccctggccagcggcgtggaggccaagaagggcatcgagctgatcccccaggtgagaatcgaggacctgaagcagatgaaggcctacctgaagcacctgaagaagcagcagaaggagctgaacagcctgaagaagaagcacgccaaggagcacagcaccatgcagaagctgcactgcacccaggtggacaagatcgtggcccagtacgacaaggagaagagcacccacgagaagatcctggagaaggccatgaagaagaagggcggcagcaactgcctggagatgaagaaggagaccgagatcaagatccagaccctgaccagcgaccacaagagcaaggtgaaggagatcgtggcccagcacaccaaggagtggagcgagatgatcaacacccacagcgccgaggagcaggagatcagagacctgcacctgagccagcagtgcgagctgctgaagaagctgctgatcaacgcccacgagcagcagacccagcagctgaagctgagccacgacagagagagcaaggagatgagagcccaccaggccaagatcagcatggagaacagcaaggccatcagccaggacaagagcatcaagaacaaggccgagagagagagaagagtgagagagctgaacagcagcaacaccaagaagttcctggaggagagaaagagactggccatgaagcagagcaaggagatggaccagctgaagaaggtgcagctggagcacctggagttcctggagaagcagaacgagcagctgctgaagagctgccacgccgtgagccagacccagggcgagggcgacgccgccgacggcgagatcggcagcagagacggcccccagaccagcaacagcagcatgaagctgcagaacgccaactag

SEQ ID NO: 17393 - protein, 737 aa, Artificial Sequence
  derived and/or modified sequence
MGGCTVKPQLLLLALVLHPWNPCLGADSEKPSSIPTDKLLVITVATKESDGFHRFMQSAKYFNYTVKVLGQGEEWRGGDGINSIGGGQKVRLMKEVMEHYADQDDLVVMFTECFDVIFAGGPEEVLKKFQKANHKVVFAADGILWPDKRLADKYPVVHIGKRYLNSGGFIGYAPYVNRIVQQWNLQDNDDDQLFYTKVYIDPLKREAINITLDHKCKIFQTLNGAVDEVVLKFENGKARAKNTFYETLPVAINGNGPTKILLNYFGNYVPNSWTQDNGCTLCEFDTVDLSAVDVHPNVSIGVFIEQPTPFLPRFLDILLTLDYPKEALKLFIHNKEVYHEKDIKVFFDKAKHEIKTIKIVGPEENLSQAEARNMGMDFCRQDEKCDYYFSVDADVVLTNPRTLKILIEQNRKIIAPLVTRHGKLWSNFWGALSPDGYYARSEDYVDIVQGNRVGVWNVPYMANVYLIKGKTLRSEMNERNYFVRDKLDPDMALCRNAREMGVFMYISNRHEFGRLLSTANYNTSHYNNDLWQIFENPVDWKEKYINRDYSKIFTENIVEQPCPDVFWFPIFSEKACDELVEEMEHYGKWSGGKHHDSRISGGYENVPTDDIHMKQVDLENVWLHFIREFIAPVTLKVFAGYYTKGFALLNFVVKYSPERQRSLRPHHDASTFTINIALNNVGEDFQGGGCKFLRYNCSIESPRKGWSFMHPGRLTHLHEGLPVKNGTRYIAVSFIDP

SEQ ID NO: 17394 - DNA, 2214 bp, Artificial Sequence
  derived and/or modified sequence
atggggggctgtacagtcaaaccccagctccttcttctcgctctggtgttacacccttggaacccctgtctaggtgccgactctgagaagccttcaagtatcccgacagacaagctgcttgtgataacagttgctaccaaagagagcgacggctttcacagattcatgcagtctgctaaatactttaactacacagtgaaagtccttgggcaaggagaagagtggcggggcggcgatggtattaatagcatcggtggggggcagaaagtccggcttatgaaagaagtgatggagcattatgccgatcaggacgatctggtcgtaatgtttaccgaatgctttgacgtcatatttgcaggaggaccagaggaggtcctaaagaagttccagaaagccaatcacaaagtggtcttcgccgccgatggcatcttatggcctgataagcgattagctgacaagtaccctgtggtccacatcggcaagagataccttaattccggaggctttattggttacgctccgtacgttaaccggatcgttcagcagtggaatctgcaggataatgacgatgaccagctattttacaccaaggtctatattgaccctcttaagcgcgaggcaattaatatcactctggaccacaagtgtaagatcttccagacactcaacggcgcggttgatgaggtcgtcctaaaattcgagaatggaaaagccagggccaagaacacattttacgaaacgctgcccgtcgctatcaatggtaacggtccaaccaagatactgttgaattactttgggaattacgttcctaactcgtggactcaagataacgggtgtaccttatgtgagttcgacacagtagatctttcagccgttgatgtccaccccaacgtatcgatcggggttttcatagaacagccaacgccatttctccctaggtttctagacatcctcctgacactggactatcccaaggaagcattgaagttgtttattcataacaaggaggtgtaccacgagaaggacattaaagtatttttcgacaaagcaaaacatgaaatcaagacaattaaaatcgtcggtcctgaggaaaacctgagtcaagcggaggctcggaacatgggaatggatttctgccggcaggatgagaaatgtgattattactttagcgtcgacgctgatgtggttcttactaaccccaggactctgaaaatcttgatcgagcagaaccgtaaaatcatagcgccactggtaaccagacatggcaaattgtggtccaacttttggggcgctctcagccctgatgggtattacgcaagatctgaggattacgtggatatcgtgcagggcaatcgggtcggagtctggaacgtcccttatatggctaatgtctacctgattaaggggaaaaccctccgctccgagatgaacgagcgtaattactttgttagagataaactggacccagatatggctctctgtaggaatgctcgcgaaatgggtgtcttcatgtatatcagcaacaggcacgagttcggcaggctgctgtctactgctaactataacaccagtcactacaataatgatctgtggcaaatctttgagaatccagtggactggaaggagaagtatatcaaccgggactactcaaaaattttcaccgagaacatagttgagcagccatgcccagatgttttctggtttcctatcttctcagagaaggcgtgcgacgagctggttgaagagatggaacactacggaaagtggtccggcggcaaacaccatgactccagaatctccggaggatacgagaacgtgcccacggatgacatccatatgaaacaagttgacctggagaatgtttggctccacttcatccgggaattcatcgcccctgtaactttaaaggttttcgctggatactacacaaagggctttgccttgcttaacttcgtggtcaagtattcaccagaaagacagcgatcgctgcgtccgcaccacgacgcttctacattcaccattaacattgccctgaacaacgtgggcgaggatttccagggtggggggtgtaaattccttcgctataattgttccatcgagtctccaaggaagggctggtcattcatgcatcctggtcgcctaacacatttacacgagggtctccccgtaaagaacggtacgcggtacatcgctgtctcctttatcgatccctag

SEQ ID NO: 17395 - DNA, 2214 bp, Artificial Sequence
  derived and/or modified sequence
atgggcggctgcaccgtgaagccccagctgctgctgctggccctggtgctgcacccctggaacccctgcctgggcgctgacagcgagaagcccagcagcatccccacagacaagctgctggtgatcaccgtggccaccaaggagagtgatggcttccaccgcttcatgcagagcgccaagtacttcaactacacagtgaaggtgctgggccagggcgaggagtggagaggaggagatggcatcaacagcatcggcggcggccagaaggtgcggctgatgaaggaggtgatggagcactatgctgaccaggatgacctggtggtgatgttcacagagtgctttgatgtgatctttgctgggggccctgaggaggtgctgaagaagttccagaaggccaaccacaaggtggtgtttgctgctgatggcatcctgtggccagacaagaggctggccgacaagtaccctgtggtgcacatcggcaagcgctacctgaacagcggcggcttcatcggctacgccccctacgtgaacagaattgtgcagcagtggaacctgcaggacaatgatgatgaccagctgttctacaccaaggtgtacatcgaccccctgaagcgggaggccatcaacatcaccctggaccacaagtgcaagatcttccagaccctgaatggagctgtggatgaggtggtgctgaagtttgaaaatggcaaggcccgggccaagaacaccttctatgagaccctgcctgtggccatcaatggaaatggccccaccaagatcctgctgaactactttggaaactacgtgcccaacagctggacccaggacaatggctgcaccctgtgtgaatttgacacagtggacctgtctgctgtggatgtgcaccccaacgtgtccattggagtcttcatcgagcagcccacccccttcctgccccgcttcctggacatcctgctgaccctggactaccccaaggaggccctgaagctgttcatccacaacaaggaggtgtaccacgagaaggacatcaaggtgttctttgacaaggccaagcatgagatcaagaccatcaagatcgtgggccctgaggagaacctgagccaggccgaggccaggaacatgggcatggacttctgccggcaggatgagaagtgtgactactacttctctgtggatgctgatgtggtgctgaccaaccccaggaccctgaagatcctgattgagcagaacaggaagatcatcgcccccctggtgaccaggcatggcaagctgtggagcaacttctggggcgccctgagcccagatggctactatgcccggtctgaggactatgtggacatcgtgcagggcaacagagtgggcgtgtggaatgtgccctacatggccaacgtgtacctgatcaagggcaagaccctgcggtctgagatgaatgaaagaaactactttgtgcgggacaagctggaccctgacatggccctgtgcagaaatgcccgggagatgggcgtcttcatgtacatcagcaacagacatgaatttggccgcctgctgagcacagccaactacaacaccagccactacaacaatgacctgtggcagatctttgaaaatcctgtggactggaaggagaagtacatcaacagagactacagcaagatcttcacagaaaatattgtggagcagccctgcccagatgtgttctggttccccatcttcagcgagaaggcctgtgatgagctggtggaggagatggagcactacggcaagtggagcggcggcaagcaccacgacagccgcatcagcggcggctatgaaaatgtgcccacagatgacatccacatgaagcaggtggacctggagaatgtgtggctgcacttcatccgggagttcatcgcccctgtgaccctgaaggtgtttgctggctactacaccaagggctttgccctgctgaactttgtggtgaagtacagccctgagcggcagaggagcctgcggccccaccatgatgccagcaccttcaccatcaacatcgccctgaacaacgtgggggaggacttccagggcggcggctgcaagttcctgcgctacaactgcagcattgagagccccaggaagggctggagcttcatgcaccctggccgcctgacccacctgcacgagggcctgcctgtgaagaatggcacccgctacatcgctgtgtccttcatcgacccctag

SEQ ID NO: 17396 - DNA, 2214 bp, Artificial Sequence
  derived and/or modified sequence
atgggcggctgcaccgtgaagccccagctgctgctgctggccctggtactgcatccatggaatccttgtctgggcgccgattctgaaaagccctcttcaattcctacagacaagctgctcgtgatcacggtggcaacaaaagaaagcgatggcttccaccggttcatgcagtccgctaagtattttaactacaccgtgaaggtcctgggacaaggcgaagagtggcgcggaggcgacggcattaactccattggcggaggacagaaggttcgcctgatgaaagaggttatggagcactacgccgaccaggatgacttggttgtaatgttcacagaatgttttgacgtaatttttgccggcggacccgaggaagtattaaagaagtttcagaaagccaatcacaaagtggtcttcgcagctgacggcatactctggcctgataagaggctcgccgacaaatatcccgtggtgcacattgggaagcggtacttaaatagcggtggctttatcgggtacgctccttatgtgaatcgaatcgtccagcagtggaaccttcaagataacgatgacgatcagctattctatacaaaggtgtatattgatccgctcaagagggaggccatcaacattacactggatcacaaatgcaaaatcttccagactttgaacggtgctgtagatgaggttgtgttgaaattcgagaacggaaaagcccgcgctaaaaataccttctacgaaaccctccccgtggctattaatggaaatggacccacgaagatcctgctgaactatttcggaaattatgtcccgaactcctggacccaggacaacggttgcacattgtgcgaattcgacacagtggatctgtcagccgtggacgtccaccctaacgtgtcaattggggtgtttattgagcagcccaccccctttctcccccgctttctggacattctgctgacgttggattaccctaaagaggctttaaagctgttcattcacaacaaggaagtctaccacgagaaggacattaaggttttctttgataaagctaaacacgagattaagaccatcaaaatcgtagggcccgaggagaatctctcacaagctgaagctcgcaatatgggcatggatttttgccgacaggacgaaaagtgcgactactacttttctgtggacgctgacgttgtgcttactaacccaagaaccctcaagattttgatagaacagaacagaaagatcatcgcccctctggtgacaaggcatggcaagctgtggtctaatttctggggggccctctcacccgacgggtactacgcccgatcagaggattatgtcgatattgtccaggggaaccgcgtcggcgtgtggaatgtaccgtatatggccaatgtttatttaatcaaaggtaagacgctccgttccgagatgaatgagcggaactacttcgtcagagacaaactcgatcccgacatggcactgtgcagaaatgctagggaaatgggcgtgttcatgtatatcagcaaccgccacgaattcggaagacttttgagtacagccaactataatacgtctcactacaacaacgacctctggcagattttcgagaatcccgtggattggaaagagaagtacataaaccgtgattattcgaaaatttttacagaaaacatcgtcgaacagccatgccctgacgtcttctggttcccaattttttctgaaaaggcctgtgatgaactggtggaagagatggagcattacggaaagtggtccggaggtaaacaccatgattctaggataagcggagggtacgagaatgtgcccacagacgatatccacatgaagcaggtggacttggaaaacgtttggttacacttcataagagaatttattgcccctgtgaccctgaaggtgttcgcagggtattatacaaagggctttgctctcctgaatttcgtggtcaagtactcccctgaaagacaacggtccctgcggcctcatcatgatgcaagtacgttcaccattaatatcgctctcaacaatgtcggagaagacttccaagggggagggtgtaaattcctgcgatacaattgtagcatcgaaagcccacgaaaagggtggtctttcatgcaccctgggaggctaactcacctccacgagggactgcccgtcaagaacggcacccgctacatcgctgtcagcttcatcgacccctag

SEQ ID NO: 17397 - DNA, 2214 bp, Artificial Sequence
  derived and/or modified sequence
atggggggatgtacagtcaaaccgcagttgctcctcttggctctggtactacatccctggaatccttgcctgggcgctgactctgaaaagccctccagtatccccaccgacaaactgctggttattaccgtcgcgacaaaggaatcagacgggttccaccgtttcatgcaaagcgccaagtatttcaactatacagtgaaggtcctgggacagggcgaggagtggcgcggaggagacgggatcaactcaatcggcggagggcaaaaggttaggctgatgaaggaggtaatggaacattacgccgaccaggatgacctggtcgttatgttcactgaatgtttcgatgtaattttcgcgggtggtcccgaggaggtgctcaagaagtttcagaaagcaaaccacaaggtggtgtttgccgctgatggtatactatggccagacaagaggctcgccgataagtatcctgtggtgcatattgggaagaggtacctcaattcagggggatttataggatacgctccttacgtgaatcggattgtgcaacagtggaatctgcaggataatgacgacgatcagcttttctataccaaggtttacatagatccccttaaaagagaggccatcaatattactctcgaccacaagtgcaagatatttcagacactgaacggcgcagtggatgaggttgtcctgaagtttgaaaacggcaaggcccgtgctaagaacaccttttacgaaacgctacctgtcgcaataaacggcaatggcccaaccaaaatcttacttaactacttcggcaattatgtgcctaatagctggacgcaggacaatgggtgcacactgtgtgaattcgatacagttgatttaagtgccgtcgatgtccatcccaatgtgtccataggggtcttcatagaacaacccacgccctttctgccaaggttcctcgatattcttcttaccttggactatcccaaggaggcattgaagttgttcatacacaataaggaggtgtaccacgagaaagacatcaaagttttcttcgacaaagccaagcacgaaatcaaaactattaagatcgtgggaccagaagaaaatctatcccaggctgaggccaggaatatggggatggacttctgccggcaggacgaaaagtgcgattattatttttcagtcgatgccgatgtggtcctgacaaatccaaggacactgaaaattctgatagagcaaaacagaaaaatcatcgcaccactcgtgacaaggcacggaaaactctggtcaaatttttggggtgcattgtcaccggatgggtattatgctcggtccgaagactatgtcgatatcgtgcaagggaacagggtgggggtgtggaacgttccctacatggcaaatgtgtatctcatcaagggcaaaaccttgcgctccgagatgaacgagaggaactactttgttcgggacaaactcgaccccgatatggccctgtgccgtaatgccagggagatgggcgtgttcatgtatatctcgaataggcatgaatttggcagacttcttagcacagcaaattataacacttcccactacaacaacgacttgtggcagatatttgaaaatcccgtggattggaaggagaagtatatcaatcgtgactactctaaaatatttactgagaacatcgtggaacagccctgcccagacgtgttctggttccccatcttctctgagaaggcctgcgacgagctggtcgaagagatggagcattacggtaaatggagcggtggtaaacaccacgattctcggatctccgggggatatgagaatgtgcccaccgacgacattcatatgaagcaggtggacttggagaacgtctggctccattttattcgagaattcattgcccctgtgactctcaaggtatttgcaggctactataccaaaggctttgcactcctgaacttcgttgtgaaatattctccagaacggcaaagaagcctgcgccctcaccacgacgcatccacctttaccattaacatcgcgttgaataacgtgggggaagacttccaggggggagggtgtaagttccttaggtacaattgttccatagagtcccctaggaaaggctggtcttttatgcaccctggacgcctgacccaccttcatgagggcctcccagtaaaaaacggtacccggtacatcgcagtcagcttcattgacccatag

SEQ ID NO: 17398 - DNA, 3665 bp, Artificial Sequence
  derived and/or modified sequence
ccgacgacctcactcagctgcgttacgcgccgctccggctgccggccgcgcgccttgcccgccggctcccgcccgcaatcggcggctcagggcggacccgggtctctgcgttctcgcgagaagcgcggcgctgcggggccgtgggcgcctgagcccgcgcggccctcgagggccgaatatggggggatgcacggtgaagcctcagctgctgctcctggcgctcgtcctccacccctggaatccctgtctgggtgcggactcggagaagccctcgagcatccccacagataaattattagtcataactgtagcaacaaaagaaagtgatggattccatcgatttatgcagtcagccaaatatttcaattatactgtgaaggtccttggtcaaggagaagaatggagaggtggtgatggaattaatagtattggagggggccagaaagtgagattaatgaaagaagtcatggaacactatgctgatcaagatgatctggttgtcatgtttactgaatgctttgatgtcatatttgctggtggtccagaagaagttctaaaaaaattccaaaaggcaaaccacaaagtggtctttgcagcagatggaattttgtggccagataaaagactagcagacaagtatcctgttgtgcacattgggaaacgctatctgaattcaggaggatttattggctatgctccatatgtcaaccgtatagttcaacaatggaatctccaggataatgatgatgatcagctcttttacactaaagtttacattgatccactgaaaagggaagctattaacatcacattggatcacaaatgcaaaattttccagaccttaaatggagctgtagatgaagttgttttaaaatttgaaaatggcaaagccagagctaagaatacattttatgaaacattaccagtggcaattaatggaaatggacccaccaagattctcctgaattattttggaaactatgtacccaattcatggacacaggataatggctgcactctttgtgaattcgatacagtcgacttgtctgcagtagatgtccatccaaacgtatcaataggtgtttttattgagcaaccaaccccttttctacctcggtttctggacatattgttgacactggattacccaaaagaagcacttaaactttttattcataacaaagaagtttatcatgaaaaggacatcaaggtattttttgataaagctaagcatgaaatcaaaactataaaaatagtaggaccagaagaaaatctaagtcaagcggaagccagaaacatgggaatggacttttgccgtcaggatgaaaagtgtgattattactttagtgtggatgcagatgttgttttgacaaatccaaggactttaaaaattttgattgaacaaaacagaaagatcattgctcctcttgtaactcgtcatggaaagctgtggtccaatttctggggagcattgagtcctgatggatactatgcacgatctgaagattatgtggatattgttcaagggaatagagtaggagtatggaatgtcccatatatggctaatgtgtacttaattaaaggaaagacactccgatcagagatgaatgaaaggaactattttgttcgtgataaactggatcctgatatggctctttgccgaaatgctagagaaatgggtgtatttatgtacatttctaatagacatgaatttggaaggctattatccactgctaattacaatacttcccattataacaatgacctctggcagatttttgaaaatcctgtggactggaaggaaaagtatataaaccgtgattattcaaagattttcactgaaaatatagttgaacagccctgtccagatgtcttttggttccccatattttctgaaaaagcctgtgatgaattggtagaagaaatggaacattacggcaaatggtctgggggaaaacatcatgatagccgtatatctggtggttatgaaaatgtcccaactgatgatatccacatgaagcaagttgatctggagaatgtatggcttcattttatccgggagttcattgcaccagttacactgaaggtctttgcaggctattatacgaagggatttgcactactgaattttgtagtaaaatactcccctgaacgacagcgttctcttcgtcctcatcatgatgcttctacatttaccataaacattgcacttaataacgtgggagaagactttcagggaggtggttgcaaatttctaaggtacaattgctctattgagtcaccacgaaaaggctggagcttcatgcatcctgggagactcacacatttgcatgaaggacttcctgttaaaaatggaacaagatacattgcagtgtcatttatagatccctaagttatttacttttcattgaattgaaatttattttggatgaatgactggcatgaacacgtctttgaagttgtggctgagaagatgagaggaatatttaaataacatcaacagaacaacttcactttgggccaaacatttgaaaaactttttataaaaaattgtttgatatttcttaatgtctgctctgagccttaaaacacagattgaagaagaaaagaaagaaaaaacttaaatatttatttctatgctttgttgcctctgagaataatgacaatttatgaatttgtgtttcaaattgataaaatatttaggtacaaataacaagactaataatattttcttatttaaaaaaagcatgggaagatttttatttatcaaaatatagaggaaatgtagacaaaatggatataaatgaaaattaccatgttgtaaaaccttgaaaatcagattctaactggatttgtatgcaactaagtatttttctgaacacctatgcaggtcttatttacagtagttactaagggaacacacaaagaattacacaacgttttcctcaagaaaatggtacaaaacacaaccgaggagcgtatacagttgaaaacatttttgttttgattggaaggcagattattttatattagtattaaaaatcaaaccctatgtttctttcagatgaatcttccaaagtggattatattaagcaggtattagatttaggaaaacctttccatttcttaaagtattatcaagtgtcaagatcagcaagtgtccttaagtcaaacaggttttttttgttgttgtttttgctttgtttccttttttagaaagttctagaaaataggaaaacgaaaaatttcattgagatgagtagtgcatttaattattttttaaaaaactttttaagtacttgaattttatatcaggaaaacaaagttgttgagccttgcttcttccgttttgccctttgtctcgctccttattctttttttggggggagggttatttgcttttttatcttcctggcataatttccattttattcttctgagtgtctatgttaacttccctctatcccgcttataaaaaaattctccaacaaaaatacttgttgacttgatgttttatcacttctctaagtaaggttgaaatatccttattgtagctactgtttttaatgtaaaggttaaacttgaaaagaaattcttaatcacggtgccaaaattcattttctaacaccatgtgttagaaaattataaaaaataaaataatttta

SEQ ID NO: 17399 - DNA, 2214 bp, Artificial Sequence
  derived and/or modified sequence
atgggaggatgcacggtgaaaccacagctgctactgttggcattggtacttcatccatggaacccttgtctgggggccgattccgaaaagccttcctcgatccccacagataaactgctcgtgattactgtggcgacaaaggaatccgacggcttccatcgcttcatgcaatcagcgaagtactttaattacactgtgaaggtgcttggccagggggaggaatggagaggaggcgatggtatcaatagcatcggtggaggccagaaggtacggctcatgaaagaggtcatggaacattacgccgatcaggacgaccttgtcgttatgttcacggagtgcttcgatgtcatttttgcaggtggcccagaagaagtgttaaagaagtttcagaaggcgaatcataaggtcgtgtttgctgccgacggcatcttgtggcccgataagcgcctagccgataaatatccagtagtacacatagggaaacggtacctgaatagtgggggcttcattggatacgcgccatatgtcaacagaatcgttcaacaatggaacttgcaggataacgacgatgaccagctcttttatactaaagtgtacatagacccattaaagcgtgaagcaataaatattacactggaccacaagtgcaaaatcttccaaactcttaatggagcggtcgatgaagtggtgttgaaatttgagaatggcaaagctagagcaaagaacaccttctacgagactttgcccgtagctatcaatggcaatggaccaacaaagattcttctaaactatttcgggaactatgttcccaattcttggactcaagataatggatgtaccctttgcgagtttgatacagtcgatttatctgctgtggacgtgcatcctaacgtctccattggggtattcatcgagcagcctacacctttccttccccgctttctggatatattactcaccttagactatccaaaggaggctttgaaacttttcatacataataaagaagtgtaccacgaaaaagacataaaggtgttctttgacaaagccaaacatgaaattaagacaatcaaaattgtcggtccagaggagaacctctcgcaggccgaagctcgcaatatgggaatggatttctgccgccaggacgagaagtgtgactactacttttccgtagatgcagacgtggttctcaccaaccccagaactctgaagatactcattgaacagaacagaaagatcatcgctccgctggttacacggcatggcaaattgtggagcaatttttggggcgctcttagccccgacggatactacgctcggtcagaagattatgtcgatatcgtgcagggaaaccgcgtaggagtgtggaacgtaccttatatggccaatgtctatctcatcaaaggtaagactctgagaagcgaaatgaatgaaaggaattatttcgttagagacaaactcgaccctgacatggctctttgccggaacgctagagagatgggggtgtttatgtacatttctaaccgccacgagttcggcaggctgctaagtactgcaaattacaatactagccattacaataatgatctgtggcagatcttcgagaatcctgttgactggaaagaaaagtatatcaaccgtgattattctaagatttttacagaaaatatcgtggaacagccatgtcctgacgtgttctggttcccgatcttttctgagaaagcatgtgatgaactcgtagaagagatggagcactatggtaagtggagtggaggcaaacatcacgacagcagaatctctggaggctacgagaacgtaccaacagacgacatccacatgaaacaggtggacctcgagaacgtgtggctccattttatccgagaatttattgcgcccgtgactctgaaagtgttcgcgggttattacaccaaagggttcgccttgcttaactttgtggttaagtattctcctgagcgccagaggagtctcagaccccatcacgacgcttcgacattcacaatcaatatagcactcaacaatgttggagaagattttcaaggcggcggttgcaaattcctgcggtacaactgctcgatcgagagccctcgaaagggttggagctttatgcatccaggaaggctgacacacctccacgaaggattgcccgtcaagaatggcacccgctatattgccgttagcttcattgatccatag

SEQ ID NO: 17400 - DNA, 2214 bp, Artificial Sequence
  derived and/or modified sequence
atgggaggctgcaccgtcaaaccacaactgctgctactggccctggtcttgcacccctggaacccttgcctgggcgcggatagcgagaaaccctccagcattccaaccgataaactgctggtgattacagttgctacaaaagagtctgacggcttccacaggtttatgcagagtgccaaatattttaattacactgtgaaggtccttggtcaaggggaagagtggcgggggggcgatggtatcaatagtattgggggcggacaaaaggtaagactgatgaaagaggtgatggaacactatgcagaccaagacgacctcgttgtgatgttcaccgaatgctttgatgttatctttgccggtggccccgaggaggtccttaagaaatttcaaaaagccaatcataaagtggtatttgccgcggatggaatcctgtggcctgataagcggcttgccgataagtatcctgttgtccacatcggtaaacgctacctgaacagcggcggcttcatcggatacgccccctacgtgaatcgtatcgtgcaacagtggaatttacaagacaacgacgatgatcaactgttttataccaaagtgtacatcgacccgctaaagcgggaagccattaacatcaccctcgatcataaatgtaaaattttccagaccctgaacggagccgtggatgaagtagtgcttaaattcgagaacggcaaagcacgtgcgaaaaacacattttacgaaaccctcccagtcgcgattaatggaaatggccccacaaagattctgctaaattattttggcaattacgtcccaaatagttggacccaagacaacggatgtaccctgtgtgaattcgatactgttgacctgtctgctgttgacgtccatcccaatgtctctatcggagtgttcattgaacagcctacccccttccttccccgtttcctcgatattctcctcaccctcgattaccccaaagaggctctcaagctgttcattcataacaaggaggtgtaccacgaaaaagacataaaggtgttcttcgataaagcgaaacatgagataaagaccatcaagatcgtgggccccgaagaaaatctctcccaggctgaggccaggaacatgggaatggacttttgccggcaggatgaaaaatgcgactattacttttctgtcgacgccgatgttgttttaacaaaccctagaacactaaaaatcctgattgaacagaacaggaaaataatcgccccactggtcacacgacacggcaagctgtggtccaatttttggggggccctctcacccgatggatattatgcacggtctgaggattacgtcgacattgttcaaggtaacagagttggggtctggaatgtaccttacatggcaaatgtgtatctaataaaaggtaaaacacttcgtagcgagatgaatgaacgaaactattttgtccgggataaactggatcctgatatggccctttgtcgcaatgcacgggagatgggagtcttcatgtacatttctaatcgccacgaatttggtcgcctcctgtccaccgctaactataacacctcccattataacaacgatctgtggcaaatttttgagaacccagtcgactggaaggagaagtatattaaccgagactatagcaagatcttcacagagaatattgttgaacagccctgtccagacgtgttttggttcccgattttttcagaaaaagcctgcgatgaacttgtcgaagaaatggagcattatggcaaatggtccggcggtaagcaccacgatagccggatctccggagggtatgagaatgtgccaactgatgacatccacatgaagcaggtggatttagaaaacgtctggctccatttcatccgtgagttcatcgcacccgttacattaaaggttttcgccggttactacactaagggctttgctctgttaaatttcgtcgtgaagtacagtcctgaacgccaaagaagtctccgaccacaccacgacgcctccacctttacaattaacattgccttgaataatgtgggggaggattttcaaggaggaggttgcaagttcttgagatacaattgctccatagaaagccctagaaaaggatggtcattcatgcatccaggccgactcacccatctccatgagggcctccctgtcaaaaatggaacccgttatattgccgtgtcctttatcgacccctag

SEQ ID NO: 17401 - DNA, 2214 bp, Artificial Sequence
  derived and/or modified sequence
atgggcggctgcaccgtgaagccccagctgctgctgctggccctggtgctgcacccctggaacccctgcctgggcgccgacagcgagaagcccagcagcatccccaccgacaagctgctggtgatcaccgtggccaccaaggagagcgacggcttccacagattcatgcagagcgccaagtacttcaactacaccgtgaaggtgctgggccagggcgaggagtggagaggcggcgacggcatcaacagcatcggcggcggccagaaggtgagactgatgaaggaggtgatggagcactacgccgaccaggacgacctggtggtgatgttcaccgagtgcttcgacgtgatcttcgccggcggccccgaggaggtgctgaagaagttccagaaggccaaccacaaggtggtgttcgccgccgacggcatcctgtggcccgacaagagactggccgacaagtaccccgtggtgcacatcggcaagagatacctgaacagcggcggcttcatcggctacgccccctacgtgaacagaatcgtgcagcagtggaacctgcaggacaacgacgacgaccagctgttctacaccaaggtgtacatcgaccccctgaagagagaggccatcaacatcaccctggaccacaagtgcaagatcttccagaccctgaacggcgccgtggacgaggtggtgctgaagttcgagaacggcaaggccagagccaagaacaccttctacgagaccctgcccgtggccatcaacggcaacggccccaccaagatcctgctgaactacttcggcaactacgtgcccaacagctggacccaggacaacggctgcaccctgtgcgagttcgacaccgtggacctgagcgccgtggacgtgcaccccaacgtgagcatcggcgtgttcatcgagcagcccacccccttcctgcccagattcctggacatcctgctgaccctggactaccccaaggaggccctgaagctgttcatccacaacaaggaggtgtaccacgagaaggacatcaaggtgttcttcgacaaggccaagcacgagatcaagaccatcaagatcgtgggccccgaggagaacctgagccaggccgaggccagaaacatgggcatggacttctgcagacaggacgagaagtgcgactactacttcagcgtggacgccgacgtggtgctgaccaaccccagaaccctgaagatcctgatcgagcagaacagaaagatcatcgcccccctggtgaccagacacggcaagctgtggagcaacttctggggcgccctgagccccgacggctactacgccagaagcgaggactacgtggacatcgtgcagggcaacagagtgggcgtgtggaacgtgccctacatggccaacgtgtacctgatcaagggcaagaccctgagaagcgagatgaacgagagaaactacttcgtgagagacaagctggaccccgacatggccctgtgcagaaacgccagagagatgggcgtgttcatgtacatcagcaacagacacgagttcggcagactgctgagcaccgccaactacaacaccagccactacaacaacgacctgtggcagatcttcgagaaccccgtggactggaaggagaagtacatcaacagagactacagcaagatcttcaccgagaacatcgtggagcagccctgccccgacgtgttctggttccccatcttcagcgagaaggcctgcgacgagctggtggaggagatggagcactacggcaagtggagcggcggcaagcaccacgacagcagaatcagcggcggctacgagaacgtgcccaccgacgacatccacatgaagcaggtggacctggagaacgtgtggctgcacttcatcagagagttcatcgcccccgtgaccctgaaggtgttcgccggctactacaccaagggcttcgccctgctgaacttcgtggtgaagtacagccccgagagacagagaagcctgagaccccaccacgacgccagcaccttcaccatcaacatcgccctgaacaacgtgggcgaggacttccagggcggcggctgcaagttcctgagatacaactgcagcatcgagagccccagaaagggctggagcttcatgcaccccggcagactgacccacctgcacgagggcctgcccgtgaagaacggcaccagatacatcgccgtgagcttcatcgacccctag

SEQ ID NO: 17402 - protein, 465 aa, Artificial Sequence
  derived and/or modified sequence
MLPLWTLSLLLGAVAGKEVCYERLGCFSDDSPWSGITERPLHILPWSPKDVNTRFLLYTNENPNNFQEVAADSSSISGSNFKTNRKTRFIIHGFIDKGEENWLANVCKNLFKVESVNCICVDWKGGSRTGYTQASQNIRIVGAEVAYFVEFLQSAFGYSPSNVHVIGHSLGAHAAGEAGRRTNGTIGRITGLDPAEPCFQGTPELVRLDPSDAKFVDVIHTDGAPIVPNLGFGMSQVVGHLDFFPNGGVEMPGCKKNILSQIVDIDGIWEGTRDFAACNHLRSYKYYTDSIVNPDGFAGFPCASYNVFTANKCFPCPSGGCPQMGHYADRYPGKTNDVGQKFYLDTGDASNFARWRYKVSVTLSGKKVTGHILVSLFGNKGNSKQYEIFKGTLKPDSTHSNEFDSDVDVGDLQMVKFIWYNNVINPTLPRVGASKIIVETNVGKQFNFCSPETVREEVLLTLTPC

SEQ ID NO: 17403 - DNA, 1398 bp, Artificial Sequence
  derived and/or modified sequence
atgctgcctctctggacactgagcctgctcttgggggccgttgcgggaaaggaagtgtgctacgagcggcttggctgtttttctgatgattccccttggtctggcattacagagagacctctacacattctgccttggtctcctaaagatgttaacacacgatttctgctttacactaacgagaaccccaacaactttcaggaggtggcagccgatagctcatccatctcgggcagtaatttcaaaaccaatcgcaaaacaaggtttattatacatgggtttatagacaagggagaggagaattggctagccaatgtctgcaaaaacctcttcaaagtagagagtgtgaactgtatttgtgtcgactggaagggcggctcaaggacaggctatactcaggcaagccaaaacattcggatcgtgggagcagaggtggcctactttgtagaattcctccagagtgctttcggctattccccatccaatgtgcacgtcattgggcactccttaggagctcacgccgctggagaggctggtagacgcacaaacggcactataggccgcattacagggctggaccccgctgaaccatgttttcaaggaacccctgagttagtcagactcgatcctagcgacgctaaatttgtagatgtgattcatactgatggggcccctatcgtgcccaatcttggattcggcatgtcccaggtggttggtcacctggatttcttccctaatgggggagtagagatgccgggatgtaagaaaaacatactgtctcagatcgtagatatcgatggaatatgggagggcacaagagattttgctgcttgtaaccacctgaggtcttataagtattacactgacagcatcgtgaatccagatggttttgccggctttccatgtgccagctacaacgtttttaccgcgaacaaatgttttccgtgtccctcaggcgggtgccctcagatgggacactatgctgaccgctaccctggcaaaaccaacgatgtgggccagaaattttatttagacacaggagatgcctcgaatttcgctcggtggagatataaggtttccgtgaccttatctgggaaaaaggtgacaggtcatattctggtgagcctcttcggcaacaagggtaattcgaagcagtacgagatcttcaagggcacactgaagcccgattctactcattccaatgagtttgatagcgatgtggacgtgggagatcttcagatggttaaattcatttggtataacaacgtgataaaccctacccttcctagggtcggcgcctctaagattatcgtcgagactaacgttggtaagcagttcaacttctgttcacccgagaccgtaagggaggaagttttactgaccctgactccttgctag

SEQ ID NO: 17404 - DNA, 1398 bp, Artificial Sequence
  derived and/or modified sequence
atgctgcccctgtggaccctgagcctgctgctgggcgctgtggccggcaaggaggtgtgctatgagcggctgggctgcttcagtgatgacagcccctggagcggcatcacagagcggcccctgcacatcctgccctggagccccaaggatgtgaacacccgcttcctgctgtacaccaatgaaaaccccaacaacttccaggaggtggccgctgacagcagcagcatcagcggcagcaacttcaagaccaacaggaagacccgcttcatcatccacggcttcatcgacaagggggaggagaactggctggccaacgtgtgcaagaacctcttcaaggtggagagcgtgaactgcatctgtgtggactggaagggcggcagcaggacaggctacacccaggccagccagaacatccgcatcgtgggcgctgaggtggcctactttgtggagttcctgcagagcgccttcggctacagccccagcaatgtgcacgtgattggccacagcctgggcgcccacgccgccggggaggccggccgccgcaccaacggcaccatcggccgcatcaccggcctggaccctgctgagccctgcttccagggcaccccagagctggtgcggctggaccccagtgatgccaagtttgtggatgtgatccacacagatggagcccccatcgtgcccaacctgggcttcggcatgagccaggtggtgggccacctggacttcttccccaacggcggcgtggagatgcctggctgcaagaagaacatcctgagccagatcgtggacattgatggcatctgggagggcacccgggactttgctgcctgcaaccacctgcggagctacaagtactacacagacagcatcgtgaacccagatggctttgctggcttcccctgtgccagctacaacgtgttcaccgccaacaagtgcttcccctgccccagcggcggctgcccccagatgggccactacgccgaccgctacccaggcaagaccaatgatgtgggccagaagttctacctggacacaggagatgccagcaactttgcccgctggagatacaaggtgtctgtgaccctgagcggcaagaaggtgacaggccacatcctggtgtccctgtttggaaacaagggcaacagcaagcagtatgagatcttcaagggcaccctgaagccagacagcacccacagcaatgaatttgacagtgatgtggatgtgggggacctgcagatggtgaagttcatctggtacaacaacgtcatcaaccccaccctgccccgggtgggcgccagcaagatcatcgtggagaccaacgtgggcaagcagttcaacttctgcagccctgagaccgtgcgggaggaggtgctgctgaccctgaccccctgctag

SEQ ID NO: 17405 - DNA, 1398 bp, Artificial Sequence
  derived and/or modified sequence
atgctgcccctgtggaccctgagcctgctgctgggcgccgtggccggtaaagaagtatgttatgagagactcgggtgttttagcgacgacagcccttggtctggaattaccgaacggcctctccacatcctcccgtggtcccccaaggacgttaatactagattcttgctttataccaatgaaaatccaaacaattttcaggaggtagctgcggactcttcgagtatctcaggttcaaattttaaaaccaataggaaaactaggtttattatacatggcttcatcgataagggtgaggagaattggctggcaaacgtctgcaagaacctgtttaaggtcgagtccgtgaattgcatctgtgtagattggaagggaggttctagaactggctatacgcaggcctctcagaacattaggatagtgggggctgaggtcgcttattttgtcgagttcttgcagtcagctttcggttattccccgagcaatgtccacgtgattgggcatagcctgggcgcacatgctgccggggaggcaggccgaagaaccaatggtacaattggcagaatcacaggtctggacccagccgagccctgttttcagggcacacccgagcttgtgcgcctggatccatccgatgccaaatttgtcgacgtcatccataccgatggggcgccaattgtacccaatctcggattcggcatgagccaggtagtgggtcacctcgatttctttccaaacggcggagtggaaatgccaggctgcaaaaagaatatcttgagccagatagtggatatcgacggtatctgggagggtacaagagactttgccgcctgcaaccacctgcgctcttacaagtattacaccgactccatagtgaatcccgatggtttcgcaggtttcccctgcgcgtcctataacgttttcacagcaaataagtgtttcccctgtccatctggggggtgtccccagatgggacactatgctgataggtacccgggtaagaccaacgacgtgggacagaagttttatctggacactggcgatgcgtcaaattttgctagatggcgctacaaagtctccgtgacgctctctggcaaaaaagtgaccgggcatattctggtgtctttgtttggcaacaagggaaacagcaaacagtatgagattttcaaaggcacccttaagcccgattccacacatagtaacgaattcgattccgatgtcgacgtgggggacctgcagatggtcaaattcatctggtataacaacgtaatcaaccctacactgccaagagtcggagcaagcaaaatcatagtcgagaccaacgtagggaaacagtttaacttctgctcaccagagacagttcgcgaagaggtgcttctcacactgactccttgttag

SEQ ID NO: 17406 - DNA, 1483 bp, Artificial Sequence
  derived and/or modified sequence
gcgtgtggaacctgacggaactgccacgatgctgccactttggactctttcactgctgctgggagcagtagcaggaaaagaagtttgctacgaaagactcggctgcttcagtgatgactccccatggtcaggaattacggaaagacccctccatatattgccttggtctccaaaagatgtcaacacccgcttcctcctatatactaatgagaacccaaacaactttcaagaagttgccgcagattcatcaagcatcagtggctccaatttcaaaacaaatagaaaaactcgctttattattcatggattcatagacaagggagaagaaaactggctggccaatgtgtgcaagaatctgttcaaggtggaaagtgtgaactgtatctgtgtggactggaaaggtggctcccgaactggatacacacaagcctcgcagaacatcaggatcgtgggagcagaagtggcatattttgttgaatttcttcagtcggcgttcggttactcaccttccaatgtgcatgtcattggccacagcctgggtgcccacgctgctggggaggctggaaggagaaccaatgggaccattggacgcatcacagggttggacccagcagaaccttgctttcagggcacacctgaattagtccgattggaccccagcgatgccaaatttgtggatgtaattcacacggatggtgcccccatagtccccaatttggggtttggaatgagccaagtcgtgggccacctagatttctttccaaatggaggagtggaaatgcctggatgtaaaaagaacattctctctcagattgtggacatagacggaatctgggaagggactcgagactttgcggcctgtaatcacttaagaagctacaaatattacactgatagcatcgtcaaccctgatggctttgctggattcccctgtgcctcttacaacgtcttcactgcaaacaagtgtttcccttgtccaagtggaggctgcccacagatgggtcactatgctgatagatatcctgggaaaacaaatgatgtgggccagaaattttatctagacactggtgatgccagtaattttgcacgttggaggtataaggtatctgtcacactgtctggaaaaaaggttacaggacacatactagtttctttgttcggaaataaaggaaactctaagcagtatgaaattttcaagggcactctcaaaccagatagtactcattccaatgaatttgactcagatgtggatgttggggacttgcagatggttaaatttatttggtataacaatgtgatcaacccaactttacctagagtgggagcatccaagattatagtggagacaaatgttggaaaacagttcaacttctgtagtccagaaaccgtcagggaggaagttctgctcaccctcacaccgtgttaggagactactgttatttgaccaatgaattgacttctaataaaatctagtggtgatgca

SEQ ID NO: 17407 - DNA, 1398 bp, Artificial Sequence
  derived and/or modified sequence
atgctgccactgtggactctctctttgcttttgggcgcagtggcgggtaaagaagtgtgttatgaaagactgggatgtttttcggacgatagtccttggtccgggattactgaacgcccattgcacatcttgccatggtcccccaaggatgtgaacactaggtttctcttgtataccaatgaaaatcccaacaatttccaggaagttgctgccgatagttcctcaatctccggcagtaattttaaaaccaacaggaagacccgcttcatcatccacggttttatcgacaagggcgaggagaactggctggctaacgtgtgcaagaacctctttaaagtggagtccgtcaactgtatatgtgtcgattggaaggggggatctcgtaccggctacacccaggctagccagaacatccggatcgtaggcgctgaggtggcctattttgtggagtttttgcagtccgcctttggctactcaccctcaaatgtgcacgttattggacattctctgggcgcacacgcggctggggaggctggcagacgtaccaacggcaccatcggcaggatcacaggactcgatcctgctgagccttgctttcagggcactccagagctggtgagactcgatccctcagacgcaaaattcgtggatgtaattcacacagacggcgctccaatagttcccaatctcggattcgggatgagtcaagtggtaggccacttagacttctttccgaacggcggtgtggagatgccgggatgtaagaaaaatatactgagtcagatcgtcgatatcgacggaatctgggaaggtactcgtgattttgcagcctgtaatcacctgagatcttacaaatactacactgatagcatcgtaaatccagacggttttgctggtttcccatgcgcttcctacaatgtattcactgccaacaaatgttttccatgtcctagcggaggatgcccacagatggggcattatgctgatcgctacccaggcaagactaacgacgttggtcaaaaattctacctcgacacgggggacgcaagtaacttcgccagatggcgctacaaggttagcgtgacccttagcggcaagaaggtaaccggacacatacttgtctctctgttcggcaacaagggaaattctaagcagtatgaaatcttcaagggaacattgaaaccagactccactcattctaatgagttcgactccgatgttgatgtgggggatctgcaaatggtcaagtttatttggtacaacaatgtgattaatccaacattacctagagtgggagcttcaaaaatcatagtggaaactaacgtggggaagcagtttaatttctgctcgcccgaaacagtccgcgaggaagtccttctgacattgaccccctgttag

SEQ ID NO: 17408 - DNA, 1398 bp, Artificial Sequence
  derived and/or modified sequence
atgctgcccctgtggaccctgagcctgctgctgggcgccgtggccggcaaggaggtgtgctacgagagactgggctgcttcagcgacgacagcccctggagcggcatcaccgagagacccctgcacatcctgccctggagccccaaggacgtgaacaccagattcctgctgtacaccaacgagaaccccaacaacttccaggaggtggccgccgacagcagcagcatcagcggcagcaacttcaagaccaacagaaagaccagattcatcatccacggcttcatcgacaagggcgaggagaactggctggccaacgtgtgcaagaacctgttcaaggtggagagcgtgaactgcatctgcgtggactggaagggcggcagcagaaccggctacacccaggccagccagaacatcagaatcgtgggcgccgaggtggcctacttcgtggagttcctgcagagcgccttcggctacagccccagcaacgtgcacgtgatcggccacagcctgggcgcccacgccgccggcgaggccggcagaagaaccaacggcaccatcggcagaatcaccggcctggaccccgccgagccctgcttccagggcacccccgagctggtgagactggaccccagcgacgccaagttcgtggacgtgatccacaccgacggcgcccccatcgtgcccaacctgggcttcggcatgagccaggtggtgggccacctggacttcttccccaacggcggcgtggagatgcccggctgcaagaagaacatcctgagccagatcgtggacatcgacggcatctgggagggcaccagagacttcgccgcctgcaaccacctgagaagctacaagtactacaccgacagcatcgtgaaccccgacggcttcgccggcttcccctgcgccagctacaacgtgttcaccgccaacaagtgcttcccctgccccagcggcggctgcccccagatgggccactacgccgacagataccccggcaagaccaacgacgtgggccagaagttctacctggacaccggcgacgccagcaacttcgccagatggagatacaaggtgagcgtgaccctgagcggcaagaaggtgaccggccacatcctggtgagcctgttcggcaacaagggcaacagcaagcagtacgagatcttcaagggcaccctgaagcccgacagcacccacagcaacgagttcgacagcgacgtggacgtgggcgacctgcagatggtgaagttcatctggtacaacaacgtgatcaaccccaccctgcccagagtgggcgccagcaagatcatcgtggagaccaacgtgggcaagcagttcaacttctgcagccccgagaccgtgagagaggaggtgctgctgaccctgaccccctgctag

SEQ ID NO: 17409 - protein, 1970 aa, Artificial Sequence
  derived and/or modified sequence
MHGGGPPSGDSACPLRTIKRVQFGVLSPDELKRMSVTEGGIKYPETTEGGRPKLGGLMDPRQGVIERTGRCQTCAGNMTECPGHFGHIELAKPVFHVGFLVKTMKVLRCVCFFCSKLLVDSNNPKIKDILAKSKGQPKKRLTHVYDLCKGKNICEGGEEMDNKFGVEQPEGDEDLTKEKGHGGCGRYQPRIRRSGLELYAEWKHVNEDSQEKKILLSPERVHEIFKRISDEECFVLGMEPRYARPEWMIVTVLPVPPLSVRPAVVMQGSARNQDDLTHKLADIVKINNQLRRNEQNGAAAHVIAEDVKLLQFHVATMVDNELPGLPRAMQKSGRPLKSLKQRLKGKEGRVRGNLMGKRVDFSARTVITPDPNLSIDQVGVPRSIAANMTFAEIVTPFNIDRLQELVRRGNSQYPGAKYIIRDNGDRIDLRFHPKPSDLHLQTGYKVERHMCDGDIVIFNRQPTLHKMSMMGHRVRILPWSTFRLNLSVTTPYNADFDGDEMNLHLPQSLETRAEIQELAMVPRMIVTPQSNRPVMGIVQDTLTAVRKFTKRDVFLERGEVMNLLMFLSTWDGKVPQPAILKPRPLWTGKQIFSLIIPGHINCIRTHSTHPDDEDSGPYKHISPGDTKVVVENGELIMGILCKKSLGTSAGSLVHISYLEMGHDITRLFYSNIQTVINNWLLIEGHTIGIGDSIADSKTYQDIQNTIKKAKQDVIEVIEKAHNNELEPTPGNTLRQTFENQVNRILNDARDKTGSSAQKSLSEYNNFKSMVVSGAKGSKINISQVIAVVGQQNVEGKRIPFGFKHRTLPHFIKDDYGPESRGFVENSYLAGLTPTEFFFHAMGGREGLIDTAVKTAETGYIQRRLIKSMESVMVKYDATVRNSINQVVQLRYGEDGLAGESVEFQNLATLKPSNKAFEKKFRFDYTNERALRRTLQEDLVKDVLSNAHIQNELEREFERMREDREVLRVIFPTGDSKVVLPCNLLRMIWNAQKIFHINPRLPSDLHPIKVVEGVKELSKKLVIVNGDDPLSRQAQENATLLFNIHLRSTLCSRRMAEEFRLSGEAFDWLLGEIESKFNQAIAHPGEMVGALAAQSLGEPATQMTLNTFHYAGVSAKNVTLGVPRLKELINISKKPKTPSLTVFLLGQSARDAERAKDILCRLEHTTLRKVTANTAIYYDPNPQSTVVAEDQEWVNVYYEMPDFDVARISPWLLRVELDRKHMTDRKLTMEQIAEKINAGFGDDLNCIFNDDNAEKLVLRIRIMNSDENKMQEEEEVVDKMDDDVFLRCIESNMLTDMTLQGIEQISKVYMHLPQTDNKKKIIITEDGEFKALQEWILETDGVSLMRVLSEKDVDPVRTTSNDIVEIFTVLGIEAVRKALERELYHVISFDGSYVNYRHLALLCDTMTCRGHLMAITRHGVNRQDTGPLMKCSFEETVDVLMEAAAHGESDPMKGVSENIMLGQLAPAGTGCFDLLLDAEKCKYGMEIPTNIPGLGAAGPTGMFFGSAPSPMGGISPAMTPWNQGATPAYGAWSPSVGSGMTPGAAGFSPSAASDASGFSPGYSPAWSPTPGSPGSPGPSSPYIPSPGGAMSPSYSPTSPAYEPRSPGGYTPQSPSYSPTSPSYSPTSPSYSPTSPNYSPTSPSYSPTSPSYSPTSPSYSPTSPSYSPTSPSYSPTSPSYSPTSPSYSPTSPSYSPTSPSYSPTSPSYSPTSPSYSPTSPSYSPTSPSYSPTSPSYSPTSPSYSPTSPNYSPTSPNYTPTSPSYSPTSPSYSPTSPNYTPTSPNYSPTSPSYSPTSPSYSPTSPSYSPSSPRYTPQSPTYTPSSPSYSPSSPSYSPASPKYTPTSPSYSPSSPEYTPTSPKYSPTSPKYSPTSPKYSPTSPTYSPTTPKYSPTSPTYSPTSPVYTPTSPKYSPTSPTYSPTSPKYSPTSPTYSPTSPKGSTYSPTSPGYSPTSPTYSLTSPAISPDDSDEEN

SEQ ID NO: 17410 - DNA, 88 bp, Artificial Sequence
  derived and/or modified sequence
agcaacttcagcaaagtatcaggatacaaaatcaatgtacaaaaatcccaagcattcttatacaccaacaacagacaaacagagagcc

SEQ ID NO: 17411 - DNA, 5913 bp, Artificial Sequence
  derived and/or modified sequence
atgcacggagggggccccccttcaggcgattccgcttgtcccctacgtaccatcaagcgcgttcagttcggtgtgttgtctcctgatgaattaaaacggatgagtgtcactgagggagggatcaagtaccctgaaacaactgaggggggccggccaaaattgggtggtctcatggaccccagacagggagttatagagcgaaccgggaggtgtcagacttgcgctggaaacatgaccgagtgccccggtcactttggacatatcgaattagcaaagccggtctttcatgtaggctttttggtgaaaactatgaaggtgctccgctgcgtgtgctttttttgcagtaagctgcttgtggacagcaataacccgaaaatcaaggacatactggcaaagtccaagggacagccgaagaagcggttgactcacgtatatgacctttgcaaggggaaaaatatctgcgaagggggcgaagagatggacaataagttcggtgtcgagcaacccgaaggggatgaggatctaacaaaagaaaagggacatgggggatgtggcagataccaaccccgaatcaggcgctcaggcttggagctttacgccgaatggaaacacgtgaacgaggacagccaggaaaagaaaatcctcctttctccagagcgggtgcacgagatcttcaaacggatctccgacgaggaatgctttgtcctcgggatggaaccacgctacgcacgccccgaatggatgatcgtgacggtgctaccagtcccacccctatccgtgcgccctgctgttgtgatgcaaggatccgctagaaatcaggacgacttaacccataagctggcagatattgtgaagataaacaatcagctgagacgcaacgaacagaacggagcagccgcccacgtgatcgcagaagacgtaaaattgcttcagttccacgtcgccacgatggtggacaatgagctcccaggcctgccaagagcgatgcagaagtccggtagacctttgaaatctctgaagcagcggctcaaaggtaaagaaggacgggttagaggcaatttgatgggaaagcgtgtggacttttctgcaagaaccgtgataactcctgatcccaacctctccatcgatcaggtaggggtgccaaggagcattgccgccaacatgacgtttgccgagatcgtgacacctttcaatatcgatcgcctgcaggaactggtgcggcgcgggaatagccaatatcccggagcgaagtacataatacgggacaacggagacagaatcgatctgcgtttccaccccaaaccttcagatctgcacttgcagactggttataaggttgagcggcatatgtgcgacggagacatcgtaatcttcaaccgccaacctacgttacataagatgtctatgatgggccatagagtacggattctgccatggagcaccttcagactaaacctgagtgtcaccacaccctataatgctgatttcgatggggatgagatgaacttgcatctaccccaaagcttggaaactcgcgcagagatccaggaactggcaatggtacccaggatgattgtgacaccccagtctaacagacccgtaatggggatcgtccaggacaccctcacggccgtcagaaagtttaccaagcgtgacgtgttccttgagcggggtgaggtcatgaatctgctcatgttcctctctacatgggatggtaaagttccacaacctgctatcctgaagccaaggcccctctggaccggaaaacagatttttagtcttatcatccctggccacataaactgtatacggacccattctacccatcccgatgacgaggactctggtccgtataagcatattagccccggcgataccaaggtcgtcgtggaaaacggagaactcatcatgggcattctgtgtaaaaagtccctgggaactagcgctggatcccttgtgcatatatcctacctggaaatggggcacgacatcacccggttgttctactcgaacatccaaaccgtgatcaataactggttgctcatcgagggacacaccatcggtatcggcgactccatagccgatagcaagacatatcaggacattcagaacactataaagaaggctaagcaagatgtgatagaggtgattgagaaggcccacaataacgagcttgagcctactccaggcaacacattacggcaaacgtttgagaaccaggtaaaccggatcctgaacgacgccagagacaaaaccggctctagtgcgcaaaagtcccttagcgaatacaacaatttcaagtcgatggttgttagtggagctaaaggttctaagataaatattagtcaggtaattgccgttgtgggccagcagaacgtcgagggtaagagaattccttttggattcaagcaccgaactctgcctcattttattaaggatgactacggaccggaatctagagggttcgtcgagaactcttacctggcagggctcaccccgactgaatttttcttccacgctatggggggccgagaaggcttgatcgacacagccgtgaaaactgctgaaacagggtacattcaacgacgcttaatcaaatcaatggaatcagtgatggtcaagtatgatgcgaccgtccggaactccattaaccaagtggtgcagttgaggtacggggaggacggactggctggtgaaagcgtggaattccagaatctcgccacactcaagcctagcaacaaagccttcgaaaaaaagttccggtttgattacacaaacgaacgggctttaaggagaaccctgcaggaggacctggtgaaggatgtcctgagcaacgcccatatacagaatgagctcgaaagggaatttgagcgcatgcgcgaagatagagaggtgttgagagtcatattcccaaccggcgactctaaggtggtacttccttgcaacctgctgagaatgatatggaacgctcagaaaatatttcatataaatcccaggctgccttccgatcttcatcctatcaaggtagtggagggggtgaaagaattgtcaaagaagctggtgatcgtgaacggagacgaccccttatctagacaagcccaggagaacgccacactcctgttcaatatccacctaaggtcgaccctgtgttcccgcagaatggccgaagagtttcggctgtctggcgaagcattcgattggctgctgggcgagatcgaatcaaagttcaaccaagctattgcccatcctggcgaaatggttggggctttagccgcccagtctttgggagagccggcaacccagatgaccctcaataccttccactacgccggcgtttcagcgaagaacgttactctgggggttcccaggcttaaagaactgattaacatttctaaaaagccaaaaaccccctctcttactgtttttctgctgggacaatcagccagagacgcagagagagccaaggacattctatgccgcctcgaacatacaacactcaggaaagtgacggccaataccgccatctactatgaccccaatccccaatctactgtcgttgcagaagatcaggagtgggttaatgtgtattatgagatgcctgatttcgatgtagccaggatctccccatggctgctgcgcgtggagctggatcgcaaacatatgaccgaccggaaacttaccatggaacagatagccgaaaaaataaatgctggcttcggggacgaccttaactgcatctttaacgatgacaacgctgaaaaactggttctgcgcattagaataatgaacagcgacgagaataaaatgcaggaagaagaggaggtggtggacaaaatggatgatgatgtattcttgaggtgcatcgagtcaaatatgttaaccgatatgactctccagggcatcgaacaaatctcaaaagtctatatgcatcttcctcagaccgataataaaaaaaagattattatcaccgaggatggggaatttaaggctctgcaggagtggatcctggagactgacggcgtcagcctgatgcgcgtgttgtctgaaaaagacgtggatccagtgcggaccactagcaatgatattgttgaaatatttactgtgctgggcattgaggccgtgcgtaaagcactggagagagagctgtaccacgtaatttcattcgacggatcctacgtgaattataggcacctggctctgctctgcgatactatgacctgccgggggcacctgatggcgatcacacgccatggcgtaaaccgacaagacaccggcccccttatgaagtgcagtttcgaagaaaccgtagacgtcctaatggaggccgccgcgcatggtgagagcgaccccatgaaaggtgtgagcgagaacattatgttgggccaacttgctcctgccgggacaggctgcttcgacttacttctggacgcagagaagtgtaagtatggcatggagatccctacaaacatccccggactcggcgccgcaggtcccaccgggatgttttttggctctgctccaagccccatgggagggatttccccagcgatgactccatggaaccagggagctactccggcgtacggagcctggagtccatccgtcggctcaggaatgacacccggggcagccggctttagtccgtcggcagcgagtgatgcctccgggttctcaccgggttattcccccgcctggtcccccacaccagggtctcccggaagtccaggtcctagctccccatacatcccctctccagggggggcaatgtccccttcatacagccccacaagtcctgcttacgaacctcggtcccccggcggatacacaccccagagccccagttattctcccacaagtccctcatactctcccaccagcccgagctatagccccacctccccgaactactcccctacctcaccctcctacagtcctaccagcccgtcgtattcccctacctccccctcatactcccctacgagccccagttatagtcccacctctccttcttacagccccactagccccagctactcacccacttcaccaagctactcccccacaagccctagttacagcccaacatcccctagttactcccccacttccccgagctactcaccgacatctccttcgtactcgcccaccagcccttcctacagtcccacttcaccgtcctacagccctaccagcccaagctatagcccaacgtctccctcatactcacctacgtcgcctaattacagccccacttctccgaactacacccccacatccccctcttacagccccacaagtccctcctactctcctacttcaccaaactacaccccgacctccccgaactactctccaaccagcccttcttacagccccacaagtcccagttactcgccgacatctcctagctatagcccctcaagcccccgttacaccccccaaagtccaacttatacccccagctctccgagctatagcccttctagccccagctattctcctgcctctccgaaatatacccccactagcccctcctactcacctagcagtccagagtatactccaacttctcctaagtactccccaaccagtccaaagtacagtcctacttctcctaagtacagtcccacctcaccaacttacagccccaccaccccgaagtactcaccgacttcccctacatattccccaacgtccccagtttatacgcctaccagcccaaaatacagtcccacttccccaacatattcgccgacctcacccaagtatagccccacaagtcccacatacagtcccacctcgcctaaaggcagcacctacagccctacctctcctgggtactctcctacctcccctacctactcgctcactagtcccgccatatccccagacgattccgacgaggagaactag

SEQ ID NO: 17412 - DNA, 5913 bp, Artificial Sequence
  derived and/or modified sequence
atgcacggcggcggcccccccagcggggacagcgcctgccccctgcggaccatcaagagggtgcagtttggagtgctgagcccagatgagctgaagaggatgtctgtgacagaaggaggcatcaagtacccagagaccacagaaggaggccggcccaagctgggcggcctgatggacccccggcagggcgtgattgaaagaacaggccgctgccagacctgtgccggcaacatgacagagtgccccggccacttcggccacatcgagctggccaagcctgtgttccacgtgggcttcctggtgaagaccatgaaggtgctgcgctgtgtgtgcttcttctgcagcaagctgctggtggacagcaacaaccccaagatcaaggacatcctggccaagagcaagggccagcccaagaagaggctgacccacgtgtatgacctgtgcaagggcaagaacatctgtgagggcggggaggagatggacaacaagtttggagtggagcagccagaaggagatgaggacctgaccaaggagaagggccatggaggctgcggccgctaccagccccgcatccgccgcagcggcctggagctgtatgcagagtggaagcacgtgaatgaagacagccaggagaagaagatcctgctgagccctgagcgggtgcatgagatcttcaagaggatcagtgatgaggagtgctttgtgctgggcatggagcccaggtatgcccggcctgagtggatgattgtgacagtgctgcctgtgccccccctgtctgtgcggcctgctgtggtgatgcagggcagcgccaggaaccaggatgacctgacccacaagctggccgacatcgtgaagatcaacaaccagctgcggagaaatgagcagaatggagctgctgcccacgtgattgctgaagatgtgaagctgctgcagttccacgtggccaccatggtggacaatgagctgcccggcctgccccgggccatgcagaagagcggccggcccctgaagagcctgaagcagaggctgaagggcaaggagggccgggtgcggggcaacctgatgggcaagagggtggacttcagcgccaggacagtcatcaccccagaccccaacctgagcattgaccaggtgggcgtgcccaggagcattgctgccaacatgacctttgctgagatcgtgacccccttcaacatcgaccggctgcaggagctggtgagaagaggcaacagccagtacccaggggccaagtacatcatccgggacaatggagacagaattgacctgcgcttccaccccaagcccagcgacctgcacctgcagacaggctacaaggtggagcggcacatgtgtgatggagacatcgtcatcttcaaccggcagcccaccctgcacaagatgtccatgatgggccaccgggtgcgcatcctgccctggagcaccttccggctgaacctgtctgtgaccaccccctacaatgctgactttgatggagatgagatgaacctgcacctgccccagagcctggagaccagggctgagatccaggagctggccatggtgcccaggatgattgtgaccccccagagcaacagacctgtgatgggcatcgtgcaggacaccctgacagctgtgaggaagttcaccaagagagatgtgttcctggagcggggggaggtgatgaacctgctgatgttcctgagcacctgggatggcaaggtgccccagcctgccatcctgaagccccggcccctgtggacaggcaagcagatcttcagcctcatcatccctggccacatcaactgcatccgcacccacagcacccacccagatgatgaagattctggcccctacaagcacatcagccctggggacaccaaggtggtggtggagaatggagagctgatcatgggcatcctgtgcaagaagagcctgggcaccagcgctggcagcctggtgcacatctcctacctggagatgggccatgacatcaccaggctcttctacagcaacatccagaccgtcatcaacaactggctgctgattgagggccacaccatcggcattggagacagcattgctgacagcaagacctaccaggacatccagaacaccatcaagaaggccaagcaggacgtcatcgaggtgattgagaaggcccacaacaatgagctggagcccaccccaggcaacaccctgcggcagacctttgagaaccaggtgaaccgcatcctgaatgatgcccgggacaagacaggcagcagcgcccagaagagcctgtctgagtacaacaacttcaagtccatggtggtgtctggggccaagggcagcaagatcaacatcagccaggtgattgctgtggtgggccagcagaatgtggagggcaagaggatccccttcggcttcaagcacaggaccctgccccacttcatcaaggatgattatggccctgagagccggggctttgtggagaacagctacctggccggcctgacccccacagagttcttcttccacgccatgggcggccgggagggcctgattgacacagctgtgaagacagctgagaccggctacatccagaggaggctcatcaagtccatggagagcgtgatggtgaagtatgatgccaccgtgaggaacagcatcaaccaggtggtgcagctgcgctatggagaagatggcctggccggggagagcgtggagttccagaacctggccaccctgaagcccagcaacaaggcctttgagaagaagttccgctttgactacaccaatgaaagagccctgcggaggaccctgcaggaggacctggtgaaggatgtgctgagcaatgcccacatccagaatgagctggagcgggagtttgagaggatgagagaagatcgggaggtgctgcgggtcatcttccccaccggggacagcaaggtggtgctgccctgcaacctgctgaggatgatctggaatgcccagaagatcttccacatcaacccccggctgcccagcgacctgcaccccatcaaggtggtggagggcgtgaaggagctgagcaagaagctggtgattgtgaatggagatgaccccctgagccggcaggcccaggagaatgccaccctgctcttcaacatccacctgcggagcaccctgtgcagcaggaggatggccgaggagttccggctgtctggagaggcctttgactggctgctgggggagattgagagcaagttcaaccaggccatcgcccaccctggagagatggtgggcgccctggccgcccagagcctgggggagcccgccacccagatgaccctgaacaccttccactacgccggcgtgtctgccaagaatgtgaccctgggcgtgccccggctgaaggagctgatcaacatcagcaagaagcccaagacccccagcctgaccgtcttcctgctgggccagagcgccagagatgctgagcgggccaaggacatcctgtgccgcctggagcacaccaccctgaggaaggtgacagccaacacagccatctactatgaccccaacccccagagcacagtggtggccgaggaccaggagtgggtgaatgtgtactatgagatgccagactttgatgtggcccgcatcagcccctggctgctgcgggtggagctggacaggaagcacatgacagacaggaagctgaccatggagcagattgctgagaagatcaatgccggctttggagatgacctgaactgcatcttcaatgatgacaatgctgagaagctggtgctgcgcatccgcatcatgaacagtgatgagaacaagatgcaggaggaggaggaggtggtggacaagatggatgatgatgtgttcctgcgctgcatcgagagcaacatgctgacagacatgaccctgcagggcatcgagcagatcagcaaggtgtacatgcacctgccccagacagacaacaagaagaagatcatcatcacagaagatggagagttcaaggccctgcaggagtggatcctggagacagatggagtgtccctgatgagggtgctgtctgagaaggatgtggaccctgtgaggaccaccagcaatgacatcgtggagatcttcaccgtgctgggcattgaagctgtgaggaaggccctggagcgggagctgtaccacgtgatcagctttgatggcagctatgtgaactaccgccacctggccctgctgtgtgacaccatgacctgccggggccacctgatggccatcaccaggcatggagtgaaccggcaggacaccggccccctgatgaagtgcagctttgaggagaccgtggatgtgctgatggaggccgccgcccatggagagagtgaccccatgaagggcgtgtctgagaacatcatgctgggccagctggccccagctggcaccggctgctttgacctgctgctggatgctgagaagtgcaagtatggcatggagatccccaccaacatccctggcctgggcgccgccggccccaccggcatgttctttggaagtgcccccagccccatgggcggcatcagccctgccatgaccccctggaaccagggcgccaccccagcctacggggcctggagccccagcgtgggcagcggcatgaccccaggagctgctggcttcagccccagcgctgccagtgatgccagcggcttcagccctggctacagccctgcctggagccccaccccaggcagccctggcagccctggccccagcagcccctacatccccagccctggaggagccatgagccccagctacagccccaccagccctgcctatgagcccaggagccctgggggctacaccccccagagccccagctacagccccaccagccccagctacagccccaccagccccagctacagccccaccagccccaactacagccccaccagccccagctacagccccaccagccccagctacagccccaccagccccagctacagccccaccagccccagctacagccccaccagccccagctacagccccaccagccccagctacagccccaccagccccagctacagccccaccagccccagctacagccccaccagccccagctacagccccaccagccccagctacagccccaccagccccagctacagccccaccagccccagctacagccccaccagccccagctacagccccaccagccccagctacagccccaccagccccagctacagccccaccagccccaactacagccccaccagccccaactacacccccaccagccccagctacagccccaccagccccagctacagccccaccagccccaactacacccccaccagccccaactacagccccaccagccccagctacagccccaccagccccagctacagccccaccagccccagctacagccccagcagcccccgctacaccccccagagccccacctacacccccagcagccccagctacagccccagcagccccagctacagccctgccagccccaagtacacccccaccagccccagctacagccccagcagccctgagtacacccccaccagccccaagtacagccccaccagccccaagtacagccccaccagccccaagtacagccccaccagccccacctacagccccaccacccccaagtacagccccaccagccccacctacagccccaccagccctgtgtacacccccaccagccccaagtacagccccaccagccccacctacagccccaccagccccaagtacagccccaccagccccacctacagccccaccagccccaagggcagcacctacagccccaccagccctggctacagccccaccagccccacctacagcctgaccagccctgccatcagcccagatgacagtgatgaagaaaattag

SEQ ID NO: 17413 - DNA, 5913 bp, Artificial Sequence
  derived and/or modified sequence
atgcacggcggcggcccccccagcggcgacagcgcctgccccctgcgaacaatcaagcgggtgcagttcggtgtactgtctcccgatgagctaaagaggatgagcgtcacagagggcggcattaagtaccccgaaactaccgagggcgggcggcccaaactcggcggcctcatggacccccggcagggcgtgatcgagaggaccggtagatgccagacctgcgcggggaacatgaccgagtgtcctgggcatttcgggcatatagagttggccaagcctgtgttccatgtcgggttcttagttaaaactatgaaggtcctaagatgtgtgtgctttttttgcagcaaactgctcgtcgacagcaataatcctaaaatcaaagatattctggcgaagtctaagggccaacctaagaaacgcttgacgcatgtgtacgacctttgcaaagggaaaaacatatgcgaaggaggcgaggagatggacaacaagttcggcgtggagcaaccagaaggagatgaagatttgactaaggaaaagggccatggcggctgcgggagataccagccaagaatcagaagatctggacttgaactgtacgcggaatggaaacacgtcaacgaggattctcaagagaagaagatcctcctctcacctgaaagggtgcatgagattttcaaacgcatatccgacgaagagtgctttgtactggggatggaacccagatacgcacgccccgagtggatgattgtgaccgtgctgcctgtaccgcccctgagcgtccggcccgcagtcgtgatgcaaggctctgcccgcaaccaggatgacctgacccacaaattagccgacattgtgaagatcaataaccagctgagacgcaacgagcagaatggagccgccgcacacgtgatcgcagaggatgtgaagctgctgcagttccatgtagccaccatggttgacaacgagttgccaggactgcctagggctatgcagaagtcagggagaccgctcaaaagcctcaagcaaagactgaaagggaaggagggacgggtgagaggaaacctgatgggaaagcgggtcgatttcagcgcaagaactgtgatcaccccagacccaaatctaagcatcgaccaagtgggagtccccagaagcatagcagccaatatgaccttcgccgagatagtaacaccattcaatatcgaccgcctgcaagagctggtgaggaggggaaatagccaatatcccggcgccaagtatatcatacgcgacaacggggataggatagatttacgcttccaccctaaaccctctgacctgcacctgcagacaggatacaaagtggaaaggcatatgtgcgacggcgacatcgtgatttttaacaggcagcctactctgcacaaaatgtctatgatgggacatcgggtgaggattctgccgtggagtacattccgcctgaatctttctgttactactccctataatgccgactttgacggggacgaaatgaatttacacctgccccaatctctggaaactcgtgccgagatccaggaattggccatggtcccccggatgatagttacaccccaaagcaaccggccggtcatgggcattgtgcaggacacattgacagctgtgaggaagttcactaagcgggatgttttcctcgagcgtggcgaggtgatgaaccttttgatgttccttagcacatgggacggaaaagttccacagccagccatcctaaagcccaggccactctggaccggcaaacagatcttcagcttgatcatcccaggacacattaactgcatccgaacacatagcactcatccagacgatgaggactcaggaccctataaacacatatcgcccggggacactaaggtggtggtggagaatggggaactgatcatgggcattctttgtaagaagtcattgggcacttcagccgggtccctagtacacatcagctacttagaaatgggtcacgacattacacgattgttctattcaaatattcagaccgtgatcaacaattggctcctgatcgaaggacacactatcgggattggagactcgatcgctgatagcaagacataccaggacatccaaaatacgattaagaaagcaaagcaggatgtgatcgaggtcattgagaaggcgcataataacgaactggagcccacgcctggaaacaccctgaggcagacatttgagaatcaggtgaaccgcatactgaacgatgcaagggataaaaccgggtcttccgcacaaaagtccctgtcggagtataacaattttaagtccatggttgtgtctggcgctaagggatctaagattaatatctcccaggtgattgctgtggtcgggcagcagaatgtggaaggaaagcgtataccctttggcttcaaacatcgtaccctaccccactttattaaggatgactacggacctgaatcccggggattcgtggaaaactcatatctcgctggactgacccccaccgagtttttctttcacgctatgggtggccgggaaggtttaattgatacagccgttaaaacagccgagactggctacatccagcggaggctgatcaagtcaatggaatctgtcatggtaaaatatgacgcaaccgttaggaattctattaatcaggtggtgcaactgcggtatggagaggacgggctggcgggtgaatcggttgaatttcaaaacctggcaacccttaagccaagcaacaaggcctttgaaaagaaatttcgtttcgactacaccaatgagagggctctgcgacggacgcttcaagaggatttggtaaaagatgtgctgagcaatgcccacatccaaaacgaactggagcgcgagttcgagcgtatgcgcgaagaccgtgaagttctccgcgtcatctttccaacaggcgactctaaggtggtcctgccttgtaatttattgagaatgatctggaatgcccagaagattttccacatcaatccaaggctaccaagtgatctgcatccaattaaagtcgtggagggcgtgaaggagctctccaagaaactcgttatagtgaacggagacgaccccttgagccggcaggcccaggagaatgctaccctgttattcaacattcacctgcgctctactctatgcagtcgcagaatggctgaagaatttaggctatctggcgaagcctttgattggctcctgggcgaaattgaatctaagttcaaccaggcaatcgcacatccaggcgaaatggtgggagctctggccgcacaaagtcttggggagccagcaacccaaatgacgttgaacacattccattacgccggagtctctgccaaaaacgtcaccctgggggtgccccggctgaaagagcttatcaatatcagcaaaaaacctaagacgccatctctcactgttttcctcctggggcagtcagccagagacgccgaaagagctaaggatatactatgtagactggagcacaccactctacgaaaggtgacagcgaatacagctatttactatgatcctaatccacagtccaccgtcgttgccgaagatcaggagtgggtgaatgtttactacgagatgccagattttgatgtcgctaggatctccccttggctcctcagagtggagctggaccggaaacatatgacagatcgcaagttaaccatggaacaaatagccgagaagattaacgccggattcggggatgatctgaattgtatctttaatgatgacaacgctgagaagcttgtactgagaataagaattatgaattccgacgaaaacaaaatgcaggaagaggaggaagtggttgataaaatggatgatgatgtgtttctgcgctgtatcgagtctaacatgctgaccgatatgacgctgcagggtatcgagcaaatttcaaaggtgtatatgcatctcccacagaccgacaacaagaaaaagattatcattacagaggacggcgaattcaaagcactgcaggaatggattctggaaaccgacggcgtcagtctgatgagggtgctctctgagaaggatgtggaccccgtgcgcaccaccagcaacgatatcgtggaaatctttacggttctgggaatcgaggcagtgcgcaaagccttggaaagagagctataccacgtgataagctttgatggctcatacgtaaattaccggcacctagcccttctgtgcgacaccatgacatgtcgaggccacttgatggcaattacccgtcacggcgttaaccggcaggatactgggccccttatgaaatgctcattcgaggagacagtcgacgtcctgatggaggcagctgcccacggcgaatctgatcccatgaagggagttagtgaaaacataatgcttggacagctcgctccagcaggcacgggttgcttcgaccttctgctggatgccgagaaatgcaaatatggaatggagattcctacaaatattcccggtctgggggccgccgggccaactgggatgtttttcgggtctgccccctcacctatgggaggcatctcacccgcgatgactccatggaatcagggggcaacaccggcctacggcgcatggagtccttcagtaggctccgggatgacaccaggcgcagccggcttcagcccatccgctgcctctgacgccagcggattctctcccggttattcgcccgcatggagccctaccccgggctctccgggaagccctgggcctagttctccctatattcccagcccaggaggagcaatgtcaccgtcatactctcccacctcaccagcttacgagccccgcagtccaggcggctacaccccacagagtccgagctattcgcccacatctccaagctattcacctacgtctccatcatactcccccacatcccctaattactctcctacgtccccgagctatagtcccacaagcccttcatatagtccgacctctccatcttactcacccacaagtccatcatactcacctactagcccctcctacagtccaaccagcccctcttatagccctacgagcccctcatacagccccacttctccatcttatagccccacgtccccatcatactcccccacatctccgtcatattcccccacttcaccgtcatatagccctaccagccccagctattccccaaccagccctagctactcgcctacttccccttcttattctccaacttccccatcttactctccaacctcccccaactatagcccaacctctccaaattacacacccacgtcgccctcctactccccaactagcccaagctattcccccaccagtcccaattacaccccaacatcgcctaactacagcccaaccagtcccagctattctccaacctccccgtcctattcacctacctccccaagctattccccatcttctccccgatatactccccagtctcccacctacacacctagctccccttcatactcaccttccagcccgtcatactctccagccagcccaaaatatacacccactagcccaagctatagtcctagcagccctgagtatacccctacaagccccaagtactcacccacgagccccaaatacagccctacctctcccaagtactctccaacatcaccaacatattcacccaccacaccaaagtatagtccaacctccccgacctacagcccgactagtccggtctacacccctacaagccctaagtacagccctactagtccaacttatagccctacttcccctaagtattctccaacgtcgcccacttacagtccgactagtcccaagggatccacatactctccgacctctccagggtactctcctacatcccccacctattctctgacctcccccgccatcagccccgatgactctgacgaggagaactag

SEQ ID NO: 17414 - DNA, 6568 bp, Artificial Sequence
  derived and/or modified sequence
gggagctgaaaaatttccggtaagggaaagaagggctcctttcgctccttatttccccgcctccttccctcccccaccttcccctcctccggctttttcctcccaactcggggaggtccttcccggtggccgccctgacgaggtctgagcacctaggcggaggcggcgcaggctttttgtagtgaggtttgcgcctgcgcagcgcgcctgcctccgccatgcacgggggtggccccccctcgggggacagcgcatgcccgctgcgcaccatcaagagagtccagttcggagtcctgagtccggatgaactgaagcgaatgtctgtgacggagggtggcatcaaatacccagagacgactgagggaggccgccccaagcttggggggctgatggacccgaggcagggggtgattgagcggactggccgctgccaaacatgtgcaggaaacatgacagagtgtcctggccactttggccacattgaactggccaagcctgtgtttcacgtgggcttcctggtgaagacaatgaaagttttgcgctgtgtctgcttcttctgctccaaactgcttgtggactctaacaacccaaagatcaaggatatcctggctaagtccaagggacagcccaagaagcggctcacacatgtctacgacctttgcaagggcaaaaacatatgcgagggtggggaggagatggacaacaagttcggtgtggaacaacctgagggtgacgaggatctgaccaaagaaaagggccatggtggctgtgggcggtaccagcccaggatccggcgttctggcctagagttgtatgcggaatggaagcacgttaatgaggactctcaggagaagaagatcctgctgagtccagagcgagtgcatgagatcttcaaacgcatctcagatgaggagtgttttgtgctgggcatggagccccgctatgcacggccagagtggatgattgtcacagtgctgcctgtgcccccgctctccgtgcggcctgctgttgtgatgcagggctctgcccgtaaccaggatgacctgactcacaaactggctgacatcgtgaagatcaacaatcagctgcggcgcaatgagcagaacggcgcagcggcccatgtcattgcagaggatgtgaagctcctccagttccatgtggccaccatggtggacaatgagctgcctggcttgccccgtgccatgcagaagtctgggcgtcccctcaagtccctgaagcagcggttgaagggcaaggaaggccgggtgcgagggaacctgatgggcaaaagagtggacttctcggcccgtactgtcatcacccccgaccccaacctctccattgaccaggttggcgtgccccgctccattgctgccaacatgacctttgcggagattgtcacccccttcaacattgacagacttcaagaactagtgcgcagggggaacagccagtacccaggcgccaagtacatcatccgagacaatggtgatcgcattgacttgcgtttccaccccaagcccagtgaccttcacctgcagaccggctataaggtggaacggcacatgtgtgatggggacattgttatcttcaaccggcagccaactctgcacaaaatgtccatgatggggcatcgggtccgcattctcccatggtctacctttcgcttgaatcttagtgtgacaactccgtacaatgcagactttgacggggatgagatgaacttgcacctgccacagtctctggagacgcgagcagagatccaggagctggccatggttcctcgcatgattgtcaccccccagagcaatcggcctgtcatgggtattgtgcaggacacactcacagcagtgcgcaaattcaccaagagagacgtcttcctggagcggggtgaagtgatgaacctcctgatgttcctgtcgacgtgggatgggaaggtcccacagccggccatcctaaagccccggcccctgtggacaggcaagcaaatcttctccctcatcatacctggtcacatcaattgtatccgtacccacagtacccatcccgatgatgaagacagtggcccttacaagcacatctctcctggggacaccaaggtggtggtggagaatggggagctgatcatgggcatcctgtgtaagaagtctctgggcacgtcagctggctccctggtccacatctcctacctagagatgggtcatgacatcactcgcctcttctactccaacattcagactgtcattaacaactggctcctcatcgagggtcatactattggcattggggactccattgctgattctaagacttaccaggacattcagaacactattaagaaggccaagcaggacgtaatagaggtcatcgagaaggcacacaacaatgagctggagcccaccccagggaacactctgcggcagacgtttgagaatcaggtgaaccgcattcttaacgatgcccgagacaagactggctcctctgctcagaaatccctgtctgaatacaataacttcaagtctatggtcgtgtccggagctaaaggttccaagattaacatctcccaggtcattgctgtcgttggacagcagaacgtcgagggcaagcggattccatttggcttcaagcaccggactctgcctcacttcatcaaggatgactacgggcctgagagccgtggctttgtggagaactcctacctagccggcctcacacccactgagttctttttccacgccatggggggtcgtgaggggctcattgacacggctgtcaagactgctgagactggatacatccagcggcggctgatcaagtccatggagtcagtgatggtgaagtacgacgcgactgtgcggaactccatcaaccaggtggtgcagctgcgctacggcgaagacggcctggcaggcgagagcgttgagttccagaacctggctacgcttaagccttccaacaaggcttttgagaagaagttccgctttgattataccaatgagagggccctgcggcgcactctgcaggaggacctggtgaaggacgtgctgagcaacgcacacatccagaacgagttggagcgggaatttgagcggatgcgggaggatcgggaggtgctcagggtcatcttcccaactggagacagcaaggtcgtcctcccctgtaacctgctgcggatgatctggaatgctcagaaaatcttccacatcaacccacgccttccctccgacctgcaccccatcaaagtggtggagggagtcaaggaattgagcaagaagctggtgattgtgaatggggatgacccactaagtcgacaggcccaggaaaatgccacgctgctcttcaacatccacctgcggtccacgttgtgttcccgccgcatggcagaggagtttcggctcagtggggaggccttcgactggctgcttggggagattgagtccaagttcaaccaagccattgcgcatcccggggaaatggtgggggctctggctgcgcagtcccttggagaacctgccacccagatgaccttgaataccttccactatgctggtgtgtctgccaagaatgtgacgctgggtgtgccccgacttaaggagctcatcaacatttccaagaagccaaagactccttcgcttactgtcttcctgttgggccagtccgctcgagatgctgagagagccaaggatattctgtgccgtctggagcatacaacgttgaggaaggtgactgccaacacagccatctactatgaccccaacccccagagcacggtggtggcagaggatcaggaatgggtgaatgtctactatgaaatgcctgactttgatgtggcccgaatctccccctggctgttgcgggtggagctggatcggaagcacatgactgaccggaagctcaccatggagcagattgctgaaaagatcaatgctggttttggtgacgacttgaactgcatctttaatgatgacaatgcagagaagctggtgctccgtattcgcatcatgaacagcgatgagaacaagatgcaagaggaggaagaggtggtggacaagatggatgatgatgtcttcctgcgctgcatcgagtccaacatgctgacagatatgaccctgcagggcatcgagcagatcagcaaggtgtacatgcacttgccacagacagacaacaagaagaagatcatcatcacggaggatggggaattcaaggccctgcaggagtggatcctggagacggacggcgtgagcttgatgcgggtgctgagtgagaaggacgtggaccccgtacgcaccacgtccaatgacattgtggagatcttcacggtgctgggcattgaagccgtgcggaaggccctggagcgggagctgtaccacgtcatctcctttgatggctcctatgtcaattaccgacacttggctctcttgtgtgataccatgacctgtcgtggccacttgatggccatcacccgacacggagtcaaccgccaggacacaggaccactcatgaagtgttcctttgaggaaacggtggacgtgcttatggaagcagccgcacacggtgagagtgaccccatgaagggggtctctgagaatatcatgctgggccagctggctccggccggcactggctgctttgacctcctgcttgatgcagagaagtgcaagtatggcatggagatccccaccaatatccccggcctgggggctgctggacccaccggcatgttctttggttcagcacccagtcccatgggtggaatctctcctgccatgacaccttggaaccagggtgcaacccctgcctatggcgcctggtcccccagtgttgggagtggaatgaccccaggggcagccggcttctctcccagtgctgcgtcagatgccagcggcttcagcccaggttactcccctgcctggtctcccacaccgggctccccggggtccccaggtccctcaagcccctacatcccttcaccaggtggtgccatgtctcccagctactcgccaacgtcacctgcctacgagccccgctctcctgggggctacacaccccagagtccctcttattcccccacttcaccctcctactcccctacctctccatcctattctccaaccagtcccaactatagtcccacatcacccagctattcgccaacgtcacccagctactcaccgacctctcccagctactcacccacctctcccagctactcgcccacctctcccagctactcgcccacctctcccagctactcacccacttcccctagctactcgcccacttcccctagctactcgccaacgtctcccagctactcaccgacatctcccagctactcgccaacttcacccagctattctcccacttctcccagctactcacctacctctccaagctattcacccacctcccccagctactcacccacttccccaagttactcacccaccagcccgaactattctccaaccagtcccaattacaccccaacatcacccagctacagcccgacatcacccagctattcacctactagtcccaactacacacctaccagccctaactacagcccaacctctccaagctactctccaacatcacccagctattccccgacctcaccaagttactccccttccagcccacgatacacaccacagtctccaacctataccccaagctcacccagctacagccccagctcgcccagctacagcccagcctcacccaagtacaccccaaccagtccttcttacagtcccagctccccagagtataccccaacctctcccaagtactcacctaccagtcccaaatattcacccacctctcccaagtactcgcctaccagtcccacctattcacccaccaccccaaaatactccccaacatctcctacttattccccaacctctccagtctacaccccaacctctcccaagtactcacctactagccccacttactcgcccacttcccccaagtactcgcccaccagccccacctactcgcccacctcccccaaaggctcaacctactctcccacttcccctggttactcgcccaccagccccacctacagtctcacaagcccggctatcagcccggatgacagtgacgaggagaactgagggcacgtggggtgcggcagcgggctagggcccagggcagcttgcccgtgctgctgtgcagttcttgcctccctcacggggcgtcacccccagcccagctccgttgtacataaatgccttgtggcagagctcccggtgaacttctggatcccgtttctgatgcagactcttgtcttgttctccacttgtgctgttagaactcactggcccagtggtgttctcactcctaccccacccaccccctgcctgtccccaaattgaagatccttccttgcctgtggcttgatgcggggcgggtaaagggtattttaacttaggggtagttcctgctgtgagtggttacagctgatcctcgggaagaacaaagctaaagctgccttttgtctgttattttatttttttgaagtttaaataaagtttactaattttgaccaaaa

SEQ ID NO: 17415 - DNA, 5912 bp, Artificial Sequence
  derived and/or modified sequence
atgcatggcggaggtccaccaagcggcgactccgcttgccccctccggaccattaagcgggtgcagttcggtgtactttccccagacgagttaaagagaatgagtgtgaccgaaggaggaataaagtaccctgaaactaccgaaggcggtagaccaaagctgggaggacttatggatccaagacagggtgtgatagagagaacagggagatgccagacttgtgctgggaacatgactgagtgtcctggccactttgggcacattgaactcgccaagcccgtcttccacgttgggtttcttgtgaagaccatgaaggttctccgatgcgtctgtttcttttgctctaagttgttagtcgattcgaataatcccaaaatcaaagacattctggctaagtccaagggacagcccaaaaaacgcctcacgcacgtttatgatctgtgtaaaggcaaaaacatctgtgaaggcggagaagaaatggacaacaagttcggggtagagcagccggagggggacgaagacctgactaaagagaagggtcacggagggtgcgggaggtatcaacctcgaattaggaggagcgggctggaactttatgccgaatggaagcacgtcaacgaagattcgcaggaaaaaaaaatcctgctgtcgcctgagcgtgtgcacgaaatcttcaagagaatatcagatgaagagtgtttcgtgctcggtatggagcccagatacgccagaccagaatggatgatagttacagtcctcccagttcccccactgagtgtgaggcctgcagtggtcatgcagggatctgcgcgtaatcaagacgatctgacacacaagctggccgacatcgtgaagatcaacaaccagttgagaagaaacgagcagaacggtgcagccgcacatgtgattgcagaagacgtgaagctgttacaatttcatgttgcaacaatggtggacaatgagctgccaggtctgccacgtgcgatgcagaaatccggccgaccacttaaatcactcaagcagcgccttaagggcaaggagggcagggtcaggggaaacctcatgggcaagcgcgtggacttttccgcaagaaccgttattacaccggatccaaacctatctatagaccaagtgggcgtccctcgatcaattgctgccaacatgacgttcgcagaaattgtaacaccattcaacatcgaccggctccaggaactagtgcgacggggaaacagtcagtacccaggggcaaaatatattattcgcgacaatggtgaccggattgatctccggtttcatcccaagccttcagatctccacctgcagaccggatacaaggtggaaagacacatgtgtgatggcgatatagtcatttttaatcgccaacccactcttcacaagatgagtatgatgggccatcgcgtgagaatcctcccatggtctacttttcgcttgaatttgagcgttaccacaccttataatgccgacttcgatggcgacgaaatgaatctgcacttaccccagtccctggagacaagagccgaaatccaggaactggcaatggtgcccaggatgatcgtgactcctcagagcaatagacccgtaatggggatcgtgcaggacacattgacagccgtcaggaagtttaccaagcgggacgtgtttctggagcggggagaggtgatgaatttactgatgttcctttctacctgggacggcaaagtcccccagcctgccatcttgaaaccaaggccattgtggacaggtaaacagattttttccctgatcattccgggacacataaactgtatccgcacacactccacccacccagacgatgaggacagcggcccttacaaacatatcagccccggtgacactaaagtggttgtagagaacggggagctaattatgggtatattgtgcaagaagagcctgggcacctccgcaggatccctggttcacatttcatacctggaaatgggacatgacataaccaggttgttttacagcaacatccagaccgtgataaataactggcttttgatcgagggccacacaattggcatcggtgacagcatcgcagactccaaaacttatcaggacatccagaacaccataaagaaggcaaagcaggatgttattgaggtgatcgagaaagcacataacaatgaactggagcctacacccggaaatacactgaggcagactttcgagaatcaggtgaaccgtatcttaaacgatgcacgagataaaactggtagtagcgcacagaagtcgctgagtgagtacaataactttaaaagtatggtggtcagcggagcaaaaggctcaaaaatcaacatatcgcaggtcatcgcagtggtcgggcagcagaacgtagaaggaaagcgtatccccttcggatttaagcaccggaccctcccacatttcatcaaggatgattacggcccagagtcacggggtttcgtggaaaattcttacctcgctgggttgacccccaccgaatttttctttcatgcaatggggggaagggaaggacttattgacaccgccgttaagacagcagagaccgggtacattcagaggagactgatcaagtcaatggagtcggttatggtcaaatatgatgccacggtacgcaactcaattaatcaggttgtccagctgaggtatggagaggacgggttagcaggggagtcagtagaattccagaatcttgccacccttaaaccatccaacaaggcattcgaaaaaaagttcaggtttgactatactaacgaaagggcgttacgcaggacacttcaggaagacttagtgaaggacgtactttccaacgctcacattcaaaatgagctggagagagaattcgagagaatgcgggaagaccgcgaagtgctaagggtgatcttcccgacaggcgactcgaaagtggtcctcccctgcaatcttttgcgaatgatctggaacgctcagaagatttttcacatcaaccccagactcccaagcgacttacacccaataaaggtggtggagggggtgaaagagttgtccaaaaaactggtaatcgttaatggggacgatcctctgtctagacaggcccaggaaaatgctaccctgctgttcaacatccacctgcggtccaccctgtgtagtcgcagaatggctgaggagtttcgactgtctggggaggcttttgattggctactgggggagatcgaaagcaaatttaaccaagccatcgcacaccctggcgagatggtgggtgccctggcagctcagtctctgggagagcccgctacccagatgacccttaatacattccattatgcaggtgtctccgcgaaaaatgtaaccctgggcgtaccgcgactgaaggaactaatcaacatttctaaaaaaccaaagaccccttcactgacagtcttcctgttagggcagagcgccagagatgctgagagggccaaggatatactgtgcagacttgagcatacaaccctgaggaaggtaacggctaacaccgctatttactacgaccctaatccacagtcaacagtggtggcggaagatcaggaatgggtcaacgtgtactacgagatgcctgactttgacgtcgctcgaatatccccttggctgctcagggtggaactagacaggaaacacatgaccgataggaaattaactatggaacaaattgccgaaaaaatcaacgccggttttggtgacgacttaaactgtatctttaacgacgacaatgctgagaagctcgtgttgcggatccgcataatgaatagtgacgagaacaaaatgcaggaggaagaggaggtcgttgacaagatggacgacgacgtttttctcaggtgtatagaaagcaacatgctcactgatatgacactccaaggtatcgagcagatcagtaaagtctacatgcatctgccgcagactgataataagaaaaagattattatcaccgaagatggggaattcaaagccctgcaggagtggatactcgaaaccgacggtgtcagcctgatgcgagtgctgagcgagaaagatgtcgatccagttagaaccacctcaaatgatatagtggaaattttcactgtgctggggatcgaagccgtccggaaggctctggagcgtgagctttatcacgtcatcagctttgacggcagttacgtcaactaccgtcacctggccttgctctgtgacacgatgacatgccgtgggcacctaatggcgataactagacacggggtgaaccggcaggatactggtccactcatgaagtgtagctttgaagaaaccgtggatgtgcttatggaagccgcagcccatggtgaaagtgatcccatgaagggtgtttcagagaacatcatgctcggtcagttggcccctgctggcactggctgctttgacctgctattggacgccgagaaatgcaagtacggcatggaaatacccacgaatattcctgggctgggggctgccggacccaccggtatgttcttcgggtccgcaccttcccctatgggcggaatctcgccagcaatgacgccttggaatcaaggtgctaccccggcttatggcgcttggtccccttcagtcggctcagggatgacaccaggcgcagctgggttctctccaagcgccgcatcagatgcctccggcttcagcccaggttactctcccgcatggagtccaacccccggatctcccggatcgccaggccctagctccccttatattccatctccgggaggagctatgtcgccaagttacagtccgacgagccctgcttacgaacctaggtctcctggcggttataccccccagtctcccagctacagccctactagcccctcatactcacccacatcacccagctattcacccaccagtcctaactattctcccacctccccctcctattcgcccacaagcccgtcctacagtcccacgagcccaagttactcgccaaccagtcctagctattcgcccacctcaccgagctatagcccaacatccccgagttacagccctacctctccaagttatagccccacttctcctagctacagtcccacttcccctagctactcacccactagccctagctattcacctacctcgccttcgtacagtcctactagtccgagctattcgccaacatcacctagctacagcccgacgagcccttcttacagcccaacctccccctcatactcacccacctcgccaaactacagcccaacttcgcctaattataccccaacctccccctcttatagcccgacttcaccttcatattcgccaacatcaccaaattacactcccacctcaccaaactattctcctacctcgccatcatattcaccaacgtcaccatcctacagccccacctcaccatcatactcgccctctagcccccgatacacgccacagtcaccaacctacaccccctcctccccctcatactcgccttcaagcccaagctactcgcccgcatcaccaaagtacacgcctacgtcaccttcctattccccaagttctcccgagtacacaccaaccagccccaaatacagtcctacctcaccaaaatacagcccaacctccccgaaatacagccctacctcccctacatattcacctaccactcccaagtattcgccaacttcccctacgtattctcccactagccccgtatacaccccaactagccccaagtactcgcctaccagcccaacctactccccaacaagccctaaatatagccccacctcaccgacatacagtcctacctcaccgaagggtagcacctatagcccgacctctcccggttattcccctacttcccccacatacagcctgacctcacctgcaatctcacctgacgactccgacgaggagaatta

SEQ ID NO: 17416 - DNA, 5913 bp, Artificial Sequence
  derived and/or modified sequence
atgcacggcggcggcccccccagcggcgacagcgcctgccccctgagaaccatcaagagagtgcagttcggcgtgctgagccccgacgagctgaagagaatgagcgtgaccgagggcggcatcaagtaccccgagaccaccgagggcggcagacccaagctgggcggcctgatggaccccagacagggcgtgatcgagagaaccggcagatgccagacctgcgccggcaacatgaccgagtgccccggccacttcggccacatcgagctggccaagcccgtgttccacgtgggcttcctggtgaagaccatgaaggtgctgagatgcgtgtgcttcttctgcagcaagctgctggtggacagcaacaaccccaagatcaaggacatcctggccaagagcaagggccagcccaagaagagactgacccacgtgtacgacctgtgcaagggcaagaacatctgcgagggcggcgaggagatggacaacaagttcggcgtggagcagcccgagggcgacgaggacctgaccaaggagaagggccacggcggctgcggcagataccagcccagaatcagaagaagcggcctggagctgtacgccgagtggaagcacgtgaacgaggacagccaggagaagaagatcctgctgagccccgagagagtgcacgagatcttcaagagaatcagcgacgaggagtgcttcgtgctgggcatggagcccagatacgccagacccgagtggatgatcgtgaccgtgctgcccgtgccccccctgagcgtgagacccgccgtggtgatgcagggcagcgccagaaaccaggacgacctgacccacaagctggccgacatcgtgaagatcaacaaccagctgagaagaaacgagcagaacggcgccgccgcccacgtgatcgccgaggacgtgaagctgctgcagttccacgtggccaccatggtggacaacgagctgcccggcctgcccagagccatgcagaagagcggcagacccctgaagagcctgaagcagagactgaagggcaaggagggcagagtgagaggcaacctgatgggcaagagagtggacttcagcgccagaaccgtgatcacccccgaccccaacctgagcatcgaccaggtgggcgtgcccagaagcatcgccgccaacatgaccttcgccgagatcgtgacccccttcaacatcgacagactgcaggagctggtgagaagaggcaacagccagtaccccggcgccaagtacatcatcagagacaacggcgacagaatcgacctgagattccaccccaagcccagcgacctgcacctgcagaccggctacaaggtggagagacacatgtgcgacggcgacatcgtgatcttcaacagacagcccaccctgcacaagatgagcatgatgggccacagagtgagaatcctgccctggagcaccttcagactgaacctgagcgtgaccaccccctacaacgccgacttcgacggcgacgagatgaacctgcacctgccccagagcctggagaccagagccgagatccaggagctggccatggtgcccagaatgatcgtgaccccccagagcaacagacccgtgatgggcatcgtgcaggacaccctgaccgccgtgagaaagttcaccaagagagacgtgttcctggagagaggcgaggtgatgaacctgctgatgttcctgagcacctgggacggcaaggtgccccagcccgccatcctgaagcccagacccctgtggaccggcaagcagatcttcagcctgatcatccccggccacatcaactgcatcagaacccacagcacccaccccgacgacgaggacagcggcccctacaagcacatcagccccggcgacaccaaggtggtggtggagaacggcgagctgatcatgggcatcctgtgcaagaagagcctgggcaccagcgccggcagcctggtgcacatcagctacctggagatgggccacgacatcaccagactgttctacagcaacatccagaccgtgatcaacaactggctgctgatcgagggccacaccatcggcatcggcgacagcatcgccgacagcaagacctaccaggacatccagaacaccatcaagaaggccaagcaggacgtgatcgaggtgatcgagaaggcccacaacaacgagctggagcccacccccggcaacaccctgagacagaccttcgagaaccaggtgaacagaatcctgaacgacgccagagacaagaccggcagcagcgcccagaagagcctgagcgagtacaacaacttcaagagcatggtggtgagcggcgccaagggcagcaagatcaacatcagccaggtgatcgccgtggtgggccagcagaacgtggagggcaagagaatccccttcggcttcaagcacagaaccctgccccacttcatcaaggacgactacggccccgagagcagaggcttcgtggagaacagctacctggccggcctgacccccaccgagttcttcttccacgccatgggcggcagagagggcctgatcgacaccgccgtgaagaccgccgagaccggctacatccagagaagactgatcaagagcatggagagcgtgatggtgaagtacgacgccaccgtgagaaacagcatcaaccaggtggtgcagctgagatacggcgaggacggcctggccggcgagagcgtggagttccagaacctggccaccctgaagcccagcaacaaggccttcgagaagaagttcagattcgactacaccaacgagagagccctgagaagaaccctgcaggaggacctggtgaaggacgtgctgagcaacgcccacatccagaacgagctggagagagagttcgagagaatgagagaggacagagaggtgctgagagtgatcttccccaccggcgacagcaaggtggtgctgccctgcaacctgctgagaatgatctggaacgcccagaagatcttccacatcaaccccagactgcccagcgacctgcaccccatcaaggtggtggagggcgtgaaggagctgagcaagaagctggtgatcgtgaacggcgacgaccccctgagcagacaggcccaggagaacgccaccctgctgttcaacatccacctgagaagcaccctgtgcagcagaagaatggccgaggagttcagactgagcggcgaggccttcgactggctgctgggcgagatcgagagcaagttcaaccaggccatcgcccaccccggcgagatggtgggcgccctggccgcccagagcctgggcgagcccgccacccagatgaccctgaacaccttccactacgccggcgtgagcgccaagaacgtgaccctgggcgtgcccagactgaaggagctgatcaacatcagcaagaagcccaagacccccagcctgaccgtgttcctgctgggccagagcgccagagacgccgagagagccaaggacatcctgtgcagactggagcacaccaccctgagaaaggtgaccgccaacaccgccatctactacgaccccaacccccagagcaccgtggtggccgaggaccaggagtgggtgaacgtgtactacgagatgcccgacttcgacgtggccagaatcagcccctggctgctgagagtggagctggacagaaagcacatgaccgacagaaagctgaccatggagcagatcgccgagaagatcaacgccggcttcggcgacgacctgaactgcatcttcaacgacgacaacgccgagaagctggtgctgagaatcagaatcatgaacagcgacgagaacaagatgcaggaggaggaggaggtggtggacaagatggacgacgacgtgttcctgagatgcatcgagagcaacatgctgaccgacatgaccctgcagggcatcgagcagatcagcaaggtgtacatgcacctgccccagaccgacaacaagaagaagatcatcatcaccgaggacggcgagttcaaggccctgcaggagtggatcctggagaccgacggcgtgagcctgatgagagtgctgagcgagaaggacgtggaccccgtgagaaccaccagcaacgacatcgtggagatcttcaccgtgctgggcatcgaggccgtgagaaaggccctggagagagagctgtaccacgtgatcagcttcgacggcagctacgtgaactacagacacctggccctgctgtgcgacaccatgacctgcagaggccacctgatggccatcaccagacacggcgtgaacagacaggacaccggccccctgatgaagtgcagcttcgaggagaccgtggacgtgctgatggaggccgccgcccacggcgagagcgaccccatgaagggcgtgagcgagaacatcatgctgggccagctggcccccgccggcaccggctgcttcgacctgctgctggacgccgagaagtgcaagtacggcatggagatccccaccaacatccccggcctgggcgccgccggccccaccggcatgttcttcggcagcgcccccagccccatgggcggcatcagccccgccatgaccccctggaaccagggcgccacccccgcctacggcgcctggagccccagcgtgggcagcggcatgacccccggcgccgccggcttcagccccagcgccgccagcgacgccagcggcttcagccccggctacagccccgcctggagccccacccccggcagccccggcagccccggccccagcagcccctacatccccagccccggcggcgccatgagccccagctacagccccaccagccccgcctacgagcccagaagccccggcggctacaccccccagagccccagctacagccccaccagccccagctacagccccaccagccccagctacagccccaccagccccaactacagccccaccagccccagctacagccccaccagccccagctacagccccaccagccccagctacagccccaccagccccagctacagccccaccagccccagctacagccccaccagccccagctacagccccaccagccccagctacagccccaccagccccagctacagccccaccagccccagctacagccccaccagccccagctacagccccaccagccccagctacagccccaccagccccagctacagccccaccagccccagctacagccccaccagccccagctacagccccaccagccccagctacagccccaccagccccaactacagccccaccagccccaactacacccccaccagccccagctacagccccaccagccccagctacagccccaccagccccaactacacccccaccagccccaactacagccccaccagccccagctacagccccaccagccccagctacagccccaccagccccagctacagccccagcagccccagatacaccccccagagccccacctacacccccagcagccccagctacagccccagcagccccagctacagccccgccagccccaagtacacccccaccagccccagctacagccccagcagccccgagtacacccccaccagccccaagtacagccccaccagccccaagtacagccccaccagccccaagtacagccccaccagccccacctacagccccaccacccccaagtacagccccaccagccccacctacagccccaccagccccgtgtacacccccaccagccccaagtacagccccaccagccccacctacagccccaccagccccaagtacagccccaccagccccacctacagccccaccagccccaagggcagcacctacagccccaccagccccggctacagccccaccagccccacctacagcctgaccagccccgccatcagccccgacgacagcgacgaggagaactag

SEQ ID NO: 17417 - protein, 1174 aa, Artificial Sequence
  derived and/or modified sequence
MYDADEDMQYDEDDDEITPDLWQEACWIVISSYFDEKGLVRQQLDSFDEFIQMSVQRIVEDAPPIDLQAEAQHASGEVEEPPRYLLKFEQIYLSKPTHWERDGAPSPMMPNEARLRNLTYSAPLYVDITKTVIKEGEEQLQTQHQKTFIGKIPIMLRSTYCLLNGLTDRDLCELNECPLDPGGYFIINGSEKVLIAQEKMATNTVYVFAKKDSKYAYTGECRSCLENSSRPTSTIWVSMLARGGQGAKKSAIGQRIVATLPYIKQEVPIIIVFRALGFVSDRDILEHIIYDFEDPEMMEMVKPSLDEAFVIQEQNVALNFIGSRGAKPGVTKEKRIKYAKEVLQKEMLPHVGVSDFCETKKAYFLGYMVHRLLLAALGRRELDDRDHYGNKRLDLAGPLLAFLFRGMFKNLLKEVRIYAQKFIDRGKDFNLELAIKTRIISDGLKYSLATGNWGDQKKAHQARAGVSQVLNRLTFASTLSHLRRLNSPIGRDGKLAKPRQLHNTLWGMVCPAETPEGHAVGLVKNLALMAYISVGSQPSPILEFLEEWSMENLEEISPAAIADATKIFVNGCWVGIHKDPEQLMNTLRKLRRQMDIIVSEVSMIRDIREREIRIYTDAGRICRPLLIVEKQKLLLKKRHIDQLKEREYNNYSWQDLVASGVVEYIDTLEEETVMLAMTPDDLQEKEVAYCSTYTHCEIHPSMILGVCASIIPFPDHNQSPRNTYQSAMGKQAMGVYITNFHVRMDTLAHVLYYPQKPLVTTRSMEYLRFRELPAGINSIVAIASYTGYNQEDSVIMNRSAVDRGFFRSVFYRSYKEQESKKGFDQEEVFEKPTRETCQGMRHAIYDKLDDDGLIAPGVRVSGDDVIIGKTVTLPENEDELESTNRRYTKRDCSTFLRTSETGIVDQVMVTLNQEGYKFCKIRVRSVRIPQIGDKFASRHGQKGTCGIQYRQEDMPFTCEGITPDIIINPHAIPSRMTIGHLIECLQGKVSANKGEIGDATPFNDAVNVQKISNLLSDYGYHLRGNEVLYNGFTGRKITSQIFIGPTYYQRLKHMVDDKIHSRARGPIQILNRQPMEGRSRDGGLRFGEMERDCQIAHGAAQFLRERLFEASDPYQVHVCNLCGIMAIANTRTHTYECRGCRNKTQISLVRMPYACKLLFQELMSMSIAPRMMSV

SEQ ID NO: 17418 - protein, 354 aa, Artificial Sequence
  derived and/or modified sequence
MGKLVALVLLGVGLSLVGEMFLAFRERVNASREVEPVEPENCHLIEELESGSEDIDILPSGLAFISSGLKYPGMPNFAPDEPGKIFLMDLNEQNPRAQALEISGGFDKELFNPHGISIFIDKDNTVYLYVVNHPHMKSTVEIFKFEEQQRSLVYLKTIKHELLKSVNDIVVLGPEQFYATRDHYFTNSLLSFFEMILDLRWTYVLFYSPREVKVVAKGFCSANGITVSADQKYVYVADVAAKNIHIMEKHDNWDLTQLKVIQLGTLVDNLTVDPATGDILAGCHPNPMKLLNYNPEDPPGSEVLRIQNVLSEKPRVSTVYANNGSVLQGTSVASVYHGKILIGTVFHKTLYCEL

SEQ ID NO: 17419 - DNA, 1065 bp, Artificial Sequence
  derived and/or modified sequence
atgggcaagctcgttgccttggttctgttgggcgtaggcctttctctcgtgggagagatgtttctcgctttcagggagagggttaacgcgagtagggaggtggaacctgtggaaccggaaaactgtcacttaatcgaagaattagagtcaggcagcgaagatatcgacatcctgccatcgggccttgccttcatctccagcgggttaaaataccccgggatgcccaattttgccccagatgagcctggaaagattttcctcatggatctgaacgagcagaaccctagagctcaggcactggaaatcagcggaggtttcgacaaggaattgtttaaccctcacgggatttcaatctttattgacaaagataatactgtgtacttgtacgtggttaatcaccctcatatgaaaagcaccgtcgaaatttttaagtttgaggagcagcagagaagcctagtgtaccttaaaacaatcaagcatgagctcttgaaaagcgtaaacgacatcgttgtgctgggtcccgaacagttttatgccaccagagaccactactttactaacagtctgcttagcttttttgaaatgattcttgatctacggtggacctatgtactgttttacagccctcgcgaggtcaaagtcgtggccaaggggttttgcagtgccaatggcattactgtgtctgcagatcagaaatacgtctacgtggctgacgtcgctgcaaagaacatccacattatggagaagcacgacaattgggatctcacccaactgaaggttatccaactgggcacattggtggataatttgacagtggacccagccactggggacatactcgccggttgccacccaaaccctatgaagctgctcaattataaccccgaagatccccctggatccgaggtgctccgtatacagaatgtgctgtcagaaaagcctcgcgtttcaaccgtgtacgcaaacaatggcagcgtgctgcagggcaccagcgttgccagtgtttaccacggcaagatactaatcggaaccgttttccacaaaaccctctactgtgaactgtag

SEQ ID NO: 17420 - DNA, 1065 bp, Artificial Sequence
  derived and/or modified sequence
atgggcaagctggtggccctggtgctgctgggcgtgggcctgagcctggtgggggagatgttcctggccttccgggagcgggtgaatgccagccgggaggtggagcctgtggagcctgagaactgccacctgattgaggagctggagagcggctctgaagatattgacatcctgcccagcggcctggccttcatcagcagcggcctgaagtacccaggcatgcccaactttgccccagatgagcccgggaagatcttcctgatggacctgaatgagcagaacccccgggcccaggccctggagatcagcggcggctttgacaaggagctgttcaacccccacggcatcagcatcttcatcgacaaggacaacacagtgtacctgtatgtggtgaaccacccccacatgaagagcacagtggagatcttcaagtttgaggagcagcagaggagcctggtgtacctgaagaccatcaagcatgagctgctgaagtctgtgaatgacatcgtggtgctgggccctgagcagttctacgccacccgggaccactacttcaccaacagcctgctgtccttctttgagatgatcctggacctgcgctggacctacgtgctcttctacagcccccgggaggtgaaggtggtggccaagggcttctgcagcgccaacggcatcaccgtgtctgctgaccagaagtatgtgtatgtggctgatgtggccgccaagaacatccacatcatggagaagcatgacaactgggacctgacccagctgaaggtgatccagctgggcaccctggtggacaacctgactgtggaccctgccaccggggacatcctggccggctgccaccccaaccccatgaagctgctgaactacaaccctgaggaccccccaggcagcgaggtgctgcgcatccagaatgtgctgtctgagaagccccgggtgtccacagtgtatgccaacaatggatctgtgctgcagggcacctctgtggcctctgtgtaccacggcaagatcctgattggcaccgtcttccacaagaccctgtactgtgagctgtag

SEQ ID NO: 17421 - DNA, 1065 bp, Artificial Sequence
  derived and/or modified sequence
atgggcaagctggtggccctggtgctgctgggcgtgggcctgagcctggttggagagatgttcctcgccttcagagagcgggtgaatgcctcccgtgaggtcgagcccgttgagcctgagaactgccacctgatcgaagaattggaatccgggagcgaagatatcgacatcctcccatcagggctggccttcataagcagcgggctgaagtatccaggaatgcctaatttcgcccccgacgaaccgggaaaaatctttctaatggacctgaacgagcaaaatcccagagcccaagctctggagatcagtggcggcttcgataaagagctttttaatccccacgggatctccatctttatcgataaggataacactgtgtacctgtatgtcgtgaaccaccctcacatgaaaagtaccgtagaaatcttcaagttcgaggaacagcagcgcagcctcgtctacttaaaaaccattaaacatgaactcctgaaatcggtgaacgatatcgtggtcctgggacctgaacagttttatgctaccagagatcattacttcacaaactcattactatcatttttcgagatgatcttagatttacgctggacgtacgttttgttctactctccccgggaagtgaaggttgtggcaaagggattctgcagtgctaacggaattactgttagtgccgatcaaaaatatgtctatgtggccgatgtggcagcaaagaatattcacattatggaaaagcatgacaactgggatctaacacagcttaaggtaatccagttaggaacgcttgttgacaatttaacagttgatcccgctactggggacattctggcaggctgtcaccctaaccctatgaagctccttaactacaaccccgaggatccacccggatccgaggtgcttcgcatccagaatgtactgtccgagaaaccacgggtttcaaccgtgtacgccaacaacggcagcgtactccaggggacatcagtcgcctccgtttatcacgggaagattctgataggaacggtatttcacaaaaccctctactgcgagctatag

SEQ ID NO: 17422 - DNA, 1105 bp, Artificial Sequence
  derived and/or modified sequence
accccgagaccatggggaagctcgtggcgctggtcctgctgggggtcggcctgtccttagtcggggagatgttcctggcgtttagagaaagggtgaatgcctctcgagaagtggagccagtagaacctgaaaactgccaccttattgaggaacttgaaagtggctctgaagatattgatatacttcctagtgggctggcttttatctccagtggattaaaatatccaggcatgccaaactttgcgccagatgaaccaggaaaaatcttcttgatggatctgaatgaacaaaacccaagggcacaagcgctagaaatcagtggtggatttgacaaagaattatttaatccacatgggatcagtattttcatcgacaaagacaatactgtgtatctttatgttgtgaatcatccccacatgaagtccactgtggagatatttaaatttgaggaacaacaacgttctctggtatacctgaaaactataaaacatgaacttctcaaaagtgtgaatgacattgtggttcttggaccagaacagttctatgccaccagagaccactattttaccaactccctcctgtcattttttgagatgatcttggatcttcgctggacttatgttcttttctacagcccaagggaggttaaagtggtggccaaaggattttgtagtgccaatgggatcacagtctcagcagaccagaagtatgtctatgtagctgatgtagcagctaagaacattcacataatggaaaaacatgataactgggatttaactcaactgaaggtgatacagttgggcaccttagtggataacctgactgtcgatcctgccacaggagacattttggcaggatgccatcctaatcctatgaagctactgaactataaccctgaggaccctccaggatcagaagtacttcgcatccagaatgttttgtctgagaagcccagggtgagcaccgtgtatgccaacaatggctctgtgcttcagggcacctctgtggcttctgtgtaccatgggaaaattctcataggcaccgtatttcacaaaactctgtactgtgagctctagactctagatagtaaaaaaaaaaaaaaaaa

SEQ ID NO: 17423 - DNA, 1065 bp, Artificial Sequence
  derived and/or modified sequence
atgggtaagttggtcgccctggttttgctaggtgtaggactctccctggttggagagatgtttctggcattccgcgaaagggtgaatgcttctcgcgaggtggagccagttgagcctgagaattgtcatctgatagaggagctcgagtcgggatcagaggacatagatatcctgccaagcgggctagcattcattagtagcgggctgaagtaccccggaatgcctaattttgccccagatgaacctgggaaaatcttcctgatggacttaaacgaacaaaatcctcgtgcgcaggctctcgagatctccggaggctttgataaggagctgttcaaccctcatggaattagcatatttatagacaaagataatacagtttatctttatgtcgtcaaccatccgcatatgaagagtaccgtggaaatcttcaagttcgaagagcaacagcgctctctggtctacctcaaaacaatcaaacacgagcttttaaagtccgtcaatgacatagttgttcttggacccgagcagttttacgcaacacgcgaccactacttcactaattcgctgctgtccttttttgaaatgattctagacctgagatggacatacgtcctgttttactcccctagagaggttaaggttgttgctaaaggcttctgtagcgctaacggcattactgtgtctgccgatcagaagtatgtctacgtcgcagacgtggcagccaagaacattcacatcatggagaaacatgacaattgggacctcacccagctcaaagtcatccaactgggcacacttgttgacaaccttaccgtggatcccgcaactggagacatcctcgctggttgccaccccaaccccatgaagctgttgaattacaaccctgaggatcctcctgggtcggaagttttaaggatacagaatgttctgagcgagaagccgagggtaagcaccgtctacgccaataatggctctgtcctccagggaactagtgtcgcaagtgtgtatcatggcaaaatccttattggaacagtgttccacaaaactctttactgcgagctgtag

SEQ ID NO: 17424 - DNA, 1065 bp, Artificial Sequence
  derived and/or modified sequence
atgggcaagctggtggccctggtgctgctgggcgtgggcctgagcctggtgggcgagatgttcctggccttcagagagagagtgaacgccagcagagaggtggagcccgtggagcccgagaactgccacctgatcgaggagctggagagcggcagcgaggacatcgacatcctgcccagcggcctggccttcatcagcagcggcctgaagtaccccggcatgcccaacttcgcccccgacgagcccggcaagatcttcctgatggacctgaacgagcagaaccccagagcccaggccctggagatcagcggcggcttcgacaaggagctgttcaacccccacggcatcagcatcttcatcgacaaggacaacaccgtgtacctgtacgtggtgaaccacccccacatgaagagcaccgtggagatcttcaagttcgaggagcagcagagaagcctggtgtacctgaagaccatcaagcacgagctgctgaagagcgtgaacgacatcgtggtgctgggccccgagcagttctacgccaccagagaccactacttcaccaacagcctgctgagcttcttcgagatgatcctggacctgagatggacctacgtgctgttctacagccccagagaggtgaaggtggtggccaagggcttctgcagcgccaacggcatcaccgtgagcgccgaccagaagtacgtgtacgtggccgacgtggccgccaagaacatccacatcatggagaagcacgacaactgggacctgacccagctgaaggtgatccagctgggcaccctggtggacaacctgaccgtggaccccgccaccggcgacatcctggccggctgccaccccaaccccatgaagctgctgaactacaaccccgaggacccccccggcagcgaggtgctgagaatccagaacgtgctgagcgagaagcccagagtgagcaccgtgtacgccaacaacggcagcgtgctgcagggcaccagcgtggccagcgtgtaccacggcaagatcctgatcggcaccgtgttccacaagaccctgtactgcgagctgtag

SEQ ID NO: 17425 - protein, 146 aa, Artificial Sequence
  derived and/or modified sequence
MINMGDSHVDTSSTVSEAVAEEVSLFSMTDMILFSLIVGLLTYWFLFRKKKEEVPEFTKIQTLTSSVRESSFVEKMKKTGRNIIVFYGSQTGTAEEFANRLSKDAHRYGMRGMSADPEEYDLADLSSLPEIDNALVVFCMATYGEG

SEQ ID NO: 17426 - protein, 172 aa, Artificial Sequence
  derived and/or modified sequence
MINMGDSHVDTSSTVSEAVAEEVSLFSMTDMILFSLIVGLLTYWFLFRKKKEEVPEFTKIQTLTSSVRESSFVEKMKKTGRNIIVFYGSQTGTAEEFANRLSKDAHRYGMRGMSADPEEYDLADLSSLPEIDNALVVFCMATYGEGDPTDNAQDFYDWLQETDVDLSGVKFA

SEQ ID NO: 17427 - protein, 62 aa, Artificial Sequence
  derived and/or modified sequence
MINMGDSHVDTSSTVSEAVAEEVSLFSMTDMILFSLIVGLLTYWFLFRKKKEEVPEFTKIQT

SEQ ID NO: 17428 - protein, 368 aa, Artificial Sequence
  derived and/or modified sequence
MGKYVDKRLEQLGAQRIFELGLGDDDGNLEEDFITWREQFWPAVCEHFGVEATGEESSIRQYELVVHTDIDAAKVYMGEMGRLKSYENQKPPFDAKNPFLAAVTTNRKLNQGTERHLMHLELDISDSKIRYESGDHVAVYPANDSALVNQLGKILGADLDVVMSLNNLDEESNKKHPFPCPTSYRTALTYYLDITNPPRTNVLYELAQYASEPSEQELLRKMASSSGEGKELYLSWVVEARRHILAILQDCPSLRPPIDHLCELLPRLQARYYSIASSSKVHPNSVHICAVVVEYETKAGRINKGVATNWLRAKEPAGENGGRALAVPTSTSVGMHGTWPGMCRTPSTTSWLSSGPWSTRRRWTTSRN

SEQ ID NO: 17429 - protein, 39 aa, Artificial Sequence
  derived and/or modified sequence
MINMGDSHVDTSSTVSEAVAEEVSLFSMTDMILFSLIVG

SEQ ID NO: 17430 - protein, 166 aa, Artificial Sequence
  derived and/or modified sequence
MINMGDSHVDTSSTVSEAVAEEVSLFSMTDMILFSLIVGLLTYWFLFRKKKEEVPEFTKIQTLTSSVRESSFVEKMKKTGRNIIVFYGSQTGTAEEFANRLSKDAHRYGMRGMSADPEEYDLADLSSLPEIDNALVVFCMATYGEGDPTDNAQDFYDWLQETDVDL

SEQ ID NO: 17431 - protein, 188 aa, Artificial Sequence
  derived and/or modified sequence
MINMGDSHVDTSSTVSEAVAEEVSLFSMTDMILFSLIVGLLTYWFLFRKKKEEVPEFTKIQTLTSSVRESSFVEKMKKTGRNIIVFYGSQTGTAEEFANRLSKDAHRYGMRGMSADPEEYDLADLSSLPEIDNALVVFCMATYGEGDPTDNAQDFYDWLQETDVDLSGVKFAVFGLGNKTYEHFNAMG

SEQ ID NO: 17432 - protein, 573 aa, Artificial Sequence
  derived and/or modified sequence
MGSRWPAVPPWGLQIHVSERQPSRPPPCPQQPGQATCETLSSAPDPSTTRMSPPCPQPQSAPGGIGCWRLKVFGLGNKTYEHFNAMGKYVDKRLEQLGAQRIFELGLGDDDGNLEEDFITWREQFWPAVCEHFGVEATGEESSIRQYELVVHTDIDAAKVYMGEMGRLKSYENQKPPFDAKNPFLAAVTTNRKLNQGTERHLMHLELDISDSKIRYESGDHVAVYPANDSALVNQLGKILGADLDVVMSLNNLDEESNKKHPFPCPTSYRTALTYYLDITNPPRTNVLYELAQYASEPSEQELLRKMASSSGEGKELYLSWVVEARRHILAILQDCPSLRPPIDHLCELLPRLQARYYSIASSSKVHPNSVHICAVVVEYETKAGRINKGVATNWLRAKEPAGENGGRALVPMFVRKSQFRLPFKATTPVIMVGPGTGVAPFIGFIQERAWLRQQGKEVGETLLYYGCRRSDEDYLYREELAQFHRDGALTQLNVAFSREQSHKVYVQHLLKQDREHLWKLIEGGAHIYVCGTPSSCPGMHGTWPGMCRTPSTTSWLSSGPWSTRRRWTTSRN

SEQ ID NO: 17433 - protein, 140 aa, Artificial Sequence
  derived and/or modified sequence
MINMGDSHVDTSSTVSEAVAEEVSLFSMTDMILFSLIVGLLTYWFLFRKKKEEVPEFTKIQTLTSSVRESSFVEKMKKTGRNIIVFYGSQTGTAEEFANRLSKDAHRYGMRGMSADPEEYDLADLSSLPEIDNALVVFCM

SEQ ID NO: 17434 - protein, 680 aa, Artificial Sequence
  derived and/or modified sequence
MINMGDSHVDTSSTVSEAVAEEVSLFSMTDMILFSLIVGLLTYWFLFRKKKEEVPEFTKIQTLTSSVRESSFVEKMKKTGRNIIVFYGSQTGTAEEFANRLSKDAHRYGMRGMSADPEEYDLADLSSLPEIDNALVVFCMATYGEGDPTDNAQDFYDWLQETDVDLSGVKFAVFGLGNKTYEHFNAMGKYVDKRLEQLGAQRIFELGLGDDDGNLEEDFITWREQFWPAVCEHFGVEATGEESSIRQYELVVHTDIDAAKVYMGEMGRLKSYENQKPPFDAKNPFLAAVTTNRKLNQGTERHLMHLELDISDSKIRYESGDHVAVYPANDSALVNQLGKILGADLDVVMSLNNLDEESNKKHPFPCPTSYRTALTYYLDITNPPRTNVLYELAQYASEPSEQELLRKMASSSGEGKELYLSWVVEARRHILAILQDCPSLRPPIDHLCELLPRLQARYYSIASSSKVHPNSVHICAVVVEYETKAGRINKGVATNWLRAKEPAGENGGRALVPMFVRKSQFRLPFKATTPVIMVGPGTGVAPFIGFIQERAWLRQQGKEVGETLLYYGCRRSDEDYLYREELAQFHRDGALTQLNVAFSREQSHKVYVQHLLKQDREHLWKLIEGGAHIYVCGDARNMARDVQNTFYDIVAELGAMEHAQAVDYIKKLMTKGRYSLDVWS

SEQ ID NO: 17435 - protein, 488 aa, Artificial Sequence
  derived and/or modified sequence
MPRTSTTGCRRQTWISLGSSSRLEEDFITWREQFWPAVCEHFGVEATGEESSIRQYELVVHTDIDAAKVYMGEMGRLKSYENQKPPFDAKNPFLAAVTTNRKLNQGTERHLMHLELDISDSKIRYESGDHVAVYPANDSALVNQLGKILGADLDVVMSLNNLDEESNKKHPFPCPTSYRTALTYYLDITNPPRTNVLYELAQYASEPSEQELLRKMASSSGEGKELYLSWVVEARRHILAILQDCPSLRPPIDHLCELLPRLQARYYSIASSSKVHPNSVHICAVVVEYETKAGRINKGVATNWLRAKEPAGENGGRALVPMFVRKSQFRLPFKATTPVIMVGPGTGVAPFIGFIQERAWLRQQGKEVGETLLYYGCRRSDEDYLYREELAQFHRDGALTQLNVAFSREQSHKVYVQHLLKQDREHLWKLIEGGAHIYVCGDARNMARDVQNTFYDIVAELGAMEHAQAVDYIKKLMTKGRYSLDVWS

SEQ ID NO: 17436 - DNA, 441 bp, Artificial Sequence
  derived and/or modified sequence
atgatcaatatgggcgactcacatgtcgatacgtcatcgactgtttcagaagctgtggctgaagaggtaagtctctttagtatgaccgatatgattttgttcagtctgatcgtgggattactcacttactggtttctcttcaggaagaaaaaggaggaggtgcctgagttcacgaaaatacaaaccttgacctcttcagtgcgggaaagctcctttgtggagaagatgaagaagactgggagaaatattatagtgttttacgggagccaaaccgggactgctgaggagtttgccaataggctgtcaaaagacgcccatcgctacggcatgagaggtatgtctgcagatcctgaggaatatgatctggccgatttgtcatccttaccagagatcgacaacgctttagtcgttttttgtatggccacatacggagagggctag

SEQ ID NO: 17437 - DNA, 519 bp, Artificial Sequence
  derived and/or modified sequence
atgataaatatgggcgattcccatgtggacacttctagcacagtgtccgaagcagtcgccgaggaggtctcactgttctcaatgacggatatgatcttgtttagccttatcgtcggactgctgacatactggttcctgtttagaaagaaaaaagaggaggtgcccgaattcacaaagatccagacacttacatcctcagttcgcgagagctcctttgtcgagaagatgaagaagacagggcggaatatcatcgtcttctatggctcccagacgggtaccgccgaggagtttgccaatcgcctcagcaaggacgctcaccggtacgggatgcgtggcatgagtgccgatcctgaggagtatgacctcgccgatctcagttctctgccagagatagataacgccctcgtcgttttctgtatggcaacctacggtgagggtgaccctactgacaatgctcaggacttctacgattggctgcaagagacagatgtggacctctctggcgtaaaatttgcttag

SEQ ID NO: 17438 - DNA, 189 bp, Artificial Sequence
  derived and/or modified sequence
atgattaacatgggtgattcccatgttgataccagcagcaccgttagcgaagcggtggccgaggaagtgagtctcttcagtatgacagacatgattctgtttagcctgattgtggggctgttaacttactggtttctcttccgcaaaaagaaagaggaagtgccagaatttacgaagattcagacatag

SEQ ID NO: 17439 - DNA, 1107 bp, Artificial Sequence
  derived and/or modified sequence
atgggcaagtatgtcgacaaacgcttagagcagcttggggcacagagaatttttgagttaggtctcggagacgatgatggaaacctggaggaagatttcatcacatggcgtgagcagttttggccagcagtgtgcgagcacttcggcgtagaagcaacgggcgaggaatctagtatacgtcagtacgaactggtcgttcataccgatatcgatgcggccaaggtgtacatgggcgagatgggccggctcaagtcctacgaaaaccagaaacctccttttgacgccaaaaatccattcctggcagccgttactacaaataggaagctcaaccaggggacagaaagacatctcatgcatcttgagctggacatctcagacagcaagatcagatatgagagtggcgaccacgtggctgtctacccggctaatgatagtgctctagtgaaccaactgggcaaaatcctcggggccgatttggacgtggttatgtcactgaataatctggacgaggagtccaacaaaaagcaccccttcccctgtcccacatcttatagaacagcactgacttactacctggacatcactaatccaccccgtactaacgtgctgtacgaattggcacaatatgcctcagagcccagcgaacaagaactacttagaaagatggcttctagctctggtgagggaaaggagctttatttgagctgggtggttgaagctaggaggcacatccttgccatactgcaggactgcccgtcactacggccaccaatagatcacttgtgcgaactcctgccaagactgcaggcccgttattattcaatagccagctcttcaaaggtccacccaaattctgttcatatctgtgccgtcgtggtggagtatgagacaaaggccggccgaatcaacaagggtgtggctacaaattggctgagagctaaagagccagctggggagaacggaggaagagcgctcgctgtgcccacctcaacaagtgttggcatgcacggaacttggcccggtatgtgtcgcacgccctcaacaacttcttggctgtcaagcggcccatggtcaaccagaaggcgctggaccaccagtcgcaactag

SEQ ID NO: 17440 - DNA, 120 bp, Artificial Sequence
  derived and/or modified sequence
atgattaacatgggagattcacatgtggatacatcatcaactgtatcagaggccgttgctgaagaggtgtccctctttagtatgacggacatgatcttgttctccctgatcgtaggatag

SEQ ID NO: 17441 - DNA, 501 bp, Artificial Sequence
  derived and/or modified sequence
atgatcaacatgggcgactcccacgtggacacttcctccaccgtgtcagaagccgtcgctgaagaggtcagtcttttcagcatgactgatatgattttattcagcctgattgtaggcttgctcacttactggttcctgttccgaaagaagaaagaggaagtgccagaatttacaaagattcagactttaacatccagtgtcagagagagtagctttgtggaaaaaatgaagaaaacgggccgcaatatcattgtgttctatggatctcaaacaggcactgcagaagaattcgccaacaggttatctaaggacgctcatagatacgggatgcggggtatgtctgcggatccagaggagtatgatctggccgatctgtcttccctgccggaaattgataatgcactggtggtgttttgcatggcaacctacggtgagggagatccaaccgacaacgcgcaggacttctatgactggctacaggagacagatgtagatctgtag

SEQ ID NO: 17442 - DNA, 567 bp, Artificial Sequence
  derived and/or modified sequence
atgattaacatgggggatagccacgtggatacgtcttcgacggtctcagaagcagttgccgaagaagtttcccttttttccatgaccgacatgattcttttttccctcattgtcggactgctgacatactggttcttattcagaaagaagaaagaggaggttcctgaatttaccaagatccagaccctcacatccagcgtcagagaaagttcctttgtggaaaaaatgaaaaaaaccggcaggaatatcatagtgttttatggttctcagacgggcaccgccgaggagttcgctaaccgtctgtcaaaagacgctcacagatatggtatgcggggtatgtcagcggatcctgaggagtatgacctggccgatctgtccagtctgccagaaatcgacaatgccctcgtcgtgttttgtatggccacctatggtgagggcgatccaacagacaacgcgcaggatttttatgactggctgcaagaaacagatgtcgacttaagcggagtgaaatttgctgtgtttggtctgggcaacaagacatatgagcactttaatgccatggggtag

SEQ ID NO: 17443 - DNA, 189 bp, Artificial Sequence
  derived and/or modified sequence
atgattaacatgggggatagccacgtcgacacatcttccactgtgtcagaggctgtagccgaagaggtcagcctgtttagtatgaccgacatgatcctgttcagcctgattgtgggcctgctgacctactggtttctgttcagaaaaaaaaaagaggaagtacccgaatttacaaaaattcagacatag

SEQ ID NO: 17444 - DNA, 1722 bp, Artificial Sequence
  derived and/or modified sequence
atgggtagcagatggcccgctgtgcccccttggggattgcaaatccacgtgtccgaacgccagccgtcaaggcctccaccatgtccccaacagccagggcaggccacctgtgagaccctcagcagcgcccccgaccctagcaccactagaatgtctcctccgtgcccgcagccacagtccgcacccgggggaatcggatgctggcgattgaaggtattcggactggggaacaaaacatacgaacatttcaacgcaatgggtaagtatgtagacaagcgcttggaacagttaggcgcacaacgcatcttcgagttaggattgggagacgatgacggaaatctggaggaagatttcattacctggagagagcagttttggcccgcggtctgcgaacactttggcgtcgaagcaacaggggaggagtctagcatacggcagtacgagctggtcgttcacacagatatcgacgcggcaaaggtgtatatgggtgagatgggccggctaaagtcctacgagaaccagaaaccgcccttcgatgctaagaatcctttcctggcagctgtgaccaccaatcgcaagcttaaccagggaacagaaaggcacctgatgcacctggaactggacatatcagactccaagattagatacgagagcggtgaccacgtagcagtctaccctgcaaatgattcggctctggtgaaccagcttggcaagatattgggggccgacctggatgtggtgatgtcgctgaacaacctggacgaggaatctaacaagaagcaccccttcccttgcccaacctcatatcgtacggccctcacttattacctggatattacgaaccccccaagaactaacgtgctgtacgaactggcacagtatgcatccgaaccctccgagcaggaactgctgcggaaaatggcatccagctccggagagggaaaggaactatacctgtcttgggtcgttgaagcccgaagacacatcttggccattcttcaggactgtccatcacttcgaccccctatcgaccacctctgtgaattgttgcccagactgcaagctcgatactacagcatcgcgtcaagcagcaaagtgcatcccaattctgtccacatctgcgctgtggtggtggaatatgaaaccaaggccggtcgaattaacaagggcgtggccacaaactggctgcgagcgaaggagcctgcgggcgagaatggcgggagagccctggtcccaatgtttgtgcggaaaagtcagttccggttgccttttaaagcgactacaccagttattatggtcggcccaggcactggcgtggctcccttcatcgggtttattcaggagagggcctggctgcggcagcagggcaaagaggtaggcgaaacactgctgtactatgggtgtagaaggtctgacgaggactacctgtaccgggaggaactggctcagttccatcgggacggtgccctgacccagctgaatgtggcattctcaagagaacagtctcataaggtgtatgtccagcacctgttaaagcaggatagagagcacctgtggaagttaattgaggggggtgcgcatatttacgtatgtgggactccctcttcctgtccaggcatgcatggcacttggcccgggatgtgtcgcactccatccactacttcatggctgagttcaggaccttggtctacccggcggcggtggactacaagccggaattag

SEQ ID NO: 17445 - DNA, 423 bp, Artificial Sequence
  derived and/or modified sequence
atgattaatatgggtgatagccacgtggacacctcctcaacagtatctgaagcagtggctgaggaagtgtcactgtttagcatgaccgacatgattctcttctcacttatcgtaggtctgctgacctattggttcctcttccgcaaaaaaaaggaggaggtgcccgaattcactaagatacaaaccctgaccagcagtgtgcgagagtcttcctttgtagaaaaaatgaagaagacggggcgaaacatcatcgttttttatgggtcacagacggggactgcggaagagttcgcaaacagactctccaaggatgcacatcggtacggaatgcggggcatgtcagcagacccagaagaatatgacctggccgatctctcttcgctgcctgaaattgataatgcccttgtagtgttttgtatgtag

SEQ ID NO: 17446 - DNA, 2043 bp, Artificial Sequence
  derived and/or modified sequence
atgatcaacatgggggactcacacgttgacactagctctaccgtcagcgaagctgtggccgaggaagtttcactgttttcaatgactgatatgatcctgttctcccttattgtgggactccttacctattggttcctgtttcgcaagaaaaaagaagaggtccctgagtttacgaagattcagaccctgacgtctagcgtcagagagtctagtttcgttgaaaagatgaaaaaaacgggccgcaacatcatagtattctacggcagccaaactgggaccgctgaagagttcgccaataggttgagcaaagacgcacaccggtacggcatgcggggtatgagcgccgacccggaggagtacgaccttgctgacctttcctcactgcccgaaatcgataacgccttagtcgtgttctgcatggcaacctacggggaaggcgaccccacagacaatgcccaagacttctatgactggcttcaagaaaccgatgtcgatctgagtggcgtcaaattcgcagtttttggcttgggaaacaagacctacgagcatttcaatgcgatgggaaagtatgttgacaagaggctagaacagcttggagcccagcgtatctttgagcttggactgggcgacgacgacggaaatctggaggaggacttcataacatggcgggagcagttctggccggcagtgtgtgagcacttcggcgtcgaggctaccggcgaagagtcatctattaggcagtatgagttagttgtgcacaccgatatcgatgccgccaaagtctacatgggagagatggggcgcttaaagtcatatgaaaatcagaagcctccttttgacgctaaaaatcccttcctcgccgccgtaacgacgaatagaaagctgaaccagggaaccgaaaggcatctgatgcatcttgaactagatataagcgactcgaagataaggtatgagtcgggcgaccatgtggccgtctacccggcgaatgattcagcactcgtgaatcagcttgggaaaattttgggggcggatctcgatgtcgttatgtccctcaacaatttagatgaggagagcaataagaagcaccccttcccttgtcccactagctataggaccgccctaacctactatctggacataaccaaccccccaagaacaaacgtgctctacgagttggcccagtatgcgtctgagcccagtgaacaggagcttctacgtaagatggcctcatctagtggagaaggaaaagaactctatttgtcctgggttgtcgaggccaggagacacatcttagccatcctccaggattgcccttcccttaggcccccgatcgatcatctgtgtgagctcctgccccgtctacaagctcggtattactcaatcgccagcagctcaaaggtgcacccaaattctgtacacatttgcgcggttgtcgtggaatacgaaactaaggccggaagaatcaacaagggcgtcgctacaaattggctgagagccaaagagcctgcgggagagaacggtggtcgggcgctcgtgcctatgtttgttcggaaaagccagtttcgcctgccttttaaggcaactacgccagtcatcatggttggacctggtaccggggtcgccccttttattgggttcattcaggagagagcctggctgagacaacaagggaaggaagtgggggaaaccctgctgtactacggctgtcgtagatccgacgaggattacctataccgcgaggaactggcacaatttcatcgggatggggcgctaactcagctgaacgtggcgttcagtcgtgaacagtcccacaaggtgtatgtgcagcacctattgaaacaggaccgggaacacctgtggaaattaattgagggaggcgcacacatttatgtctgcggggacgcacgtaacatggcccgggacgttcagaatacattctacgatatcgtggcggaactcggggccatggagcacgcccaagcagtggactatatcaagaagctcatgacaaaaggaaggtattcactggacgtgtggtcttag

SEQ ID NO: 17447 - DNA, 1467 bp, Artificial Sequence
  derived and/or modified sequence
atgccacgtacgagtaccacaggatgcaggaggcagacgtggatctcactgggtagctcctcgaggctagaggaagactttataacttggcgtgagcaattctggcctgctgtgtgcgagcattttggggtcgaggccaccggagaggagtcttccatccgccaatatgagttagtggtgcacactgacatcgacgcggccaaagtgtacatgggcgagatgggtagactgaaaagctacgaaaatcagaagccaccctttgacgccaaaaatcccttcttggccgcagtgaccactaataggaagctaaaccaagggacagaacgccatctgatgcacctcgaactcgatatttctgattctaagatacggtatgagtcaggggaccatgtagctgtttatcctgcaaacgatagtgccctggtcaatcagttgggtaaaatcctcggtgccgacctggacgtggtaatgagcttgaacaacttagacgaagagtccaataagaagcacccatttccctgccccacatcctatagaacagccctgacctactacttggatatcacgaacccccccagaaccaatgtgctgtatgagctggcccagtacgcctccgaaccctccgagcaggagctcctgcggaaaatggcatcaagttcaggtgaagggaaagaactttacttaagctgggtcgtggaggctagacggcacattctggctatcctccaggactgccctagcttgcggccgcccattgaccatctgtgcgagttgctgccaagactgcaggccaggtactactctattgccagttcatctaaagtgcaccccaactcagtgcatatctgtgccgtggtggtagagtacgagaccaaagctgggaggatcaacaagggggtggccacaaattggcttagagccaaagagcctgcaggcgagaacggcggccgagctctcgtgcctatgtttgtgaggaagagtcagtttagacttccttttaaggccactaccccggttatcatggtagggcctgggaccggagttgctcccttcatcggcttcatccaggaacgcgcctggctacgccagcaggggaaagaagtcggggaaactttattgtactatggctgccggaggagtgacgaggattacttgtaccgtgaagagttggctcagtttcacagggacggcgccctcacacagctgaacgttgctttctcacgggagcagtcccacaaggtgtacgtgcagcacctactcaagcaagacagggaacatctgtggaagttgattgaaggaggcgcccacatatacgtctgtggcgacgcaagaaacatggctcgtgatgtgcaaaatacgttctacgatatcgtggccgaactcggagctatggagcatgcacaggcggtggactatatcaaaaaattgatgacaaaggggcggtacagccttgacgtgtggagctag

SEQ ID NO: 17448 - DNA, 441 bp, Artificial Sequence
  derived and/or modified sequence
atgatcaacatgggagacagccacgtggacaccagcagcacagtgtctgaggccgtggccgaggaggtgtccctcttctccatgacagacatgatcctcttcagcctgattgtgggcctgctgacctactggttcctgttcaggaagaagaaggaggaggtgcctgagttcaccaagatccagaccctgaccagctctgtgcgggagagcagctttgtggagaagatgaagaagacaggaagaaacatcatcgtgttctacggcagccagacaggaacagctgaggagtttgccaaccggctgagcaaggatgcccacagatatggcatgaggggcatgtctgctgaccctgaggagtatgacctggccgacctgagcagcctgcctgagattgacaatgccctggtggtgttctgcatggccacctatggagagggctag

SEQ ID NO: 17449 - DNA, 519 bp, Artificial Sequence
  derived and/or modified sequence
atgatcaacatgggagacagccacgtggacaccagcagcacagtgtctgaggccgtggccgaggaggtgtccctcttctccatgacagacatgatcctcttcagcctgattgtgggcctgctgacctactggttcctgttcaggaagaagaaggaggaggtgcctgagttcaccaagatccagaccctgaccagctctgtgcgggagagcagctttgtggagaagatgaagaagacaggaagaaacatcatcgtgttctacggcagccagacaggaacagctgaggagtttgccaaccggctgagcaaggatgcccacagatatggcatgaggggcatgtctgctgaccctgaggagtatgacctggccgacctgagcagcctgcctgagattgacaatgccctggtggtgttctgcatggccacctatggagagggggaccccacagacaatgcccaggacttctatgactggctgcaggagacagatgtggacctgtctggagtgaagtttgcctag

SEQ ID NO: 17450 - DNA, 189 bp, Artificial Sequence
  derived and/or modified sequence
atgatcaacatgggagacagccacgtggacaccagcagcacagtgtctgaggccgtggccgaggaggtgtccctcttctccatgacagacatgatcctcttcagcctgattgtgggcctgctgacctactggttcctgttcaggaagaagaaggaggaggtgcctgagttcaccaagatccagacctag

SEQ ID NO: 17451 - DNA, 1107 bp, Artificial Sequence
  derived and/or modified sequence
atgggcaagtatgtggacaagaggctggagcagctgggcgcccagaggatctttgagctgggcctgggagatgatgatggcaacctggaggaggacttcatcacctggagggagcagttctggccagctgtgtgtgagcactttggagtggaggccactggagaggagagcagcatccggcagtatgagctggtggtgcacacagacattgatgctgccaaggtgtacatgggagagatgggccgcctgaagagctatgagaaccagaagcccccatttgatgccaagaaccccttcctggccgctgtgaccaccaacaggaagctgaaccagggcacagagcggcacctgatgcacctggagctggacatcagtgacagcaagatccgctatgaaagtggggaccacgtggccgtgtacccagccaatgattctgccctggtgaaccagctgggcaagatcctgggcgctgacctggatgtggtgatgagcctgaacaacctggatgaggagagcaacaagaagcaccccttcccctgccccaccagctacagaacagccctgacctactacctggacatcaccaacccccccaggaccaacgtgctgtatgagctggcccagtatgccagcgagcccagcgagcaggagctgctgaggaagatggccagcagcagcggggagggcaaggagctgtacctgtcctgggtggtggaggcccggcggcacatcctggccatcctgcaggactgccccagcctgcggccccccatcgaccacctgtgtgagctgctgccccggctgcaggcccgctactacagcatcgccagcagcagcaaggtgcaccccaacagcgtgcacatctgtgctgtggtggtggagtatgagaccaaggccggccgcatcaacaagggcgtggccaccaactggctgcgggccaaggagcctgctggagaaaatggaggccgggccctggccgtgcccaccagcacctctgtgggcatgcacggcacctggccaggcatgtgcaggacccccagcaccacctcctggctgagcagcggcccctggagcacccggcggcgctggaccaccagcagaaattag

SEQ ID NO: 17452 - DNA, 120 bp, Artificial Sequence
  derived and/or modified sequence
atgatcaacatgggagacagccacgtggacaccagcagcacagtgtctgaggccgtggccgaggaggtgtccctcttctccatgacagacatgatcctcttcagcctgattgtgggctag

SEQ ID NO: 17453 - DNA, 501 bp, Artificial Sequence
  derived and/or modified sequence
atgatcaacatgggagacagccacgtggacaccagcagcacagtgtctgaggccgtggccgaggaggtgtccctcttctccatgacagacatgatcctcttcagcctgattgtgggcctgctgacctactggttcctgttcaggaagaagaaggaggaggtgcctgagttcaccaagatccagaccctgaccagctctgtgcgggagagcagctttgtggagaagatgaagaagacaggaagaaacatcatcgtgttctacggcagccagacaggaacagctgaggagtttgccaaccggctgagcaaggatgcccacagatatggcatgaggggcatgtctgctgaccctgaggagtatgacctggccgacctgagcagcctgcctgagattgacaatgccctggtggtgttctgcatggccacctatggagagggggaccccacagacaatgcccaggacttctatgactggctgcaggagacagatgtggacctgtag

SEQ ID NO: 17454 - DNA, 567 bp, Artificial Sequence
  derived and/or modified sequence
atgatcaacatgggagacagccacgtggacaccagcagcacagtgtctgaggccgtggccgaggaggtgtccctcttctccatgacagacatgatcctcttcagcctgattgtgggcctgctgacctactggttcctgttcaggaagaagaaggaggaggtgcctgagttcaccaagatccagaccctgaccagctctgtgcgggagagcagctttgtggagaagatgaagaagacaggaagaaacatcatcgtgttctacggcagccagacaggaacagctgaggagtttgccaaccggctgagcaaggatgcccacagatatggcatgaggggcatgtctgctgaccctgaggagtatgacctggccgacctgagcagcctgcctgagattgacaatgccctggtggtgttctgcatggccacctatggagagggggaccccacagacaatgcccaggacttctatgactggctgcaggagacagatgtggacctgtctggagtgaagtttgctgtgtttggcctgggcaacaagacctatgagcacttcaatgccatgggctag

SEQ ID NO: 17455 - DNA, 1722 bp, Artificial Sequence
  derived and/or modified sequence
atgggcagccgctggccagctgtgcccccctggggcctgcagatccacgtgtctgagcggcagcccagccggcccccaccctgcccccagcagcccggccaggccacctgtgagaccctgagcagcgccccagaccccagcaccaccaggatgagccccccctgcccccagccccagagcgcccctgggggcatcggctgctggaggctgaaggtgtttggcctgggcaacaagacctatgagcacttcaatgccatgggcaagtatgtggacaagaggctggagcagctgggcgcccagaggatctttgagctgggcctgggagatgatgatggcaacctggaggaggacttcatcacctggagggagcagttctggccagctgtgtgtgagcactttggagtggaggccaccggggaggagagcagcatccggcagtatgagctggtggtgcacacagacattgatgctgccaaggtgtacatgggagagatgggccgcctgaagagctatgagaaccagaagcccccatttgatgccaagaaccccttcctggccgctgtgaccaccaacaggaagctgaaccagggcacagagcggcacctgatgcacctggagctggacatcagtgacagcaagatccgctatgagagcggggaccacgtggccgtgtacccagccaatgacagcgccctggtgaaccagctgggcaagatcctgggcgctgacctggatgtggtgatgagcctgaacaacctggatgaggagagcaacaagaagcaccccttcccctgccccaccagctacagaacagccctgacctactacctggacatcaccaacccccccaggaccaacgtgctgtatgagctggcccagtatgccagcgagcccagcgagcaggagctgctgaggaagatggccagcagcagtggagagggcaaggagctgtacctgtcctgggtggtggaggcccggcggcacatcctggccatcctgcaggactgccccagcctgcggccccccatcgaccacctgtgtgagctgctgccccggctgcaggcccgctactacagcatcgccagcagcagcaaggtgcaccccaacagcgtgcacatctgtgctgtggtggtggagtatgagaccaaggccggccgcatcaacaagggcgtggccaccaactggctgcgggccaaggagcctgctggggagaatggaggccgggccctggtgcccatgtttgtgaggaagagccagttccggctgcccttcaaggccaccacccctgtgatcatggtgggccctggcactggagtggcccccttcatcggcttcatccaggagcgggcctggctgcggcagcagggcaaggaggtgggggagaccctgctgtactacggctgcagaagaagtgatgaggactacctgtaccgggaggagctggcccagttccacagagatggagccctgacccagctgaatgtggccttcagccgggagcagagccacaaggtgtatgtgcagcacctgctgaagcaggaccgggagcacctgtggaagctgattgagggcggggcccacatctacgtgtgtggcacccccagcagctgccccggcatgcacggcacctggccaggcatgtgcaggacccccagcaccacctcctggctgagcagcggcccctggagcacccggcggcgctggaccaccagcaggaactag

SEQ ID NO: 17456 - DNA, 423 bp, Artificial Sequence
  derived and/or modified sequence
atgatcaacatgggagacagccacgtggacaccagcagcacagtgtctgaggccgtggccgaggaggtgtccctcttctccatgacagacatgatcctcttcagcctgattgtgggcctgctgacctactggttcctgttcaggaagaagaaggaggaggtgcctgagttcaccaagatccagaccctgaccagctctgtgcgggagagcagctttgtggagaagatgaagaagacaggaagaaacatcatcgtgttctacggcagccagacaggaacagctgaggagtttgccaaccggctgagcaaggatgcccacagatatggcatgaggggcatgtctgctgaccctgaggagtatgacctggccgacctgagcagcctgcctgagattgacaatgccctggtggtgttctgcatgtag

SEQ ID NO: 17457 - DNA, 2043 bp, Artificial Sequence
  derived and/or modified sequence
atgatcaacatgggagacagccacgtggacaccagcagcacagtgtctgaggccgtggccgaggaggtgtccctcttctccatgacagacatgatcctcttcagcctgattgtgggcctgctgacctactggttcctgttcaggaagaagaaggaggaggtgcctgagttcaccaagatccagaccctgaccagctctgtgcgggagagcagctttgtggagaagatgaagaagacaggaagaaacatcatcgtgttctacggcagccagacaggaacagctgaggagtttgccaaccggctgagcaaggatgcccacagatatggcatgaggggcatgtctgctgaccctgaggagtatgacctggccgacctgagcagcctgcctgagattgacaatgccctggtggtgttctgcatggccacctatggagagggggaccccacagacaatgcccaggacttctatgactggctgcaggagacagatgtggacctgtctggagtgaagtttgctgtgtttggcctgggcaacaagacctatgagcacttcaatgccatgggcaagtatgtggacaagaggctggagcagctgggcgcccagaggatctttgagctgggcctgggagatgatgatggcaacctggaggaggacttcatcacctggagggagcagttctggccagctgtgtgtgagcactttggagtggaggccactggagaggagagcagcatccggcagtatgagctggtggtgcacacagacattgatgctgccaaggtgtacatgggagagatgggccgcctgaagagctatgagaaccagaagcccccatttgatgccaagaaccccttcctggccgctgtgaccaccaacaggaagctgaaccagggcacagagcggcacctgatgcacctggagctggacatcagtgacagcaagatccgctatgaaagtggggaccacgtggccgtgtacccagccaatgattctgccctggtgaaccagctgggcaagatcctgggcgctgacctggatgtggtgatgagcctgaacaacctggatgaggagagcaacaagaagcaccccttcccctgccccaccagctacagaacagccctgacctactacctggacatcaccaacccccccaggaccaacgtgctgtatgagctggcccagtatgccagcgagcccagcgagcaggagctgctgaggaagatggccagcagcagcggggagggcaaggagctgtacctgtcctgggtggtggaggcccggcggcacatcctggccatcctgcaggactgccccagcctgcggccccccatcgaccacctgtgtgagctgctgccccggctgcaggcccgctactacagcatcgccagcagcagcaaggtgcaccccaacagcgtgcacatctgtgctgtggtggtggagtatgagaccaaggccggccgcatcaacaagggcgtggccaccaactggctgcgggccaaggagcctgctggagaaaatggaggccgggccctggtgcccatgtttgtgaggaagagccagttccggctgcccttcaaggccaccacccctgtgatcatggtgggccctggcaccggggtggcccccttcatcggcttcatccaggagcgggcctggctgcggcagcagggcaaggaggtgggggagaccctgctgtactacggctgccgccgcagtgatgaggactacctgtaccgggaggagctggcccagttccacagagatggagccctgacccagctgaatgtggccttcagccgggagcagagccacaaggtgtatgtgcagcacctgctgaagcaggaccgggagcacctgtggaagctgattgaaggaggagcccacatctacgtgtgtggagatgccaggaacatggccagagatgtgcagaacaccttctatgacatcgtggccgagctgggcgccatggagcacgcccaggccgtggactacatcaagaagctgatgaccaagggccgctacagcctggatgtgtggagctag

SEQ ID NO: 17458 - DNA, 1467 bp, Artificial Sequence
  derived and/or modified sequence
atgcccaggaccagcaccaccggctgccggcggcagacctggatcagcctgggcagcagcagccggctggaggaggacttcatcacctggagggagcagttctggccagctgtgtgtgagcactttggagtggaggccactggagaggagagcagcatccggcagtatgagctggtggtgcacacagacattgatgctgccaaggtgtacatgggagagatgggccgcctgaagagctatgagaaccagaagcccccatttgatgccaagaaccccttcctggccgctgtgaccaccaacaggaagctgaaccagggcacagagcggcacctgatgcacctggagctggacatcagtgacagcaagatccgctatgaaagtggggaccacgtggccgtgtacccagccaatgattctgccctggtgaaccagctgggcaagatcctgggcgctgacctggatgtggtgatgagcctgaacaacctggatgaggagagcaacaagaagcaccccttcccctgccccaccagctacagaacagccctgacctactacctggacatcaccaacccccccaggaccaacgtgctgtatgagctggcccagtatgccagcgagcccagcgagcaggagctgctgaggaagatggccagcagcagcggggagggcaaggagctgtacctgtcctgggtggtggaggcccggcggcacatcctggccatcctgcaggactgccccagcctgcggccccccatcgaccacctgtgtgagctgctgccccggctgcaggcccgctactacagcatcgccagcagcagcaaggtgcaccccaacagcgtgcacatctgtgctgtggtggtggagtatgagaccaaggccggccgcatcaacaagggcgtggccaccaactggctgcgggccaaggagcctgctggagaaaatggaggccgggccctggtgcccatgtttgtgaggaagagccagttccggctgcccttcaaggccaccacccctgtgatcatggtgggccctggcaccggggtggcccccttcatcggcttcatccaggagcgggcctggctgcggcagcagggcaaggaggtgggggagaccctgctgtactacggctgccgccgcagtgatgaggactacctgtaccgggaggagctggcccagttccacagagatggagccctgacccagctgaatgtggccttcagccgggagcagagccacaaggtgtatgtgcagcacctgctgaagcaggaccgggagcacctgtggaagctgattgaaggaggagcccacatctacgtgtgtggagatgccaggaacatggccagagatgtgcagaacaccttctatgacatcgtggccgagctgggcgccatggagcacgcccaggccgtggactacatcaagaagctgatgaccaagggccgctacagcctggatgtgtggagctag

SEQ ID NO: 17459 - DNA, 441 bp, Artificial Sequence
  derived and/or modified sequence
atgatcaacatgggcgacagccacgtggacaccagcagcaccgtgtctgaggctgtggccgaggaagtgagcctttttagtatgacggacatgatcctgttttctctgattgtgggactcctgacatattggttcctatttcgcaaaaaaaaagaggaggttccagagtttacaaagattcagacccttacttcgagtgttagagagtcctcctttgtggagaagatgaaaaagactgggcggaacatcatcgtgttctacggatcccagaccggaactgcagaggagttcgcgaatcgactgagtaaagatgcccaccgatatggaatgcgcggtatgagcgccgatccggaggagtacgatttggctgacctgtctagcctccctgaaattgataatgcactggtggtgttttgtatggccacatacggtgagggatag

SEQ ID NO: 17460 - DNA, 519 bp, Artificial Sequence
  derived and/or modified sequence
atgatcaacatgggcgacagccacgtggacaccagcagcaccgtgtccgaggccgtagccgaagaggtgtctcttttctctatgacagacatgattttgttttctcttatagtcggtctgctgacatactggttcctttttcgcaagaagaaagaggaagtacccgaatttacaaagattcaaaccctgacatcaagcgtccgggagagttcgtttgtggagaaaatgaagaagaccggaaggaacatcatcgttttctatggttcacagacggggacagctgaggagttcgcaaatcgcctctctaaagacgctcatcggtacggcatgcggggaatgagtgccgatccagaggagtacgatctggcggatcttagttctctccccgaaatcgacaatgcgctagtggtattttgtatggcaacctacggggagggcgatcccactgataatgctcaggacttctacgattggctccaggaaaccgatgtggacctgtccggggtaaaattcgcatag

SEQ ID NO: 17461 - DNA, 189 bp, Artificial Sequence
  derived and/or modified sequence
atgatcaacatgggcgacagccacgtggacaccagcagcaccgtgagtgaggccgtggccgaagaagtgtcgctgttctcgatgaccgatatgatcctatttagtctcattgtgggactgcttacctattggtttctgttccgcaagaagaaggaagaagtcccagagtttaccaagatccagacctag

SEQ ID NO: 17462 - DNA, 1107 bp, Artificial Sequence
  derived and/or modified sequence
atgggcaagtacgtggacaagcggctggagcagctgggcgcccagagaatcttcgagctcgggctcggcgacgatgatggtaacctggaagaggactttatcacctggcgggagcagttctggcccgctgtgtgcgaacattttggggttgaggctaccggagaggaatcatcaatccgccaatacgagctggttgtgcataccgatatcgatgccgcaaaagtgtacatgggagaaatggggcgcttaaagagctacgagaatcagaaaccccctttcgacgccaaaaatccatttttagcggcggttacgaccaataggaagttgaaccagggtactgaacggcatctcatgcatctcgagctggacattagtgacagcaagatacggtatgagtcaggtgatcatgtggccgtctatcccgctaacgatagcgccctagtcaaccagctgggcaagattctgggcgccgatctggacgtcgtcatgtcactcaacaacctggatgaagagtcgaataagaagcacccttttccctgccccacctcttaccggacagctttaacttattacctggatataaccaatccaccaaggactaatgtcctttacgaattggctcagtacgcttcggagccatccgagcaggaattgctcaggaagatggcttcctcttccggtgaggggaaagagttgtacctcagctgggtagtggaagccaggcggcacatcttggcaatactgcaagactgtccaagtttgaggccacccatagatcatctttgcgagctactccctaggctccaggcacggtattatagcatagcctcaagttccaaggtgcaccctaactctgtccatatatgcgcggtggtggtagagtacgagacaaaagcagggagaatcaataagggggtcgcaactaattggctgagggccaaggagcctgccggcgagaacggaggccgtgctctcgctgtgcctaccagcacctccgtggggatgcatggcacctggccaggcatgtgcagaacacccagtaccacaagctggctgagctcaggtccttggagcactaggagaagatggaccacttccagaaattag

SEQ ID NO: 17463 - DNA, 120 bp, Artificial Sequence
  derived and/or modified sequence
atgatcaacatgggcgacagccacgtggacaccagcagcaccgtgagtgaagccgtggccgaggaggtgtcgctcttttctatgaccgatatgatcctattctctctgattgtcggatag

SEQ ID NO: 17464 - DNA, 501 bp, Artificial Sequence
  derived and/or modified sequence
atgatcaacatgggcgacagccacgtggacaccagcagcaccgtgtccgaggccgtggctgaggaggtatccttgttcagcatgacagacatgattctgttcagcttaattgttgggctgctcacatactggtttctgtttaggaagaaaaaggaggaggtacccgagtttactaaaatccagaccctgactagttcggtcagggagagctccttcgtagagaagatgaagaagactggtagaaatattatcgtcttttacggatctcagactggtacagctgaagagtttgccaaccggctgagcaaagacgctcacaggtacggcatgagaggcatgtccgctgacccagaggaatatgacctagccgatcttagcagtctgcctgagatagacaatgccctggttgtattctgtatggcgacctatggcgagggggatccaacggacaacgcacaggacttttacgactggttgcaggagacagacgtcgacctgtag

SEQ ID NO: 17465 - DNA, 567 bp, Artificial Sequence
  derived and/or modified sequence
atgatcaacatgggcgacagccacgtggacaccagcagcaccgtgagtgaggcagtggctgaggaagtcagtctgttcagcatgaccgatatgattctcttttctttgattgtgggccttctaacttactggttcctattcagaaaaaaaaaggaggaagtgcccgaattcactaagatccagaccctgacatcatcggtccgggagtccagttttgtcgagaaaatgaagaaaaccggacggaacatcatagtattttatggcagtcagactgggacagctgaagaattcgccaatagactaagcaaggacgctcaccggtatggaatgaggggaatgagcgcggatcccgaggaatacgacctggccgacctgtccagcctgcccgaaatcgataacgctctggtcgtcttctgcatggccacatacggggaaggcgatccaaccgacaacgcccaggatttctatgactggctgcaggaaacagatgtggacctatctggcgtgaaatttgcagtattcgggctcggcaacaaaacttatgagcatttcaacgccatgggctag

SEQ ID NO: 17466 - DNA, 189 bp, Artificial Sequence
  derived and/or modified sequence
atgatcaacatgggcgacagccacgtggacaccagcagcaccgtgagcgaagcagtggcggaagaggtttcactgttcagcatgaccgacatgatcctgttcagtcttatcgttggcttgctcacctattggttcttattccgcaaaaagaaagaagaggtcccagaatttacaaaaattcagacatag

SEQ ID NO: 17467 - DNA, 1722 bp, Artificial Sequence
  derived and/or modified sequence
atgggcagccggtggcccgccgtgcccccctggggcctgcagatccatgtttctgagcgtcagccgtcccggccccctccctgcccacagcagccaggtcaggccacttgcgagaccttgagcagcgcacccgaccctagtacgacgaggatgtcgcccccttgtccgcagccccagagtgcccctggcggtatcggttgttggaggctgaaggtgttcggcctgggcaacaaaacttacgaacacttcaatgccatgggaaagtatgtggataagaggctggagcagctgggagcccaacggatttttgaactaggattgggggatgacgatggcaatctggaagaagacttcatcacttggagagagcaattctggcctgctgtttgtgaacactttggcgtggaggctactggcgaagagtcttcaatcaggcaatatgaactcgtcgtgcatactgacatcgacgccgcgaaggtgtatatgggagagatgggacgcctgaagtcttatgaaaatcagaaaccaccattcgatgctaaaaacccttttctcgcggccgtaacaacaaatcggaaattaaaccaggggactgaacgccacctcatgcacctcgagttagatataagcgactctaaaatccgttatgaatctggcgatcacgtggctgtctaccccgctaatgattcggcactggtaaatcagttaggaaaaattctcggcgccgaccttgacgtggtgatgtccttaaacaatctggacgaggaatcaaacaaaaagcacccgttcccttgtcctacttcttatagaaccgccttaacctattatctggacattacaaacccccctagaactaatgtattgtatgagctagcccaatacgcatcagagccatcggaacaggagctactcaggaaaatggccagcagcagcggcgaagggaaggagctttacctcagctgggtcgtggaggcaaggagacatattctcgccatcttgcaagattgcccaagcctccggccacctatcgaccatctctgcgagttacttccacggctgcaggccagatactactccattgcatcctcctctaaggttcacccaaacagcgttcatatatgcgccgtagtagtggagtacgagactaaagcaggcagaattaataagggcgtagccacaaactggttgcgcgccaaagaacccgccggagagaatggcggacgtgccctagtgccaatgttcgtgcgaaagtctcagttcaggctgccctttaaggccacaacacccgtgattatggtcgggcccggcacaggggtcgccccttttatagggtttattcaggaaagggcatggctgcggcagcaggggaaagaggtcggtgaaaccctgctgtactatggatgtagacgatcggatgaagactacctataccgggaagagttagcccagtttcatagagatggggcgcttacgcagttgaacgtcgccttctccagggaacagtcccacaaggtgtacgtgcaacaccttctcaaacaagatagagagcacctctggaaattgatagaaggaggggctcatatctatgtatgcggcactccttccagctgccccggaatgcacggaacatggcccggtatgtgtcgcacaccatctaccacgtcttggctgagctctggaccctggtccactcggcgcagatggacaactagtaggaattag

SEQ ID NO: 17468 - DNA, 423 bp, Artificial Sequence
  derived and/or modified sequence
atgatcaacatgggcgacagccacgtggacaccagcagcaccgtgagtgaagccgtcgccgaggaggtctccctgttttcaatgactgacatgattttgtttagcctaattgtcggcctgctgacttactggtttttgtttaggaagaagaaggaagaggtgccagagtttaccaagattcaaactctcacttcttcggtccgcgagtcctcctttgtcgagaagatgaaaaagactgggagaaatatcatcgtattttatggaagtcagaccgggaccgctgaggaatttgccaacagattatccaaagatgctcatcgctatggaatgcgtgggatgtcagctgatcccgaggaatacgacctggccgatctatcttctcttccggagattgataatgctctagtggttttctgtatgtag

SEQ ID NO: 17469 - DNA, 2043 bp, Artificial Sequence
  derived and/or modified sequence
atgatcaacatgggcgacagccacgtggacaccagcagcaccgtgagcgaagccgttgccgaggaggttagcctgttttctatgactgacatgatactcttcagccttatcgtgggacttctaacgtactggtttttgttcagaaagaagaaagaagaggtccctgagtttaccaagattcagaccctgaccagttctgtaagagagagcagcttcgtggaaaagatgaagaaaaccgggagaaatatcatcgtgttttatggttcccagaccggaactgctgaagaattcgcaaatagactcagtaaagacgcgcataggtatggtatgcgaggaatgagcgcagatccggaagagtatgatctggctgacctgtccagcctgcctgagatcgataatgccctggtggtcttttgtatggcaacatacggcgagggtgatcccaccgacaacgcccaggacttttacgactggctccaggaaacagacgtggacctgagtggtgtcaagtttgcggtattcggactcggcaataaaacgtatgaacattttaacgccatggggaaatacgttgataagcggctggaacagcttggggctcagcggatctttgagttaggcctgggtgacgacgacgggaatctggaggaggacttcataacctggagggagcaattttggcctgctgtgtgcgagcacttcggagttgaagctacaggtgaagaatctagcatacgtcagtacgagctagtcgttcatactgatattgacgccgccaaagtttacatgggcgagatgggccggctcaaatcctacgaaaatcagaagccaccattcgacgctaagaaccctttcctggccgctgtgactaccaaccggaagctcaatcaaggcacggaaagacacttaatgcacttggaactcgacatctccgactcaaagattaggtacgaaagcggggaccacgtggctgtgtaccccgcgaatgatagcgcattggtcaaccagctcggtaaaatcctgggcgcggacctggacgtcgttatgtctttgaacaatttggacgaggagtccaataagaaacatccttttccctgtcccacaagctaccgtaccgccttaacatactatcttgacatcactaatccaccccgcacaaatgtgctgtatgagctagctcagtacgcctcagaaccctccgaacaagaattgctccgaaaaatggcttccagttccggggagggcaaggaactctatctgtcatgggtggtggaggctcgccgacacatcctcgctatcctgcaagactgtccttctctcagaccacccattgaccacttatgtgagctgttgccacgactccaggcccgatattattctatagcctctagttcaaaagtgcaccccaacagcgtccatatatgcgctgtggtagttgaatatgagactaaggcaggacgcattaacaaaggtgtcgccactaactggctgcgcgctaaagagcccgctggtgaaaacgggggccgtgctttggtgcctatgttcgtccgcaagtcgcagttcaggctgccctttaaggcaaccacacctgtaattatggtcggtcctggcaccggagtcgcgccttttatcggcttcatccaggagcgggcctggcttaggcaacaagggaaggaggtgggcgagactctcctttattatgggtgccgccgctccgatgaggactacctttacagggaagaattggctcagtttcaccgtgatggtgcactcactcagttgaacgtcgctttctcgcgtgagcagtcacacaaagtgtatgttcaacacttgttaaagcaggatcgggagcacttgtggaagctgatcgagggtggggctcacatatacgtatgtggtgacgcaaggaacatggctagggacgtacagaatacattctatgatatcgtggccgaacttggagccatggaacacgcccaggcggtcgactatattaaaaagttaatgactaaagggagatactcactcgatgtttggagttag

SEQ ID NO: 17470 - DNA, 1467 bp, Artificial Sequence
  derived and/or modified sequence
atgccccggaccagcaccaccggctgccggcggcagacctggatctccctgggatcctccagccgcctcgaggaggactttataacatggcgcgagcaattttggcccgctgtctgtgagcattttggagtggaggcaacaggggaggagagctccataagacagtacgagctcgtggtccacactgatatcgacgccgcgaaagtgtacatgggcgaaatgggccgccttaaaagctacgagaaccagaaacctccctttgatgccaagaatccattcttagccgctgtgacaaccaacaggaaactaaatcagggaaccgagaggcaccttatgcatctcgaacttgacatctctgactctaagatcagatatgaaagcggagaccacgttgccgtatatcccgccaacgattccgctctcgtgaaccagctgggcaagattttgggggccgatctcgatgtggtgatgagtcttaataacctggacgaggagtcaaataaaaaacatccatttccgtgcccgactagttataggacagcgttaacctactatttggatatcacgaacccccctcgtaccaacgtgctttatgagctcgctcagtacgcttctgagccctccgaacaggaactactgaggaagatggcttcttcatcaggcgaagggaaggagctatacctgtcatgggtcgtcgaagctcggaggcacattctggccattctgcaggactgtccttctctgcggccccccatcgatcatctctgtgagctgctgcccagattacaggcccggtattactccatagcgtcaagttcaaaggtccatcctaattcggtacatatctgcgcagttgtggtcgagtacgagactaaagcagggagaattaacaaaggagtggctactaattggctccgggccaaagaaccagccggggagaacggaggtagagctctggtgcctatgttcgtccgtaagtctcagttccgattaccctttaaagcgaccacccccgttatcatggtgggcccaggaactggcgtagctccctttatcgggttcatccaagagcgcgcttggttgaggcagcaaggcaaggaagtgggggaaacgctgctatattacggatgccgacgctcagacgaggattacctgtatagggaagagctggcccagttccatagggacggagcactgacacagctcaacgttgcattctctcgcgagcaatctcacaaggtttacgtgcagcacctactcaaacaggatagggaacacctgtggaagctcattgaggggggcgcccacatctacgtctgtggagacgcacggaatatggctcgagacgtgcagaatactttctacgacatagtggcagaactgggtgcaatggagcacgcccaggccgttgactacatcaagaagctgatgaccaagggaagatactcactcgacgtgtggtcttag

SEQ ID NO: 17471 - DNA, 586 bp, Artificial Sequence
  derived and/or modified sequence
ccagcggtgagtgctatctttcgcggcgacggcgggcatcaggtgggctgagtcgatggatcacgggagccccccagcccggcctgcatccctgagggcagtgcccctcgcagtcaggtgtctcggcggcccccacaacacagtttcatgatcaacatgggagactcccacgtggacaccagctccaccgtgtccgaggcggtggccgaagaagtatctcttttcagcatgacggacatgattctgttttcgctcatcgtgggtctcctaacctactggttcctcttcagaaagaaaaaagaagaagtccccgagttcaccaaaattcagacattgacctcctctgtcagagagagcagctttgtggaaaagatgaagaaaacggggaggaacatcatcgtgttctacggctcccagacggggactgcagaggagtttgccaaccgcctgtccaaggacgcccaccgctacgggatgcgaggcatgtcagcggaccctgaggagtatgacctggccgacctgagcagcctgccagagatcgacaacgccctggtggttttctgcatggccacctacggtgagggag

SEQ ID NO: 17472 - DNA, 548 bp, Artificial Sequence
  derived and/or modified sequence
gagtgctatctttcgcggcgacggcgggtttcatgatcaacatgggagactcccacgtggacaccagctccaccgtgtccgaggcggtggccgaagaagtatctcttttcagcatgacggacatgattctgttttcgctcatcgtgggtctcctaacctactggttcctcttcagaaagaaaaaagaagaagtccccgagttcaccaaaattcagacattgacctcctctgtcagagagagcagctttgtggaaaagatgaagaaaacggggaggaacatcatcgtgttctacggctcccagacggggactgcagaggagtttgccaaccgcctgtccaaggacgcccaccgctacgggatgcgaggcatgtcagcggaccctgaggagtatgacctggccgacctgagcagcctgccagagatcgacaacgccctggtggttttctgcatggccacctacggtgagggagaccccaccgacaatgcccaggacttctacgactggctgcaggagacagacgtggatctctctggggtcaagttcgcg

SEQ ID NO: 17473 - DNA, 736 bp, Artificial Sequence
  derived and/or modified sequence
aagaaaagttgctatattttgcaaaagacataaatctacagattcaagaaactgagtgaaccccacagaaggtataaagaagaaactcagagattaaagactctttcagggcagaaggctcacacaggcttccagaacctcctcggagcgattgtagggactgcctgacccggaagagagttgtcagtcaagaccgccagagttttcccatcagagtatttggcatagcagaggtggctcccaaactgtgccagggcactgcagcaaactcacaagtgatcattctcaatgcggcggacgctcaagtctgttgaactccatgcgaagtgctagcttgggacagttcacggttccaacgtgagatccttgctgcattccttcttaggattttacatctttgcgaagctgggtttgcagtggttgttcagacctaactatacgtggaactgttaggcatttttttttggcctacggataccattaaaaatttgctgagataccagggactccacaaacgaaggacatttgggatctgtccagacagtttcatgatcaacatgggagactcccacgtggacaccagctccaccgtgtccgaggcggtggccgaagaagtatctcttttcagcatgacggacatgattctgttttcgctcatcgtgggtctcctaacctactggttcctcttcagaaagaaaaaagaagaagtccccgagttcaccaaaattcagacatt

SEQ ID NO: 17474 - DNA, 2158 bp, Artificial Sequence
  derived and/or modified sequence
gaaggcggtggtagcgcctcagtggtgtgggcctgagccctgcccaggtgcccgcagagagcagccgggctgccagcgtttcatgatcaacatgggagactcccacgtggacaccagctccaccgtgtccgaggcggtggccgaagaagtatctcttttcagcatgacggacatgattctgttttcgctcatcgtgggtctcctaacctactggttcctcttcagaaagaaaaaagaagaagtccccgagttcaccaaaattcagacattgacctcctctgtcagagagagcagctttgtggaaaagatgaagaaaacggggaggaacatcatcgtgttctacggctcccagacggggactgcagaggagtttgccaaccgcctgtccaaggacgcccaccgctacgggatgcgaggcatgtcagcggaccctgaggagtatgacctggccgacctgagcagcctgccagagatcgacaacgccctggtggttttctgcatggccacctacggtgagggagaccccaccgacaatgcccaggacttctacgactggctgcaggagacagacgtggatctctctggggtcaagttcgcggtgtttggtcttgggaacaagacctacgagcacttcaatgccatgggcaagtacgtggacaagcggctggagcagctcggcgcccagcgcatctttgagctggggttgggcgacgacgatgggaacttggaggaggacttcatcacctggcgagagcagttctggccggccgtgtgtgaacactttggggtggaagccactggcgaggagtccagcattcgccagtacgagcttgtggtccacaccgacatagatgcggccaaggtgtacatgggggagatgggccggctgaagagctacgagaaccagaagcccccctttgatgccaagaatccgttcctggctgcagtcaccaccaaccggaagctgaaccagggaaccgagcgccacctcatgcacctggaattggacatctcggactccaaaatcaggtatgaatctggggaccacgtggctgtgtacccagccaacgactctgctctcgtcaaccagctgggcaaaatcctgggtgccgacctggacgtcgtcatgtccctgaacaacctggatgaggagtccaacaagaagcacccattcccgtgccctacgtcctaccgcacggccctcacctactacctggacatcaccaacccgccgcgtaccaacgtgctgtacgagctggcgcagtacgcctcggagccctcggagcaggagctgctgcgcaagatggcctcctcctccggcgagggcaaggagctgtacctgagctgggtggtggaggcccggaggcacatcctggccatcctgcaggactgcccgtccctgcggccccccatcgaccacctgtgtgagctgctgccgcgcctgcaggcccgctactactccatcgcctcatcctccaaggtccaccccaactctgtgcacatctgtgcggtggttgtggagtacgagaccaaggctggccgcatcaacaagggcgtggccaccaactggctgcgggccaaggagcctgccggggagaacggcggccgtgcgctggcggtgcccacatctacgtctgtggggatgcacggaacatggccagggatgtgcagaacaccttctacgacatcgtggctgagctcggggccatggagcacgcgcaggcggtggactacatcaagaaactgatgaccaagggccgctactccctggacgtgtggagctaggggcctgcctgccccacccaccccacagactccggcctgtaatcagctctcctggctccctcccgtagtctcctgggtgtgtttggcttggccttggcatgggcgcaggcccagtgacaaagactcctctgggcctggggtgcatcctcctcagcccccaggccaggtgaggtccaccggcccctggcagcacagcccagggcctgcatgggggcaccgggctccatgcctctggaggcctctggccctcggtggctgcacagaagggctctttctctctgctgagctgggcccagcccctccacgtgatttccagtgagtgtaaataattttaaataacctctggcccttggaataaagttctgttttctgt

SEQ ID NO: 17475 - DNA, 631 bp, Artificial Sequence
  derived and/or modified sequence
agagagcagccgggctgccagcggtgagtgctatctttcgcggcgacggcggggtgggtgaggtcgggccccaagactcggggtttgccgggcgcctcagttcaccgcggccgcctggctctctgcgtcggggtgggccctcgggcctgggcactgcgcgtctggcccgacgctcgggcggaaggcatggctcccaccccggccctcctccgcgtcgcccttcccctagagctgatctcccgcggcggcctgagggtcgacttttccacagcttgggccgagagagcccggcaggccctcggctgagggttagggctcggtatctcagggctcggggtccagtccccgcgccgccgccccccacgggctaagccactttaactctccgagcctcagtttccccatctgtacgatgaatgggcctcgggaggcagcgaattctgggggtacctaacgtgagaggcgctcgatgcatgctcatgggacccgaatctaaccctgcagcatcagtttcatgatcaacatgggagactcccacgtggacaccagctccaccgtgtccgaggcggtggccgaagaagtatctcttttcagcatgacggacatgattctgttttcgctcatcgtgggt

SEQ ID NO: 17476 - DNA, 561 bp, Artificial Sequence
  derived and/or modified sequence
gcacttgagaactctcacagggagggaagcaagcatacaattcaacaagaatggcacgtttcatgatcaacatgggagactcccacgtggacaccagctccaccgtgtccgaggcggtggccgaagaagtatctcttttcagcatgacggacatgattctgttttcgctcatcgtgggtctcctaacctactggttcctcttcagaaagaaaaaagaagaagtccccgagttcaccaaaattcagacattgacctcctctgtcagagagagcagctttgtggaaaagatgaagaaaacggggaggaacatcatcgtgttctacggctcccagacggggactgcagaggagtttgccaaccgcctgtccaaggacgcccaccgctacgggatgcgaggcatgtcagcggaccctgaggagtatgacctggccgacctgagcagcctgccagagatcgacaacgccctggtggttttctgcatggccacctacggtgagggagaccccaccgacaatgcccaggacttctacgactggctgcaggagacagacgtggatctct

SEQ ID NO: 17477 - DNA, 625 bp, Artificial Sequence
  derived and/or modified sequence
agcaaggagaccggaagaaggtctggggaagttatttggacaatgaagagagccagtttcatgatcaacatgggagactcccacgtggacaccagctccaccgtgtccgaggcggtggccgaagaagtatctcttttcagcatgacggacatgattctgttttcgctcatcgtgggtctcctaacctactggttcctcttcagaaagaaaaaagaagaagtccccgagttcaccaaaattcagacattgacctcctctgtcagagagagcagctttgtggaaaagatgaagaaaacggggaggaacatcatcgtgttctacggctcccagacggggactgcagaggagtttgccaaccgcctgtccaaggacgcccaccgctacgggatgcgaggcatgtcagcggaccctgaggagtatgacctggccgacctgagcagcctgccagagatcgacaacgccctggtggttttctgcatggccacctacggtgagggagaccccaccgacaatgcccaggacttctacgactggctgcaggagacagacgtggatctctctggggtcaagttcgcggtgtttggtcttgggaacaagacctacgagcacttcaatgccatgggca

SEQ ID NO: 17478 - DNA, 283 bp, Artificial Sequence
  derived and/or modified sequence
gacttcctgggccctgaagctccaaggacaaaagactcctgtcccttttcccttcctctccattctgggtctcccaccaccaccaagtccttttcatgatcaacatgggagactcccacgtggacaccagctccaccgtgtccgaggcggtggccgaagaagtatctcttttcagcatgacggacatgattctgttttcgctcatcgtgggtctcctaacctactggttcctcttcagaaagaaaaaagaagaagtccccgagttcaccaaaattcagacatt

SEQ ID NO: 17479 - DNA, 1888 bp, Artificial Sequence
  derived and/or modified sequence
agagactgctatgggctcccggtggcctgcggtgcctccctggggactccagatccatgtatctgaaaggcagccctccagacccccaccctgtcctcagcagccagggcaggccacttgtgagaccctctcctctgccccagaccccagcactacgagaatgtcccctccctgtccccagccccagtcggctccagggggcattgggtgctggagactaaaggtgtttggtcttgggaacaagacctacgagcacttcaatgccatgggcaagtacgtggacaagcggctggagcagctcggcgcccagcgcatctttgagctggggttgggcgacgacgatgggaacttggaggaggacttcatcacctggcgagagcagttctggccggccgtgtgtgaacactttggggtggaagccactggcgaggagtccagcattcgccagtacgagcttgtggtccacaccgacatagatgcggccaaggtgtacatgggggagatgggccggctgaagagctacgagaaccagaagcccccctttgatgccaagaatccgttcctggctgcagtcaccaccaaccggaagctgaaccagggaaccgagcgccacctcatgcacctggaattggacatctcggactccaaaatcaggtatgaatctggggaccacgtggctgtgtacccagccaacgactctgctctcgtcaaccagctgggcaaaatcctgggtgccgacctggacgtcgtcatgtccctgaacaacctggatgaggagtccaacaagaagcacccattcccgtgccctacgtcctaccgcacggccctcacctactacctggacatcaccaacccgccgcgtaccaacgtgctgtacgagctggcgcagtacgcctcggagccctcggagcaggagctgctgcgcaagatggcctcctcctccggcgagggcaaggagctgtacctgagctgggtggtggaggcccggaggcacatcctggccatcctgcaggactgcccgtccctgcggccccccatcgaccacctgtgtgagctgctgccgcgcctgcaggcccgctactactccatcgcctcatcctccaaggtccaccccaactctgtgcacatctgtgcggtggttgtggagtacgagaccaaggctggccgcatcaacaagggcgtggccaccaactggctgcgggccaaggagcctgccggggagaacggcggccgtgcgctggtgcccatgttcgtgcgcaagtcccagttccgcctgcccttcaaggccaccacgcctgtcatcatggtgggccccggcaccggggtggcacccttcataggcttcatccaggagcgggcctggctgcgacagcagggcaaggaggtgggggagacgctgctgtactacggctgccgccgctcggatgaggactacctgtaccgggaggagctggcgcagttccacagggacggtgcgctcacccagctcaacgtggccttctcccgggagcagtcccacaaggtctacgtccagcacctgctaaagcaagaccgagagcacctgtggaagttgatcgaaggcggtgcccacatctacgtctgtggcaccccctcttcctgcccagggatgcacggaacatggccagggatgtgcagaacaccttctacgacatcgtggctgagctcggggccatggagcacgcgcaggcggtggactacatcaagaaactgatgaccaagggccgctactccctggacgtgtggagctaggggcctgcctgccccacccaccccacagactccggcctgtaatcagctctcctggctccctcccgtagtctcctgggtgtgtttggcttggccttggcatgggcgcaggcccagtgac

SEQ ID NO: 17480 - DNA, 498 bp, Artificial Sequence
  derived and/or modified sequence
agaccgccctcagcacaggacctgccctggctggtcagccctgcctggggcacccacagccccagctgtccagtttcatgatcaacatgggagactcccacgtggacaccagctccaccgtgtccgaggcggtggccgaagaagtatctcttttcagcatgacggacatgattctgttttcgctcatcgtgggtctcctaacctactggttcctcttcagaaagaaaaaagaagaagtccccgagttcaccaaaattcagacattgacctcctctgtcagagagagcagctttgtggaaaagatgaagaaaacggggaggaacatcatcgtgttctacggctcccagacggggactgcagaggagtttgccaaccgcctgtccaaggacgcccaccgctacgggatgcgaggcatgtcagcggaccctgaggagtatgacctggccgacctgagcagcctgccagagatcgacaacgccctggtggttttctgcatgg

SEQ ID NO: 17481 - DNA, 2522 bp, Artificial Sequence
  derived and/or modified sequence
acgcccccacccccgcggccggcgaaggcggtggtagcgcctcagtggtgtgggcctgagccctgcccaggtgcccgcagagagcagccgggctgccagcgtttcatgatcaacatgggagactcccacgtggacaccagctccaccgtgtccgaggcggtggccgaagaagtatctcttttcagcatgacggacatgattctgttttcgctcatcgtgggtctcctaacctactggttcctcttcagaaagaaaaaagaagaagtccccgagttcaccaaaattcagacattgacctcctctgtcagagagagcagctttgtggaaaagatgaagaaaacggggaggaacatcatcgtgttctacggctcccagacggggactgcagaggagtttgccaaccgcctgtccaaggacgcccaccgctacgggatgcgaggcatgtcagcggaccctgaggagtatgacctggccgacctgagcagcctgccagagatcgacaacgccctggtggttttctgcatggccacctacggtgagggagaccccaccgacaatgcccaggacttctacgactggctgcaggagacagacgtggatctctctggggtcaagttcgcggtgtttggtcttgggaacaagacctacgagcacttcaatgccatgggcaagtacgtggacaagcggctggagcagctcggcgcccagcgcatctttgagctggggttgggcgacgacgatgggaacttggaggaggacttcatcacctggcgagagcagttctggccggccgtgtgtgaacactttggggtggaagccactggcgaggagtccagcattcgccagtacgagcttgtggtccacaccgacatagatgcggccaaggtgtacatgggggagatgggccggctgaagagctacgagaaccagaagcccccctttgatgccaagaatccgttcctggctgcagtcaccaccaaccggaagctgaaccagggaaccgagcgccacctcatgcacctggaattggacatctcggactccaaaatcaggtatgaatctggggaccacgtggctgtgtacccagccaacgactctgctctcgtcaaccagctgggcaaaatcctgggtgccgacctggacgtcgtcatgtccctgaacaacctggatgaggagtccaacaagaagcacccattcccgtgccctacgtcctaccgcacggccctcacctactacctggacatcaccaacccgccgcgtaccaacgtgctgtacgagctggcgcagtacgcctcggagccctcggagcaggagctgctgcgcaagatggcctcctcctccggcgagggcaaggagctgtacctgagctgggtggtggaggcccggaggcacatcctggccatcctgcaggactgcccgtccctgcggccccccatcgaccacctgtgtgagctgctgccgcgcctgcaggcccgctactactccatcgcctcatcctccaaggtccaccccaactctgtgcacatctgtgcggtggttgtggagtacgagaccaaggctggccgcatcaacaagggcgtggccaccaactggctgcgggccaaggagcctgccggggagaacggcggccgtgcgctggtgcccatgttcgtgcgcaagtcccagttccgcctgcccttcaaggccaccacgcctgtcatcatggtgggccccggcaccggggtggcacccttcataggcttcatccaggagcgggcctggctgcgacagcagggcaaggaggtgggggagacgctgctgtactacggctgccgccgctcggatgaggactacctgtaccgggaggagctggcgcagttccacagggacggtgcgctcacccagctcaacgtggccttctcccgggagcagtcccacaaggtctacgtccagcacctgctaaagcaagaccgagagcacctgtggaagttgatcgaaggcggtgcccacatctacgtctgtggggatgcacggaacatggccagggatgtgcagaacaccttctacgacatcgtggctgagctcggggccatggagcacgcgcaggcggtggactacatcaagaaactgatgaccaagggccgctactccctggacgtgtggagctaggggcctgcctgccccacccaccccacagactccggcctgtaatcagctctcctggctccctcccgtagtctcctgggtgtgtttggcttggccttggcatgggcgcaggcccagtgacaaagactcctctgggcctggggtgcatcctcctcagcccccaggccaggtgaggtccaccggcccctggcagcacagcccagggcctgcatgggggcaccgggctccatgcctctggaggcctctggccctcggtggctgcacagaagggctctttctctctgctgagctgggcccagcccctccacgtgatttccagtgagtgtaaataattttaaataacctctggcccttggaataaagttctgttttctgta

SEQ ID NO: 17482 - DNA, 1905 bp, Artificial Sequence
  derived and/or modified sequence
agagatcgacaacgccctggtggttttctgcatggccacctacggtgagggagaccccaccgacaatgcccaggacttctacgactggctgcaggagacagacgtggatctctctggggtcaagttcgcgcttggaggaggacttcatcacctggcgagagcagttctggccggccgtgtgtgaacactttggggtggaagccactggcgaggagtccagcattcgccagtacgagcttgtggtccacaccgacatagatgcggccaaggtgtacatgggggagatgggccggctgaagagctacgagaaccagaagcccccctttgatgccaagaatccgttcctggctgcagtcaccaccaaccggaagctgaaccagggaaccgagcgccacctcatgcacctggaattggacatctcggactccaaaatcaggtatgaatctggggaccacgtggctgtgtacccagccaacgactctgctctcgtcaaccagctgggcaaaatcctgggtgccgacctggacgtcgtcatgtccctgaacaacctggatgaggagtccaacaagaagcacccattcccgtgccctacgtcctaccgcacggccctcacctactacctggacatcaccaacccgccgcgtaccaacgtgctgtacgagctggcgcagtacgcctcggagccctcggagcaggagctgctgcgcaagatggcctcctcctccggcgagggcaaggagctgtacctgagctgggtggtggaggcccggaggcacatcctggccatcctgcaggactgcccgtccctgcggccccccatcgaccacctgtgtgagctgctgccgcgcctgcaggcccgctactactccatcgcctcatcctccaaggtccaccccaactctgtgcacatctgtgcggtggttgtggagtacgagaccaaggctggccgcatcaacaagggcgtggccaccaactggctgcgggccaaggagcctgccggggagaacggcggccgtgcgctggtgcccatgttcgtgcgcaagtcccagttccgcctgcccttcaaggccaccacgcctgtcatcatggtgggccccggcaccggggtggcacccttcataggcttcatccaggagcgggcctggctgcgacagcagggcaaggaggtgggggagacgctgctgtactacggctgccgccgctcggatgaggactacctgtaccgggaggagctggcgcagttccacagggacggtgcgctcacccagctcaacgtggccttctcccgggagcagtcccacaaggtctacgtccagcacctgctaaagcaagaccgagagcacctgtggaagttgatcgaaggcggtgcccacatctacgtctgtggggatgcacggaacatggccagggatgtgcagaacaccttctacgacatcgtggctgagctcggggccatggagcacgcgcaggcggtggactacatcaagaaactgatgaccaagggccgctactccctggacgtgtggagctaggggcctgcctgccccacccaccccacagactccggcctgtaatcagctctcctggctccctcccgtagtctcctgggtgtgtttggcttggccttggcatgggcgcaggcccagtgacaaagactcctctgggcctggggtgcatcctcctcagcccccaggccaggtgaggtccaccggcccctggcagcacagcccagggcctgcatgggggcaccgggctccatgcctctggaggcctctggccctcggtggctgcacagaagggctctttctctctgctgagctgggcccagcccctccacgtgatttccagtgagtgtaaataattttaaataacctctggcccttggaataaagttctgttttctgt

SEQ ID NO: 17483 - DNA, 441 bp, Artificial Sequence
  derived and/or modified sequence
atgattaatatgggggacagccatgtagataccagcagcacagtgagtgaggcagtggcggaggaggtaagccttttctcaatgactgatatgattctgtttagtctaattgtgggactcctgacgtactggttcctgttccgtaaaaaaaaggaggaggtgccagagttcaccaaaattcaaacattaacgagcagcgttagggagagttcattcgtagagaagatgaagaagaccgggcgtaacatcattgtcttctatgggtcccagacagggactgccgaagagttcgctaatcgcctgtctaaggacgcccatcgatacgggatgcggggtatgtctgcagacccagaagagtacgatttagccgatctgtctagcctgcctgagattgacaacgccctggtggtgttctgtatggcaacatacggggaaggctag

SEQ ID NO: 17484 - DNA, 519 bp, Artificial Sequence
  derived and/or modified sequence
atgatcaacatgggcgacagtcacgtggatacaagttccaccgtctctgaagctgtggccgaagaggtgtctctgttctctatgaccgatatgatcctcttcagtttgatcgtgggcttgctgacctactggtttttgttccgaaagaaaaaagaagaggtccccgaattcaccaagatccagaccttaacttcatctgtgagggagagttccttcgtggagaagatgaagaaaactggtaggaatattattgtgttctacggcagccagacaggcactgctgaagagtttgcaaacagactctccaaggatgcacatcgatacggaatgcggggaatgagcgccgaccccgaggagtatgatctggccgacctctccagtcttccagagatcgacaatgccctcgttgtcttttgcatggctacctatggagaaggagatccaacggataatgctcaggacttctacgactggcttcaggagaccgacgttgatctctccggagtcaagtttgcttag

SEQ ID NO: 17485 - DNA, 189 bp, Artificial Sequence
  derived and/or modified sequence
atgatcaacatgggcgactctcacgttgacacatcctccacggtgtccgaggccgtggctgaggaggtgagccttttttccatgactgacatgattctgttctccctcatcgttgggctcctaacttactggttccttttccgtaagaagaaggaagaagtacccgagttcactaaaattcagacttag

SEQ ID NO: 17486 - DNA, 1107 bp, Artificial Sequence
  derived and/or modified sequence
atgggaaagtacgtcgataaaagactcgagcagttgggagctcaacggatctttgagctgggacttggcgatgacgacgggaatctggaggaagactttatcacatggagggaacaattttggccagccgtctgtgagcattttggggtggaggccaccggcgaagagtcctccatcagacagtacgaactagtcgtgcacactgatatcgacgcagcaaaggtatatatgggcgaaatgggtcgacttaagagctacgagaaccaaaagcctccttttgatgccaagaaccctttcctcgctgcagttacaaccaatcgaaagctgaaccagggcactgaaagacacctgatgcacttggagttagacatatctgactctaaaatacgatacgagagcggggaccacgttgccgtgtaccctgcaaatgactccgccctggtgaaccaactgggtaagatactgggcgcagacctcgatgtcgtaatgtcgctcaacaatctggacgaggagagtaacaaaaagcatccattcccatgccccacaagctacaggaccgctttgacgtattacttggacattacgaatccaccccgtaccaacgtactgtatgaactagcccagtacgcctctgagccaagcgagcaggaactattaaggaagatggcctcttccagcggcgaggggaaagagctctaccttagttgggtggtcgaagctcgcaggcatatactggctattttacaggactgtccaagcctaaggccgccaatcgaccacctgtgtgagctcctgcccagattgcaagctaggtattatagtattgcttcctcatctaaagtgcacccaaactcagttcatatctgcgccgtggtggtggagtacgaaaccaaagcaggtcggataaataaaggcgtggccactaattggttgagggccaaggagccagcaggcgaaaacgggggacgggcactcgcagtaccaacaagcaccagtgtgggcatgcatggaacctggccaggaatgtgcaggacccccagcacgacctcctggctgagttccggtccatggagtacccgtaggagatggactacctcccgcaattag

SEQ ID NO: 17487 - DNA, 120 bp, Artificial Sequence
  derived and/or modified sequence
atgataaatatgggcgattcccatgttgacacatcatctacggtgagtgaagcggtcgcagaggaggtatccctttttagcatgacggatatgattctgttctccttaattgtgggatag

SEQ ID NO: 17488 - DNA, 501 bp, Artificial Sequence
  derived and/or modified sequence
atgattaatatgggggattcacatgtggatacttcttctacagtctcggaagcagtcgccgaagaggtttctctgttttccatgaccgatatgatcctcttcagcctgatcgtgggcttgctgacttattggttcctgtttaggaaaaagaaagaggaggttcctgagtttaccaaaatccagactctgacctcgtctgtcagggagtcctctttcgtcgagaagatgaaaaaaacaggcagaaatatcatagtgttctatggcagtcaaactgggacagctgaggagttcgccaatagactgtcaaaagacgcacacaggtacgggatgagggggatgtccgccgaccctgaagagtacgaccttgcagatctgagtagccttccagagatcgataatgctctggtggtcttttgtatggccacctacggcgaaggcgatcctactgataacgcacaggacttctatgactggctacaggaaaccgacgtcgatctgtag

SEQ ID NO: 17489 - DNA, 567 bp, Artificial Sequence
  derived and/or modified sequence
atgattaatatgggcgacagccacgtagatacctccagtaccgtaagcgaagccgttgcagaagaggttagcctgttcagcatgacagacatgattctcttcagtctgatcgtgggtctgcttacatattggtttctcttccggaaaaaaaaagaagaggtgcctgagttcaccaaaatccagacactgacaagctctgtgcgagaaagcagttttgtggagaagatgaagaagacaggaaggaatattatagtcttctatgggtctcagactggaaccgccgaggagtttgcaaatagactcagcaaggatgcacaccgttatggaatgcggggtatgtctgccgatcccgaggaatacgacttagcagatttgagttccctcccagagatagacaatgccttagtcgttttttgtatggctacgtatggagaaggagatcctactgataacgcacaggatttttacgattggctccaggaaaccgatgtcgatctgtcaggggtgaagttcgctgtgtttggtctagggaacaagacctacgagcattttaacgccatggggtag

SEQ ID NO: 17490 - DNA, 189 bp, Artificial Sequence
  derived and/or modified sequence
atgatcaacatgggggatagccatgttgacacttcctctactgtctctgaagccgtggcggaagaggtgtctctgttctcgatgaccgatatgattttattttctcttatcgtggggttattaacctactggtttctgtttcgtaaaaagaaggaggaggtgcctgagttcaccaaaattcagacctag

SEQ ID NO: 17491 - DNA, 1722 bp, Artificial Sequence
  derived and/or modified sequence
atgggaagcagatggccggcagttcctccttggggtttgcagatacacgtctcagagcgccaaccatcacgccctcctccttgtccccagcagccaggccaggctacttgcgaaacattgtcttccgcacctgaccctagcaccacaaggatgagcccaccttgtccgcagcctcagtctgctcccggaggtatcggctgttggagactgaaagtgttcgggctcggaaataaaacatacgaacatttcaatgccatggggaagtatgtggataaacgattagaacagcttggagctcagaggatattcgagctaggactgggagatgatgacggcaatctcgaagaggattttataacatggcgggagcaattttggcccgcagtctgcgaacattttggagtcgaagccactggcgaagagtcttccattcgacagtatgagcttgtggttcatactgacattgacgcagctaaggtgtatatgggagagatgggaagattgaagtcatacgaaaatcagaagccaccgttcgatgcaaagaacccctttctggcagctgttacgaccaatcgaaaacttaatcaggggactgaacggcatctgatgcacctggaactggatatctcagatagtaaaatccgatatgagagcggagaccacgtggccgtctacccggcaaacgattcagctcttgttaaccagctgggaaagatcctcggggctgaccttgacgtggtgatgtcattgaacaatctcgacgaagaatctaataaaaaacacccatttccctgtcctacctcgtataggactgccctaacctactacctagacataaccaatccacccaggacaaacgttttgtatgagctcgcacagtatgcctcagagccaagcgaacaagagctccttcgcaaaatggcgtctagctccggagaggggaaggagctgtacctaagctgggtggtggaggcgaggcgccatattttagctattttgcaggattgtccctctctgcgccctcccattgatcatctctgcgagctccttcccaggctgcaggcaaggtattattctatagccagttctagtaaagttcatcctaactctgtacatatctgtgccgtcgtggtggaatatgaaacgaaagcgggaaggatcaataaaggggtcgctaccaattggctgcgtgccaaggaaccagcaggcgagaacgggggtagggcactggtccccatgttcgtcaggaaatctcaattcaggcttccatttaaggccaccaccccagtcataatggtcggaccagggaccggagtggctccctttatcggattcattcaggagcgagcctggttacgacagcagggaaaggaagtcggagaaaccctcctgtattacggttgccgcaggtccgatgaagactatctgtacagggaggaactggcccagtttcatcgggatggagcactcactcagctcaatgtggccttttcaagagagcagtctcacaaggtttatgtgcagcacctgctcaagcaagaccgagaacacctctggaaactgattgaggggggtgcacacatatatgtatgcggaacaccctcttcttgtccaggtatgcacggaacctggccaggaatgtgccgcacaccctcaaccacttcctggctctcaagtggtccttggtccactcggaggaggtggacgacatctcggaattag

SEQ ID NO: 17492 - DNA, 423 bp, Artificial Sequence
  derived and/or modified sequence
atgatcaatatgggtgactctcacgtcgacacaagcagcacggtgagcgaggccgtcgccgaggaggttagccttttctccatgacagacatgatactgttctcccttatcgtggggctgctgacttattggttcctctttcggaaaaagaaggaggaagtgcccgagtttacaaaaattcagacactcacatccagtgtgcgggagagcagcttcgtcgagaagatgaagaagacgggccgtaacatcatcgtcttctatggatcgcaaacgggaactgctgaagagttcgccaacagattgtccaaagatgcccatagatatgggatgcgtggaatgtccgccgaccctgaagagtatgacctggccgacttatcctctctgccagagatcgacaatgccctagtggttttctgtatgtag

SEQ ID NO: 17493 - DNA, 2043 bp, Artificial Sequence
  derived and/or modified sequence
atgattaatatgggtgatagccacgtcgacacgtccagcactgtgagcgaggctgtcgctgaagaagtgagcctattctctatgacagacatgatactgttttctctgattgtgggactactgacatattggtttctgtttcgaaaaaaaaaagaagaagtgcctgaatttactaaaattcagacccttacatcgagcgtgcgcgagtctagtttcgtggagaagatgaaaaagacgggacgcaatatcattgtattctatgggagtcagaccggaaccgccgaggagtttgccaacagacttagcaaagatgcccacaggtacggcatgcggggtatgtcggccgatcccgaggagtacgacctggcggatctctcttctctccccgaaattgataatgccctggtcgttttttgcatggctacttacggggagggcgaccccacagataatgcccaggacttctatgactggttacaggagactgacgttgacctgagcggcgtgaagtttgctgtgtttgggctgggaaataagacgtacgagcactttaatgcaatgggcaagtatgtggacaagcgcttagagcaactgggagctcagcggattttcgaactcggccttggagacgacgatggcaacctagaggaggacttcattacgtggcgggagcagttctggccagccgtttgtgagcacttcggggtggaggctacaggggaggagagctcaattcgtcagtacgagctcgttgtgcacactgacatagatgcggcaaaggtgtatatgggcgaaatgggtcgactgaagtcctatgagaaccaaaaaccacccttcgatgccaagaatccatttctcgcagctgtgaccactaatcgcaaactgaaccaaggtaccgagaggcacttaatgcatctcgagctggatatctccgactccaagatccggtacgaaagcggcgatcatgtagcggtttacccagcaaacgattccgcccttgtgaaccagctcggaaaaatcctgggtgctgatctggacgttgtcatgtcgctgaacaatctggatgaggagtccaacaaaaaacacccctttccttgccctacctcctacagaacggcccttacttactatctggatattactaatccccctaggactaacgtattatatgagctggcccagtatgcctcagaaccctccgaacaggagctgctgaggaaaatggcctccagttcaggtgagggaaaagagctgtacttatcttgggtggtagaggccagacggcacattttggcaatcctacaggactgtccttcactgcgtcccccaatcgaccatctgtgcgagttgctgcctcgcttacaggcacgttattatagtatcgcttccagctctaaggttcacccaaactccgtgcacatatgcgcagttgtggtggaatacgaaaccaaggctggtagaatcaataagggagtcgcaacaaattggctacgggctaaggagccggcaggggagaacgggggaagggcactggttcccatgtttgtaagaaaatcccagtttcgattgccttttaaggcaacaactccggtaatcatggttggaccaggtacaggcgtcgccccattcatagggttcattcaggagagggcctggcttagacagcagggcaaagaagtgggagagacattgctctactatggctgtaggcgcagtgacgaagattatctatatagggaagaactggcgcaatttcatagggatggggctttgacacagctgaatgtagccttctcacgggaacagtcacataaagtgtacgtccagcacctactcaagcaggatagagaacatctctggaagctcattgagggtggggctcatatctatgtctgtggcgatgccaggaacatggccagggacgtgcagaatacattctacgatatcgtcgccgaattgggggctatggagcatgcgcaagcagtggattatatcaaaaagctgatgaccaagggcaggtatagcctggacgtttggtcctag

SEQ ID NO: 17494 - DNA, 1467 bp, Artificial Sequence
  derived and/or modified sequence
atgcccaggacatctacaactggttgccgcaggcagacttggatttccctggggtcatcatcacggctggaagaagacttcatcacgtggagagagcaattttggccagctgtgtgcgagcacttcggggtggaggcaacgggagaagaatccagcatacggcagtacgagctggttgtccacaccgacatcgacgccgctaaggtttacatgggagagatgggccgactgaagagctacgagaatcagaagccaccgttcgatgccaaaaatccttttttggccgctgtcacgacaaacagaaagcttaatcagggtaccgaacgccacctgatgcacctcgaattggatatcagcgatagtaagatcagatatgagagcggagaccatgtcgctgtttaccccgctaatgactcggccctggtcaaccagctggggaagattctcggagcagatctcgacgtcgtcatgagcctgaataacctggatgaggagagcaataagaagcatccattcccttgtcctacctcgtacagaaccgctcttacctattacctggatattactaaccccccaaggaccaatgtgctgtacgagctcgctcagtacgcatccgaaccctctgaacaggagttgctcagaaagatggccagcagtagcggagaaggaaaagagctgtacttatcatgggtggtcgaggccaggcgccatatcctagcaatcttgcaggactgccccagtctccgcccacctattgatcacctttgtgaactgctcccacggctgcaggctaggtactactctattgccagcagctctaaagtccaccccaacagcgtccacatttgcgctgttgttgtggagtacgagaccaaggctggcagaattaataagggtgtcgcaacgaattggctccgtgccaaggagcccgcaggcgagaatggcggacgcgcattggttccaatgtttgtgaggaagagccagtttcggctcccgttcaaggctacaactcccgtgataatggtgggtcctgggacgggagtggcacctttcattggcttcatacaggagagagcatggcttaggcagcagggcaaggaggtgggcgagactcttctgtattatgggtgtcggcgttccgatgaggattacctttaccgggaagaattggcccagtttcaccgcgacggcgctctcacgcaactcaatgtagctttctcaagggaacagtcccacaaagtgtatgtacaacacctcctgaaacaggaccgggaacatctatggaagctaattgaagggggagcccacatatacgtgtgcggcgatgccaggaacatggctcgtgacgtgcaaaacacgttctacgacatagtagccgagctgggcgctatggagcatgctcaagctgttgactacattaaaaagctgatgaccaaggggagatattctctggacgtgtggagttag

SEQ ID NO: 17495 - DNA, 441 bp, Artificial Sequence
  derived and/or modified sequence
atgatcaacatgggcgacagccacgtggacaccagcagcaccgtgagcgaggccgtggccgaggaggtgagcctgttcagcatgaccgacatgatcctgttcagcctgatcgtgggcctgctgacctactggttcctgttcagaaagaagaaggaggaggtgcccgagttcaccaagatccagaccctgaccagcagcgtgagagagagcagcttcgtggagaagatgaagaagaccggcagaaacatcatcgtgttctacggcagccagaccggcaccgccgaggagttcgccaacagactgagcaaggacgcccacagatacggcatgagaggcatgagcgccgaccccgaggagtacgacctggccgacctgagcagcctgcccgagatcgacaacgccctggtggtgttctgcatggccacctacggcgagggctag

SEQ ID NO: 17496 - DNA, 519 bp, Artificial Sequence
  derived and/or modified sequence
atgatcaacatgggcgacagccacgtggacaccagcagcaccgtgagcgaggccgtggccgaggaggtgagcctgttcagcatgaccgacatgatcctgttcagcctgatcgtgggcctgctgacctactggttcctgttcagaaagaagaaggaggaggtgcccgagttcaccaagatccagaccctgaccagcagcgtgagagagagcagcttcgtggagaagatgaagaagaccggcagaaacatcatcgtgttctacggcagccagaccggcaccgccgaggagttcgccaacagactgagcaaggacgcccacagatacggcatgagaggcatgagcgccgaccccgaggagtacgacctggccgacctgagcagcctgcccgagatcgacaacgccctggtggtgttctgcatggccacctacggcgagggcgaccccaccgacaacgcccaggacttctacgactggctgcaggagaccgacgtggacctgagcggcgtgaagttcgcctag

SEQ ID NO: 17497 - DNA, 189 bp, Artificial Sequence
  derived and/or modified sequence
atgatcaacatgggcgacagccacgtggacaccagcagcaccgtgagcgaggccgtggccgaggaggtgagcctgttcagcatgaccgacatgatcctgttcagcctgatcgtgggcctgctgacctactggttcctgttcagaaagaagaaggaggaggtgcccgagttcaccaagatccagacctag

SEQ ID NO: 17498 - DNA, 1107 bp, Artificial Sequence
  derived and/or modified sequence
atgggcaagtacgtggacaagagactggagcagctgggcgcccagagaatcttcgagctgggcctgggcgacgacgacggcaacctggaggaggacttcatcacctggagagagcagttctggcccgccgtgtgcgagcacttcggcgtggaggccaccggcgaggagagcagcatcagacagtacgagctggtggtgcacaccgacatcgacgccgccaaggtgtacatgggcgagatgggcagactgaagagctacgagaaccagaagccccccttcgacgccaagaaccccttcctggccgccgtgaccaccaacagaaagctgaaccagggcaccgagagacacctgatgcacctggagctggacatcagcgacagcaagatcagatacgagagcggcgaccacgtggccgtgtaccccgccaacgacagcgccctggtgaaccagctgggcaagatcctgggcgccgacctggacgtggtgatgagcctgaacaacctggacgaggagagcaacaagaagcaccccttcccctgccccaccagctacagaaccgccctgacctactacctggacatcaccaacccccccagaaccaacgtgctgtacgagctggcccagtacgccagcgagcccagcgagcaggagctgctgagaaagatggccagcagcagcggcgagggcaaggagctgtacctgagctgggtggtggaggccagaagacacatcctggccatcctgcaggactgccccagcctgagaccccccatcgaccacctgtgcgagctgctgcccagactgcaggccagatactacagcatcgccagcagcagcaaggtgcaccccaacagcgtgcacatctgcgccgtggtggtggagtacgagaccaaggccggcagaatcaacaagggcgtggccaccaactggctgagagccaaggagcccgccggcgagaacggcggcagagccctggccgtgcccaccagcaccagcgtgggcatgcacggcacctggcccggcatgtgcagaacccccagcaccaccagctggctgagcagcggcccctggagcaccagaagaagatggaccaccagcagaaactag

SEQ ID NO: 17499 - DNA, 120 bp, Artificial Sequence
  derived and/or modified sequence
atgatcaacatgggcgacagccacgtggacaccagcagcaccgtgagcgaggccgtggccgaggaggtgagcctgttcagcatgaccgacatgatcctgttcagcctgatcgtgggctag

SEQ ID NO: 17500 - DNA, 501 bp, Artificial Sequence
  derived and/or modified sequence
atgatcaacatgggcgacagccacgtggacaccagcagcaccgtgagcgaggccgtggccgaggaggtgagcctgttcagcatgaccgacatgatcctgttcagcctgatcgtgggcctgctgacctactggttcctgttcagaaagaagaaggaggaggtgcccgagttcaccaagatccagaccctgaccagcagcgtgagagagagcagcttcgtggagaagatgaagaagaccggcagaaacatcatcgtgttctacggcagccagaccggcaccgccgaggagttcgccaacagactgagcaaggacgcccacagatacggcatgagaggcatgagcgccgaccccgaggagtacgacctggccgacctgagcagcctgcccgagatcgacaacgccctggtggtgttctgcatggccacctacggcgagggcgaccccaccgacaacgcccaggacttctacgactggctgcaggagaccgacgtggacctgtag

SEQ ID NO: 17501 - DNA, 567 bp, Artificial Sequence
  derived and/or modified sequence
atgatcaacatgggcgacagccacgtggacaccagcagcaccgtgagcgaggccgtggccgaggaggtgagcctgttcagcatgaccgacatgatcctgttcagcctgatcgtgggcctgctgacctactggttcctgttcagaaagaagaaggaggaggtgcccgagttcaccaagatccagaccctgaccagcagcgtgagagagagcagcttcgtggagaagatgaagaagaccggcagaaacatcatcgtgttctacggcagccagaccggcaccgccgaggagttcgccaacagactgagcaaggacgcccacagatacggcatgagaggcatgagcgccgaccccgaggagtacgacctggccgacctgagcagcctgcccgagatcgacaacgccctggtggtgttctgcatggccacctacggcgagggcgaccccaccgacaacgcccaggacttctacgactggctgcaggagaccgacgtggacctgagcggcgtgaagttcgccgtgttcggcctgggcaacaagacctacgagcacttcaacgccatgggctag

SEQ ID NO: 17502 - DNA, 1722 bp, Artificial Sequence
  derived and/or modified sequence
atgggcagcagatggcccgccgtgcccccctggggcctgcagatccacgtgagcgagagacagcccagcagaccccccccctgcccccagcagcccggccaggccacctgcgagaccctgagcagcgcccccgaccccagcaccaccagaatgagccccccctgcccccagccccagagcgcccccggcggcatcggctgctggagactgaaggtgttcggcctgggcaacaagacctacgagcacttcaacgccatgggcaagtacgtggacaagagactggagcagctgggcgcccagagaatcttcgagctgggcctgggcgacgacgacggcaacctggaggaggacttcatcacctggagagagcagttctggcccgccgtgtgcgagcacttcggcgtggaggccaccggcgaggagagcagcatcagacagtacgagctggtggtgcacaccgacatcgacgccgccaaggtgtacatgggcgagatgggcagactgaagagctacgagaaccagaagccccccttcgacgccaagaaccccttcctggccgccgtgaccaccaacagaaagctgaaccagggcaccgagagacacctgatgcacctggagctggacatcagcgacagcaagatcagatacgagagcggcgaccacgtggccgtgtaccccgccaacgacagcgccctggtgaaccagctgggcaagatcctgggcgccgacctggacgtggtgatgagcctgaacaacctggacgaggagagcaacaagaagcaccccttcccctgccccaccagctacagaaccgccctgacctactacctggacatcaccaacccccccagaaccaacgtgctgtacgagctggcccagtacgccagcgagcccagcgagcaggagctgctgagaaagatggccagcagcagcggcgagggcaaggagctgtacctgagctgggtggtggaggccagaagacacatcctggccatcctgcaggactgccccagcctgagaccccccatcgaccacctgtgcgagctgctgcccagactgcaggccagatactacagcatcgccagcagcagcaaggtgcaccccaacagcgtgcacatctgcgccgtggtggtggagtacgagaccaaggccggcagaatcaacaagggcgtggccaccaactggctgagagccaaggagcccgccggcgagaacggcggcagagccctggtgcccatgttcgtgagaaagagccagttcagactgcccttcaaggccaccacccccgtgatcatggtgggccccggcaccggcgtggcccccttcatcggcttcatccaggagagagcctggctgagacagcagggcaaggaggtgggcgagaccctgctgtactacggctgcagaagaagcgacgaggactacctgtacagagaggagctggcccagttccacagagacggcgccctgacccagctgaacgtggccttcagcagagagcagagccacaaggtgtacgtgcagcacctgctgaagcaggacagagagcacctgtggaagctgatcgagggcggcgcccacatctacgtgtgcggcacccccagcagctgccccggcatgcacggcacctggcccggcatgtgcagaacccccagcaccaccagctggctgagcagcggcccctggagcaccagaagaagatggaccaccagcagaaactag

SEQ ID NO: 17503 - DNA, 423 bp, Artificial Sequence
  derived and/or modified sequence
atgatcaacatgggcgacagccacgtggacaccagcagcaccgtgagcgaggccgtggccgaggaggtgagcctgttcagcatgaccgacatgatcctgttcagcctgatcgtgggcctgctgacctactggttcctgttcagaaagaagaaggaggaggtgcccgagttcaccaagatccagaccctgaccagcagcgtgagagagagcagcttcgtggagaagatgaagaagaccggcagaaacatcatcgtgttctacggcagccagaccggcaccgccgaggagttcgccaacagactgagcaaggacgcccacagatacggcatgagaggcatgagcgccgaccccgaggagtacgacctggccgacctgagcagcctgcccgagatcgacaacgccctggtggtgttctgcatgtag

SEQ ID NO: 17504 - DNA, 2043 bp, Artificial Sequence
  derived and/or modified sequence
atgatcaacatgggcgacagccacgtggacaccagcagcaccgtgagcgaggccgtggccgaggaggtgagcctgttcagcatgaccgacatgatcctgttcagcctgatcgtgggcctgctgacctactggttcctgttcagaaagaagaaggaggaggtgcccgagttcaccaagatccagaccctgaccagcagcgtgagagagagcagcttcgtggagaagatgaagaagaccggcagaaacatcatcgtgttctacggcagccagaccggcaccgccgaggagttcgccaacagactgagcaaggacgcccacagatacggcatgagaggcatgagcgccgaccccgaggagtacgacctggccgacctgagcagcctgcccgagatcgacaacgccctggtggtgttctgcatggccacctacggcgagggcgaccccaccgacaacgcccaggacttctacgactggctgcaggagaccgacgtggacctgagcggcgtgaagttcgccgtgttcggcctgggcaacaagacctacgagcacttcaacgccatgggcaagtacgtggacaagagactggagcagctgggcgcccagagaatcttcgagctgggcctgggcgacgacgacggcaacctggaggaggacttcatcacctggagagagcagttctggcccgccgtgtgcgagcacttcggcgtggaggccaccggcgaggagagcagcatcagacagtacgagctggtggtgcacaccgacatcgacgccgccaaggtgtacatgggcgagatgggcagactgaagagctacgagaaccagaagccccccttcgacgccaagaaccccttcctggccgccgtgaccaccaacagaaagctgaaccagggcaccgagagacacctgatgcacctggagctggacatcagcgacagcaagatcagatacgagagcggcgaccacgtggccgtgtaccccgccaacgacagcgccctggtgaaccagctgggcaagatcctgggcgccgacctggacgtggtgatgagcctgaacaacctggacgaggagagcaacaagaagcaccccttcccctgccccaccagctacagaaccgccctgacctactacctggacatcaccaacccccccagaaccaacgtgctgtacgagctggcccagtacgccagcgagcccagcgagcaggagctgctgagaaagatggccagcagcagcggcgagggcaaggagctgtacctgagctgggtggtggaggccagaagacacatcctggccatcctgcaggactgccccagcctgagaccccccatcgaccacctgtgcgagctgctgcccagactgcaggccagatactacagcatcgccagcagcagcaaggtgcaccccaacagcgtgcacatctgcgccgtggtggtggagtacgagaccaaggccggcagaatcaacaagggcgtggccaccaactggctgagagccaaggagcccgccggcgagaacggcggcagagccctggtgcccatgttcgtgagaaagagccagttcagactgcccttcaaggccaccacccccgtgatcatggtgggccccggcaccggcgtggcccccttcatcggcttcatccaggagagagcctggctgagacagcagggcaaggaggtgggcgagaccctgctgtactacggctgcagaagaagcgacgaggactacctgtacagagaggagctggcccagttccacagagacggcgccctgacccagctgaacgtggccttcagcagagagcagagccacaaggtgtacgtgcagcacctgctgaagcaggacagagagcacctgtggaagctgatcgagggcggcgcccacatctacgtgtgcggcgacgccagaaacatggccagagacgtgcagaacaccttctacgacatcgtggccgagctgggcgccatggagcacgcccaggccgtggactacatcaagaagctgatgaccaagggcagatacagcctggacgtgtggagctag

SEQ ID NO: 17505 - DNA, 1467 bp, Artificial Sequence
  derived and/or modified sequence
atgcccagaaccagcaccaccggctgcagaagacagacctggatcagcctgggcagcagcagcagactggaggaggacttcatcacctggagagagcagttctggcccgccgtgtgcgagcacttcggcgtggaggccaccggcgaggagagcagcatcagacagtacgagctggtggtgcacaccgacatcgacgccgccaaggtgtacatgggcgagatgggcagactgaagagctacgagaaccagaagccccccttcgacgccaagaaccccttcctggccgccgtgaccaccaacagaaagctgaaccagggcaccgagagacacctgatgcacctggagctggacatcagcgacagcaagatcagatacgagagcggcgaccacgtggccgtgtaccccgccaacgacagcgccctggtgaaccagctgggcaagatcctgggcgccgacctggacgtggtgatgagcctgaacaacctggacgaggagagcaacaagaagcaccccttcccctgccccaccagctacagaaccgccctgacctactacctggacatcaccaacccccccagaaccaacgtgctgtacgagctggcccagtacgccagcgagcccagcgagcaggagctgctgagaaagatggccagcagcagcggcgagggcaaggagctgtacctgagctgggtggtggaggccagaagacacatcctggccatcctgcaggactgccccagcctgagaccccccatcgaccacctgtgcgagctgctgcccagactgcaggccagatactacagcatcgccagcagcagcaaggtgcaccccaacagcgtgcacatctgcgccgtggtggtggagtacgagaccaaggccggcagaatcaacaagggcgtggccaccaactggctgagagccaaggagcccgccggcgagaacggcggcagagccctggtgcccatgttcgtgagaaagagccagttcagactgcccttcaaggccaccacccccgtgatcatggtgggccccggcaccggcgtggcccccttcatcggcttcatccaggagagagcctggctgagacagcagggcaaggaggtgggcgagaccctgctgtactacggctgcagaagaagcgacgaggactacctgtacagagaggagctggcccagttccacagagacggcgccctgacccagctgaacgtggccttcagcagagagcagagccacaaggtgtacgtgcagcacctgctgaagcaggacagagagcacctgtggaagctgatcgagggcggcgcccacatctacgtgtgcggcgacgccagaaacatggccagagacgtgcagaacaccttctacgacatcgtggccgagctgggcgccatggagcacgcccaggccgtggactacatcaagaagctgatgaccaagggcagatacagcctggacgtgtggagctag

SEQ ID NO: 17506 - protein, 216 aa, Artificial Sequence
  derived and/or modified sequence
MLRLSERNMKVLLAAALIAGSVFFLLLPGPSAADEKKKGPKVTVKVYFDLRIGDEDVGRVIFGLFGKTVPKTVDNFVALATGEKGFGYKNSKFHRVIKDFMIQGGDFTRGDGTGGKSIYGERFPDENFKLKHYGPGWVSMANAGKDTNGSQFFITTVKTAWLDGKHVVFGKVLEGMEVVRKVESTKTDSRDKPLKDVIIADCGKIEVEKPFAIAKE

SEQ ID NO: 17507 - DNA, 651 bp, Artificial Sequence
  derived and/or modified sequence
atgctgcgcctgtcagaacgaaacatgaaggtgctactggctgccgcacttatagctggcagcgtgttctttctcctgctaccggggccaagcgctgccgacgagaagaagaagggcccaaaagtcacagtgaaggtctacttcgatctccgcatcggggatgaggacgttgggcgggtgatcttcggcctgtttgggaagactgtccctaaaactgtcgacaattttgtcgccctcgctactggcgaaaagggtttcggctataagaacagcaagtttcacagagttatcaaggattttatgatacaaggcggagattttacccggggcgatgggaccgggggtaagagcatctatggcgagaggttccccgacgagaacttcaaactcaagcattacggaccggggtgggtaagtatggctaacgccggtaaagacacaaatggatcacagttctttatcacgactgtgaaaactgcatggttggatggcaaacatgtcgtcttcggaaaggtcttggaaggcatggaagtggtgaggaaggtggaatccaccaagacggattctagagacaagccgctgaaggatgtgatcattgctgactgcggcaagatcgaggttgaaaagcctttcgctattgccaaagagtag

SEQ ID NO: 17508 - DNA, 651 bp, Artificial Sequence
  derived and/or modified sequence
atgctgcggctgtctgaaagaaacatgaaggtgctgctggccgccgccctgattgctggctctgtgttcttcctgctgctgcccggccccagcgctgctgatgagaagaagaagggccccaaggtgacagtgaaggtgtactttgacctgagaattggagatgaagatgtgggccgggtcatcttcggcctgtttgggaagacagtgcccaagacagtggacaactttgtggccctggccactggagagaagggcttcggctacaagaacagcaagttccacagggtcatcaaggacttcatgatccagggcggggacttcaccagaggagatggcactggaggcaagagcatctatggagagcgcttcccagatgagaacttcaagctgaagcactacggccctggctgggtgtccatggccaatgccggcaaggacaccaacggcagccagttcttcatcaccaccgtgaagacagcctggctggatggcaagcacgtggtgtttgggaaggtgctggagggcatggaggtggtgaggaaggtggagagcaccaagacagacagccgggacaagcccctgaaggatgtgatcatcgctgactgtgggaagattgaggtggagaagccctttgccatcgccaaggagtag

SEQ ID NO: 17509 - DNA, 651 bp, Artificial Sequence
  derived and/or modified sequence
atgctgcggctgagcgagcggaacatgaaggtgctgctggccgccgctctgatcgctgggtcagtgttcttcctcctgctacccggaccctccgcggccgatgaaaagaagaaaggtcccaaggtcaccgttaaggtgtacttcgacctaaggataggcgatgaagatgtcggaagggtgatctttggtttatttggaaaaactgtcccgaaaacggtagacaactttgtggccctggcaactggcgaaaagggattcggctacaagaatagcaagtttcatcgggtgatcaaagacttcatgatccagggaggtgatttcactagaggggatgggacaggcggtaaatctatctacggggagcggtttccagatgaaaacttcaagctgaaacattacggtccgggatgggtcagcatggccaacgcaggtaaagacactaatggttctcagttcttcatcacgacggtgaagactgcatggctggatgggaaacacgttgtgtttggcaaggtactggaggggatggaggtggtgaggaaagtcgaatcaaccaagacagactcacgggacaaaccgctcaaagacgtgataattgccgattgtggtaagattgaagtggaaaaacctttcgctatagccaaggaatag

SEQ ID NO: 17510 - DNA, 1081 bp, Artificial Sequence
  derived and/or modified sequence
gtggcaaccacccacgagcccgcgtcggtgcccgccccgcagggggacctactatccggcgccgagccggaggggggaaacggcgcccgccgcccgcccggagcccgcgagcaaccccagtcccccccacccgcgcgtggcggcgccggctccctagccaccgcggccccaccctcttccggcctcagctgtccgggctgctttcgcctccgcctgtggatgctgcgcctctccgaacgcaacatgaaggtgctccttgccgccgccctcatcgcggggtccgtcttcttcctgctgctgccgggaccttctgcggccgatgagaagaagaaggggcccaaagtcaccgtcaaggtgtattttgacctacgaattggagatgaagatgtaggccgggtgatctttggtctcttcggaaagactgttccaaaaacagtggataattttgtggccttagctacaggagagaaaggatttggctacaaaaacagcaaattccatcgtgtaatcaaggacttcatgatccagggcggagacttcaccaggggagatggcacaggaggaaagagcatctacggtgagcgcttccccgatgagaacttcaaactgaagcactacgggcctggctgggtgagcatggccaacgcaggcaaagacaccaacggctcccagttcttcatcacgacagtcaagacagcctggctagatggcaagcatgtggtgtttggcaaagttctagagggcatggaggtggtgcggaaggtggagagcaccaagacagacagccgggataaacccctgaaggatgtgatcatcgcagactgcggcaagatcgaggtggagaagccctttgccatcgccaaggagtagggcacagggacatctttctttgagtgaccgtctgtgcaggccctgtagtccgccacagggctctgagctgcactggccccggtgctggcatctggtggagcggacccactcccctcacattccacaggcccatggactcacttttgtaacaaactcctaccaacactgaccaataaaaaaaaatgtgggtttttttttttttaatatataa

SEQ ID NO: 17511 - DNA, 651 bp, Artificial Sequence
  derived and/or modified sequence
atgctacgactgagcgagcgcaacatgaaggtgcttctagcggcagctctcattgccggttcggtgttctttctcctgctgccaggaccttcagctgctgatgagaaaaagaagggcccaaaagtcacagtgaaggtctatttcgacctgcgcattggcgacgaagacgtgggcagggtaatcttcgggctatttgggaagaccgtgcccaagaccgtggataactttgtcgcgctggccaccggcgagaaggggtttggctacaagaacagcaaattccaccgggtgataaaggactttatgattcaaggcggtgacttcacacgaggagatggtacaggtgggaaatccatctacggtgaacggttccccgacgagaattttaaactgaaacactacggcccaggctgggtctccatggcaaacgctggcaaggataccaacggctcccaattctttatcaccaccgttaaaactgcgtggctggacggtaaacatgtcgtgtttggaaaggtcctcgagggaatggaagtcgttcggaaagtcgaatctaccaagacagattctcgcgataaacctctgaaagacgttatcattgctgactgcggcaaaattgaagtcgagaaacccttcgctattgctaaggagtag

SEQ ID NO: 17512 - DNA, 651 bp, Artificial Sequence
  derived and/or modified sequence
atgctgagactgagcgagagaaacatgaaggtgctgctggccgccgccctgatcgccggcagcgtgttcttcctgctgctgcccggccccagcgccgccgacgagaagaagaagggccccaaggtgaccgtgaaggtgtacttcgacctgagaatcggcgacgaggacgtgggcagagtgatcttcggcctgttcggcaagaccgtgcccaagaccgtggacaacttcgtggccctggccaccggcgagaagggcttcggctacaagaacagcaagttccacagagtgatcaaggacttcatgatccagggcggcgacttcaccagaggcgacggcaccggcggcaagagcatctacggcgagagattccccgacgagaacttcaagctgaagcactacggccccggctgggtgagcatggccaacgccggcaaggacaccaacggcagccagttcttcatcaccaccgtgaagaccgcctggctggacggcaagcacgtggtgttcggcaaggtgctggagggcatggaggtggtgagaaaggtggagagcaccaagaccgacagcagagacaagcccctgaaggacgtgatcatcgccgactgcggcaagatcgaggtggagaagcccttcgccatcgccaaggagtag

SEQ ID NO: 17513 - protein, 212 aa, Artificial Sequence
  derived and/or modified sequence
MGPGPRLLLPLVLCVGLGALVFSSGAEGFRKRGPSVTAKVFFDVRIGDKDVGRIVIGLFGKVVPKTVENFVALATGEKGYGYKGSKFHRVIKDFMIQGGDITTGDGTGGVSIYGETFPDENFKLKHYGIGWVSMANAGPDTNGSQFFITLTKPTWLDGKHVVFGKVIDGMTVVHSIELQATDGHDRPLTNCSIINSGKIDVKTPFVVEIADW

SEQ ID NO: 17514 - DNA, 639 bp, Artificial Sequence
  derived and/or modified sequence
atgggtccaggacctcggctgctcttgcctttagtcttgtgcgtgggcctgggcgccttagtgttcagttctggcgctgaggggttccggaagagagggccttccgtcaccgctaaggtatttttcgatgttcgaataggggacaaagatgtcggcagaatagtgataggcttgttcggcaaagtggtgcccaagaccgtggaaaattttgtggctttggcgactggcgagaaaggctatggctataaggggtcgaagttccatagagtgataaaggactttatgatccaaggcggagacattacaactggtgatgggacgggtggggtgtcgatctatggagaaaccttccccgacgaaaatttcaagctaaaacactacggcattggttgggtctcgatggccaatgccgggccagatactaatggcagccagttcttcatcacacttaccaaacccacttggcttgatggtaaacatgtggtctttggcaaagtgatagatggtatgacagtggtgcactccatcgaacttcaggcaacagatggccacgacagacccctgaccaattgtagcataatcaattctggcaaaatagatgtcaagacaccgttcgtcgtcgaaatcgctgactggtag

SEQ ID NO: 17515 - DNA, 639 bp, Artificial Sequence
  derived and/or modified sequence
atgggccctggcccccggctgctgctgcccctggtgctgtgtgtgggcctgggcgccctggtgttcagcagcggggctgagggcttcaggaagaggggccccagcgtgacagccaaggtgttctttgatgtgcgcatcggggacaaggatgtgggccgcatcgtcatcggcctgtttgggaaggtggtgcccaagacagtggagaactttgtggccctggccactggagagaagggctacggctacaagggcagcaagttccacagggtcatcaaggacttcatgatccagggcggggacatcaccactggagatggcactggaggagtgtccatctatggagagaccttcccagatgagaacttcaagctgaagcactatggaattggctgggtgtccatggccaatgccggccctgacaccaacggcagccagttcttcatcaccctgaccaagcccacctggctggatggcaagcacgtggtgtttgggaaggtgattgatggcatgacagtggtgcacagcattgagctgcaggccacagatggccatgaccggcccctgaccaactgcagcatcatcaacagcggcaagattgatgtgaagaccccatttgtggtggagattgctgactggtag

SEQ ID NO: 17516 - DNA, 639 bp, Artificial Sequence
  derived and/or modified sequence
atgggccccggcccccggctgctgctgcccctggtgctgtgcgtgggccttggagcacttgtgttctctagtggtgctgaagggttcaggaagaggggtccttccgtcacagcaaaggtgtttttcgacgtcaggatcggagataaagacgtcgggcggatcgtgatcggcctgtttggtaaggtcgtgcctaagaccgtcgagaattttgtggctctcgcgaccggcgaaaaaggatacggttacaaaggcagcaaattccatagagtaatcaaagatttcatgatccaggggggtgacatcacaaccggggatggaaccggcggcgtctccatttatggcgagacttttccggacgaaaacttcaagttaaaacattatggaattgggtgggtgtcaatggcgaatgcgggccccgacacaaatggaagccagttttttattactttgaccaagcccacgtggttggacggcaagcatgtggtgttcggcaaagtgatcgatggaatgacagtggtgcactccatcgagctccaggctaccgatggtcacgaccggcctctgacgaactgctcaatcatcaacagcggcaaaattgacgttaagaccccctttgtggtggagattgccgactggtag

SEQ ID NO: 17517 - DNA, 1380 bp, Artificial Sequence
  derived and/or modified sequence
ccgcaaccgggagcgcgcaggcgcagccggccggcagtcccgtcagctgtcccagagcctgtgtcgcgcccgtgccggtagcgcccgtgccggtagcgccgctgccaccgctcaccatgggcccgggtcctcggctgctgctacctctcgtgctttgcgtggggctcggcgcacttgtgttttcttcgggggccgagggcttccgcaagcgaggcccctcggtgacggccaaggtcttctttgatgtgaggattggagacaaagatgttggcagaattgtgattggcctctttggaaaagttgtgcccaagacagtggaaaattttgttgctctagcaacaggagagaaaggatatggatataaaggaagcaagtttcatcgtgtcatcaaggatttcatgattcaaggaggtgacatcaccactggagatggcactgggggtgtgagcatctatggtgagacatttccagatgagaacttcaagctgaagcactatggcattgggtgggtcagcatggccaacgctgggcctgacaccaatggctctcagttctttatcaccttgaccaagcccacctggttggacggcaaacatgtggtgtttggaaaagtcattgatgggatgacagtggtgcactccatagagctccaagcaactgatgggcatgaccgtccactcaccaactgctcgatcatcaacagtggcaagatagacgtgaaaacgccttttgtggttgagatcgctgattggtgacacaactggcagaaaacaaggatatgctttggcaggggtgtgtgtgtgtgtgtgtgtgtgtgtgtgttgtgttgtctttcaattatttgcttttttttttttactttctttttgtattctatcccagatcacaggaaagttataaaaatcaaaccgtcaccctttagtttgcttgaactttagtaaaccacctgcttagggactttgaacttaaatatatccccttcctcaagtggtgctattttaaaactaaaaaaaactttgaattggctatttttttaatgcaatattttttttctgaattcattatgatccccatattgggtaatgctgaacatttatctgaaacagatgaggatattattattttgtatccaaacagaaattcagataaagggaaatttgactagtgtaatctgagatatgtcatagggatttctttctgacaaaagggtgctttgctgttctttatattaaatacttttagatcaactctttttgcaagactttttaaaaatgtaaagttctttaagaaatatacaaaaatacacacactctagcattaacagtgaacagattagaaagattttataaatcaaactacaaacataattagataactcag

SEQ ID NO: 17518 - DNA, 639 bp, Artificial Sequence
  derived and/or modified sequence
atggggccagggccaagactcctcctgccactggtactgtgtgtcggattgggtgctctggtcttttcgtcaggagctgaggggttccggaaacggggacctagcgtcaccgcaaaggtctttttcgacgtgcggataggggacaaggatgtcggccgtatcgtgataggcctgttcggaaaagttgtgcctaagactgtagagaacttcgtcgccctcgccactggagagaaaggatacgggtacaagggctcaaaattccaccgagtaataaaagattttatgatccaagggggagatatcacaacaggggacggcaccggcggagtctccatctacggggagacttttccagatgaaaactttaagctgaagcactacggcataggctgggtgtccatggctaatgccggaccagatacaaacggctctcaattttttattaccctaacaaagcccacttggcttgacgggaaacatgtggtgttcggcaaggtcattgatggcatgactgtagtccatagcatcgagctgcaggcaacagacggccacgacaggcctctaactaactgctcaattattaactccggcaagattgatgttaagactcctttcgtcgttgaaatcgccgactggtag

SEQ ID NO: 17519 - DNA, 639 bp, Artificial Sequence
  derived and/or modified sequence
atgggccccggccccagactgctgctgcccctggtgctgtgcgtgggcctgggcgccctggtgttcagcagcggcgccgagggcttcagaaagagaggccccagcgtgaccgccaaggtgttcttcgacgtgagaatcggcgacaaggacgtgggcagaatcgtgatcggcctgttcggcaaggtggtgcccaagaccgtggagaacttcgtggccctggccaccggcgagaagggctacggctacaagggcagcaagttccacagagtgatcaaggacttcatgatccagggcggcgacatcaccaccggcgacggcaccggcggcgtgagcatctacggcgagaccttccccgacgagaacttcaagctgaagcactacggcatcggctgggtgagcatggccaacgccggccccgacaccaacggcagccagttcttcatcaccctgaccaagcccacctggctggacggcaagcacgtggtgttcggcaaggtgatcgacggcatgaccgtggtgcacagcatcgagctgcaggccaccgacggccacgacagacccctgaccaactgcagcatcatcaacagcggcaagatcgacgtgaagacccccttcgtggtggagatcgccgactggtag

SEQ ID NO: 17520 - protein, 521 aa, Artificial Sequence
  derived and/or modified sequence
MSEPKAIDPKLSTTDRVVKAVPFPPSHRLTAKEVFDNDGKPRVDILKAHLMKEGRLEESVALRIITEGASILRQEKNLLDIDAPVTVCGDIHGQFFDLMKLFEVGGSPANTRYLFLGDYVDRGYFSIECVLYLWALKILYPKTLFLLRGNHECRHLTEYFTFKQECKIKYSERVYDACMDAFDCLPLAALMNQQFLCVHGGLSPEINTLDDIRKLDRFKEPPAYGPMCDILWSDPLEDFGNEKTQEHFTHNTVRGCSYFYSYPAVCEFLQHNNLLSILRAHEAQDAGYRMYRKSQTTGFPSLITIFSAPNYLDVYNNKAAVLKYENNVMNIRQFNCSPHPYWLPNFMDVFTWSLPFVGEKVTEMLVNVLNICSDDELGSEEDGFDGATAAARKEVIRNKIRAIGKMARVFSVLREESESVLTLKGLTPTGMLPSGVLSGGKQTLQSATVEAIEADEAIKGFSPQHKITSFEEAKGLDRINERMPPRRDAMPSDANLNSINKALTSETNGTDSNGSNSSNIQ

SEQ ID NO: 17521 - protein, 423 aa, Artificial Sequence
  derived and/or modified sequence
MKLFEVGGSPANTRYLFLGDYVDRGYFSIECVLYLWALKILYPKTLFLLRGNHECRHLTEYFTFKQECKIKYSERVYDACMDAFDCLPLAALMNQQFLCVHGGLSPEINTLDDIRKLDRFKEPPAYGPMCDILWSDPLEDFGNEKTQEHFTHNTVRGCSYFYSYPAVCEFLQHNNLLSILRAHEAQDAGYRMYRKSQTTGFPSLITIFSAPNYLDVYNNKAAVLKYENNVMNIRQFNCSPHPYWLPNFMDVFTWSLPFVGEKVTEMLVNVLNICSDDELGSEEDGFDGATAAARKEVIRNKIRAIGKMARVFSVLREESESVLTLKGLTPTGMLPSGVLSGGKQTLQSATVEAIEADEAIKGFSPQHKITSFEEAKGLDRINERMPPRRDAMPSDANLNSINKALTSETNGTDSNGSNSSNIQ

SEQ ID NO: 17522 - protein, 289 aa, Artificial Sequence
  derived and/or modified sequence
MSEPKAIDPKLSTTDRVVKAVPFPPSHRLTAKEVFDNDGKPRVDILKAHLMKEGRLEESVALRIITEGASILRQEKNLLDIDAPVTAAVLKYENNVMNIRQFNCSPHPYWLPNFMDVFTWSLPFVGEKVTEMLVNVLNICSDDELGSEEDGFDGATAAARKEVIRNKIRAIGKMARVFSVLREESESVLTLKGLTPTGMLPSGVLSGGKQTLQSATVEAIEADEAIKGFSPQHKITSFEEAKGLDRINERMPPRRDAMPSDANLNSINKALTSETNGTDSNGSNSSNIQ

SEQ ID NO: 17523 - protein, 454 aa, Artificial Sequence
  derived and/or modified sequence
MSEPKAIDPKLSTTDRVVKVCGDIHGQFFDLMKLFEVGGSPANTRYLFLGDYVDRGYFSIECVLYLWALKILYPKTLFLLRGNHECRHLTEYFTFKQECKIKYSERVYDACMDAFDCLPLAALMNQQFLCVHGGLSPEINTLDDIRKLDRFKEPPAYGPMCDILWSDPLEDFGNEKTQEHFTHNTVRGCSYFYSYPAVCEFLQHNNLLSILRAHEAQDAGYRMYRKSQTTGFPSLITIFSAPNYLDVYNNKAAVLKYENNVMNIRQFNCSPHPYWLPNFMDVFTWSLPFVGEKVTEMLVNVLNICSDDELGSEEDGFDGATAAARKEVIRNKIRAIGKMARVFSVLREESESVLTLKGLTPTGMLPSGVLSGGKQTLQSATVEAIEADEAIKGFSPQHKITSFEEAKGLDRINERMPPRRDAMPSDANLNSINKALTSETNGTDSNGSNSSNIQ

SEQ ID NO: 17524 - protein, 132 aa, Artificial Sequence
  derived and/or modified sequence
MKEGRLEESVALRIITEGASILRQEKNLLDIDAPVTVCGDIHGQFFDLMKLFEVGGSPANTRYLFLGDYVDRGYFSIECVLYLWALKILYPKTLFLLRGNHECRHLTEYFTFKQECKIKYSERVYDACMDAF

SEQ ID NO: 17525 - DNA, 1566 bp, Artificial Sequence
  derived and/or modified sequence
atgagcgagcccaaggccatcgaccccaagctgagcaccaccgacagagtggtgaaggccgtgcccttcccccccagccacagactgaccgccaaggaggtgttcgacaacgacggcaagcccagagtggacatcctgaaggcccacctgatgaaggagggcagactggaggagagcgtggccctgagaatcatcaccgagggcgccagcatcctgagacaggagaagaacctgctggacatcgacgcccccgtgaccgtgtgcggcgacatccacggccagttcttcgacctgatgaagctgttcgaggtgggcggcagccccgccaacaccagatacctgttcctgggcgactacgtggacagaggctacttcagcatcgagtgcgtgctgtacctgtgggccctgaagatcctgtaccccaagaccctgttcctgctgagaggcaaccacgagtgcagacacctgaccgagtacttcaccttcaagcaggagtgcaagatcaagtacagcgagagagtgtacgacgcctgcatggacgccttcgactgcctgcccctggccgccctgatgaaccagcagttcctgtgcgtgcacggcggcctgagccccgagatcaacaccctggacgacatcagaaagctggacagattcaaggagccccccgcctacggccccatgtgcgacatcctgtggagcgaccccctggaggacttcggcaacgagaagacccaggagcacttcacccacaacaccgtgagaggctgcagctacttctacagctaccccgccgtgtgcgagttcctgcagcacaacaacctgctgagcatcctgagagcccacgaggcccaggacgccggctacagaatgtacagaaagagccagaccaccggcttccccagcctgatcaccatcttcagcgcccccaactacctggacgtgtacaacaacaaggccgccgtgctgaagtacgagaacaacgtgatgaacatcagacagttcaactgcagcccccacccctactggctgcccaacttcatggacgtgttcacctggagcctgcccttcgtgggcgagaaggtgaccgagatgctggtgaacgtgctgaacatctgcagcgacgacgagctgggcagcgaggaggacggcttcgacggcgccaccgccgccgccagaaaggaggtgatcagaaacaagatcagagccatcggcaagatggccagagtgttcagcgtgctgagagaggagagcgagagcgtgctgaccctgaagggcctgacccccaccggcatgctgcccagcggcgtgctgagcggcggcaagcagaccctgcagagcgccaccgtggaggccatcgaggccgacgaggccatcaagggcttcagcccccagcacaagatcaccagcttcgaggaggccaagggcctggacagaatcaacgagagaatgccccccagaagagacgccatgcccagcgacgccaacctgaacagcatcaacaaggccctgaccagcgagaccaacggcaccgacagcaacggcagcaacagcagcaacatccagtag

SEQ ID NO: 17526 - DNA, 1272 bp, Artificial Sequence
  derived and/or modified sequence
atgaagctgttcgaggtgggcggcagccccgccaacaccagatacctgttcctgggcgactacgtggacagaggctacttcagcatcgagtgcgtgctgtacctgtgggccctgaagatcctgtaccccaagaccctgttcctgctgagaggcaaccacgagtgcagacacctgaccgagtacttcaccttcaagcaggagtgcaagatcaagtacagcgagagagtgtacgacgcctgcatggacgccttcgactgcctgcccctggccgccctgatgaaccagcagttcctgtgcgtgcacggcggcctgagccccgagatcaacaccctggacgacatcagaaagctggacagattcaaggagccccccgcctacggccccatgtgcgacatcctgtggagcgaccccctggaggacttcggcaacgagaagacccaggagcacttcacccacaacaccgtgagaggctgcagctacttctacagctaccccgccgtgtgcgagttcctgcagcacaacaacctgctgagcatcctgagagcccacgaggcccaggacgccggctacagaatgtacagaaagagccagaccaccggcttccccagcctgatcaccatcttcagcgcccccaactacctggacgtgtacaacaacaaggccgccgtgctgaagtacgagaacaacgtgatgaacatcagacagttcaactgcagcccccacccctactggctgcccaacttcatggacgtgttcacctggagcctgcccttcgtgggcgagaaggtgaccgagatgctggtgaacgtgctgaacatctgcagcgacgacgagctgggcagcgaggaggacggcttcgacggcgccaccgccgccgccagaaaggaggtgatcagaaacaagatcagagccatcggcaagatggccagagtgttcagcgtgctgagagaggagagcgagagcgtgctgaccctgaagggcctgacccccaccggcatgctgcccagcggcgtgctgagcggcggcaagcagaccctgcagagcgccaccgtggaggccatcgaggccgacgaggccatcaagggcttcagcccccagcacaagatcaccagcttcgaggaggccaagggcctggacagaatcaacgagagaatgccccccagaagagacgccatgcccagcgacgccaacctgaacagcatcaacaaggccctgaccagcgagaccaacggcaccgacagcaacggcagcaacagcagcaacatccagtag

SEQ ID NO: 17527 - DNA, 870 bp, Artificial Sequence
  derived and/or modified sequence
atgagcgagcccaaggccatcgaccccaagctgagcaccaccgacagagtggtgaaggccgtgcccttcccccccagccacagactgaccgccaaggaggtgttcgacaacgacggcaagcccagagtggacatcctgaaggcccacctgatgaaggagggcagactggaggagagcgtggccctgagaatcatcaccgagggcgccagcatcctgagacaggagaagaacctgctggacatcgacgcccccgtgaccgccgccgtgctgaagtacgagaacaacgtgatgaacatcagacagttcaactgcagcccccacccctactggctgcccaacttcatggacgtgttcacctggagcctgcccttcgtgggcgagaaggtgaccgagatgctggtgaacgtgctgaacatctgcagcgacgacgagctgggcagcgaggaggacggcttcgacggcgccaccgccgccgccagaaaggaggtgatcagaaacaagatcagagccatcggcaagatggccagagtgttcagcgtgctgagagaggagagcgagagcgtgctgaccctgaagggcctgacccccaccggcatgctgcccagcggcgtgctgagcggcggcaagcagaccctgcagagcgccaccgtggaggccatcgaggccgacgaggccatcaagggcttcagcccccagcacaagatcaccagcttcgaggaggccaagggcctggacagaatcaacgagagaatgccccccagaagagacgccatgcccagcgacgccaacctgaacagcatcaacaaggccctgaccagcgagaccaacggcaccgacagcaacggcagcaacagcagcaacatccagtag

SEQ ID NO: 17528 - DNA, 1365 bp, Artificial Sequence
  derived and/or modified sequence
atgagcgagcccaaggccatcgaccccaagctgagcaccaccgacagagtggtgaaggtgtgcggcgacatccacggccagttcttcgacctgatgaagctgttcgaggtgggcggcagccccgccaacaccagatacctgttcctgggcgactacgtggacagaggctacttcagcatcgagtgcgtgctgtacctgtgggccctgaagatcctgtaccccaagaccctgttcctgctgagaggcaaccacgagtgcagacacctgaccgagtacttcaccttcaagcaggagtgcaagatcaagtacagcgagagagtgtacgacgcctgcatggacgccttcgactgcctgcccctggccgccctgatgaaccagcagttcctgtgcgtgcacggcggcctgagccccgagatcaacaccctggacgacatcagaaagctggacagattcaaggagccccccgcctacggccccatgtgcgacatcctgtggagcgaccccctggaggacttcggcaacgagaagacccaggagcacttcacccacaacaccgtgagaggctgcagctacttctacagctaccccgccgtgtgcgagttcctgcagcacaacaacctgctgagcatcctgagagcccacgaggcccaggacgccggctacagaatgtacagaaagagccagaccaccggcttccccagcctgatcaccatcttcagcgcccccaactacctggacgtgtacaacaacaaggccgccgtgctgaagtacgagaacaacgtgatgaacatcagacagttcaactgcagcccccacccctactggctgcccaacttcatggacgtgttcacctggagcctgcccttcgtgggcgagaaggtgaccgagatgctggtgaacgtgctgaacatctgcagcgacgacgagctgggcagcgaggaggacggcttcgacggcgccaccgccgccgccagaaaggaggtgatcagaaacaagatcagagccatcggcaagatggccagagtgttcagcgtgctgagagaggagagcgagagcgtgctgaccctgaagggcctgacccccaccggcatgctgcccagcggcgtgctgagcggcggcaagcagaccctgcagagcgccaccgtggaggccatcgaggccgacgaggccatcaagggcttcagcccccagcacaagatcaccagcttcgaggaggccaagggcctggacagaatcaacgagagaatgccccccagaagagacgccatgcccagcgacgccaacctgaacagcatcaacaaggccctgaccagcgagaccaacggcaccgacagcaacggcagcaacagcagcaacatccagtag

SEQ ID NO: 17529 - DNA, 1566 bp, Artificial Sequence
  derived and/or modified sequence
atgtcagagcctaaggccattgacccgaagctgtccactacagatagggtcgtgaaagccgtgccttttcccccttctcacaggctcactgctaaggaggtgtttgataacgacggcaagccaagagtggatatcctgaaagctcacttaatgaaagaagggaggctggaggagtctgtagctttgcgtattattaccgaaggcgcatccatcctgcgacaggaaaaaaatctgttggatatagatgctcccgtaaccgtatgtggcgacatccatgggcagtttttcgacctcatgaaactcttcgaggtaggggggtcccccgccaatacccgttatttattcctcggggactacgtcgatagaggctatttctcaatcgagtgcgtgctttacctgtgggccctcaaaattctgtaccccaagactcttttcctccttcggggaaaccatgagtgccggcatttgacagaatacttcaccttcaagcaggaatgcaagattaagtactccgagagagtttacgatgcctgcatggatgcctttgattgcctgcctttggcagctctcatgaatcagcagttcttgtgcgttcatgggggtctatctccagagataaatacactggacgatattcggaaactagaccgctttaaagagccgcctgcttacggcccaatgtgcgacattctttggagcgacccattggaggattttggaaacgagaagacacaggagcactttacgcataacacggtgcgcggctgttcttacttctactcctacccagcagtgtgcgagtttcttcagcacaataacttactgagtatcctgcgcgcccatgaagcccaagatgcaggatatagaatgtatagaaagagccaaacaaccggatttcctagcttgatcaccatctttagcgcccccaactatttggacgtgtataataataaggctgctgtcctgaagtacgaaaacaatgtgatgaatattcggcaatttaactgctcccctcatccttattggcttccaaacttcatggacgttttcacctggtcactgcccttcgtgggagagaaggttactgagatgctggtgaatgtcctcaacatttgctccgatgacgagctgggaagtgaggaggacggttttgatggcgccactgcagctgcacggaaagaggtcatccggaataagatccgcgccatcggcaagatggcaagagtgtttagtgtgctccgggaggaatctgaaagcgtgctgactctaaaggggttgactccaactgggatgctgccaagtggcgtgctgagcggcggcaagcagacattacaatcggccaccgtcgaggcgattgaggccgatgaggctatcaaagggtttagcccccagcacaagatcacttcctttgaggaggccaagggcctggataggataaatgaaagaatgcctccgagaagagacgccatgccttcggacgcaaatctcaactctatcaataaagcgctgacctccgaaacgaacggaacagattccaacggaagtaatagctcaaatatacagtag

SEQ ID NO: 17530 - DNA, 1272 bp, Artificial Sequence
  derived and/or modified sequence
atgaaactgtttgaggtcggcggttccccggcaaacacacggtatttgtttttgggcgactacgtggacagagggtacttttctatcgagtgtgtcctgtatctttgggccctcaaaattctgtacccgaaaacactgttcttgctgagggggaaccatgaatgtcggcatctaactgagtatttcacgttcaagcaggagtgtaagataaaatactctgaacgtgtctatgacgcttgtatggatgctttcgactgtctgcccctggcagctctgatgaatcagcagttcctgtgcgtgcacgggggactgagcccagagattaataccctagatgatattcgcaaattggaccgctttaaggagcctcccgcttacgggccaatgtgcgacatactgtggtctgaccccctagaagattttggcaatgagaagacacaggagcattttactcacaacacagtgagggggtgttcctatttttattcatatcccgccgtctgtgagtttctgcaacacaataatctattaagcatcttgcgcgctcacgaggcacaagacgccggctaccgaatgtaccggaaatcacagacaaccggcttcccttctctgataacaatctttagcgccccgaactatctcgacgtgtataataacaaggctgctgtgctgaaatacgaaaataacgtcatgaatatacggcagtttaattgttcccctcatccgtattggttgccaaattttatggacgttttcacgtggagcctgccatttgttggcgaaaaggttactgagatgctcgtaaacgtactcaatatttgtagtgacgatgagctcggaagcgaggaagacggcttcgacggggcgacagcagccgctagaaaggaggtgattcgtaataaaatcagagccattgggaagatggccagagtcttttccgtgctcagagaggagtccgagtccgtcctcactctcaaaggcttgactcctacggggatgctgccgtcgggggtgctgtcaggaggtaaacagacactgcagtccgccaccgtggaagctatcgaggctgatgaggccattaagggcttttcccctcagcacaagattacatcatttgaagaggccaaggggctggacaggattaacgaaagaatgccaccaagaagggacgccatgccttctgatgctaatctcaatagcattaataaagcactcacatctgagactaacggtaccgactctaatggctcaaattccagtaacattcagtag

SEQ ID NO: 17531 - DNA, 870 bp, Artificial Sequence
  derived and/or modified sequence
atgtcggaacccaaggctatcgatccaaagctgtcgacaactgacagagttgtgaaagccgtaccttttcctccaagccatcgcctgacagcgaaagaggtcttcgacaacgacggcaaaccacgggtggatatcctcaaggctcacttgatgaaggagggcagactggaggaatccgtggctcttcggattatcacagagggggcatcaatcttgagacaggaaaagaatcttctggacatcgacgcccccgtgactgccgcggtgctgaaatacgaaaacaatgttatgaacatccggcagtttaattgctcgcctcatccctattggctgcctaatttcatggacgtgtttacgtggagcctgccttttgttggcgaaaaggtcactgagatgctggttaatgtcctcaacatttgcagtgacgatgagctgggatcagaggaggacggatttgacggagcgacagctgcggcaaggaaagaggtcataaggaacaaaatccgggcgattgggaaaatggcacgtgtgttttccgtactgcgggaggagagcgaatcagttctgacacttaaaggcttgaccccgaccggtatgctgccgagcggcgttctgtctggtggtaaacagacactccagtctgctaccgtggaagccatagaagctgatgaagctataaaggggttttctcctcagcataaaatcacaagcttcgaagaggctaaaggcttggacaggataaatgaaagaatgccgcccaggcgggacgccatgccctcagacgcgaaccttaacagcatcaacaaggccctgacgagtgagactaatggtacggactccaatggctctaactcaagtaatatacagtag

SEQ ID NO: 17532 - DNA, 1365 bp, Artificial Sequence
  derived and/or modified sequence
atgtcagagccaaaagccatcgatcccaagctaagcaccacggacagagtggtgaaggtgtgtggggacatccatggacagttcttcgacctcatgaaactttttgaggtgggcggcagtcccgccaatacacgttacctctttctaggggactatgtggaccgcggttacttcagcattgagtgcgtactgtatctgtgggcgctcaagattttgtatcccaaaaccttgtttctgctacgtgggaaccacgaatgccgccatttgacagagtatttcacttttaaacaggaatgcaaaattaagtattctgagcgagtgtacgatgcctgtatggacgcatttgattgccttcccttggccgcgcttatgaaccaacagtttctctgtgtgcatggtgggctttcccctgagatcaatactctcgatgacatcagaaagcttgaccggttcaaggagccacctgcgtacggacctatgtgcgacatcctttggtcggatcccttagaggacttcggtaacgagaaaactcaggagcattttacgcataacacagtgcgtggttgttcctacttctacagctaccctgccgtttgtgaatttttacagcataataatctgctgagtatcctgagggctcacgaagctcaggacgccggttaccgtatgtaccgaaagagccaaacaacaggctttccttcgctgattactattttctccgctcccaactatctggacgtttataataacaaagctgccgtgctgaagtatgagaacaatgttatgaatatccgccagtttaactgttcacctcacccatactggctgcccaactttatggacgttttcacttggtccctgccatttgtgggcgaaaaagtgaccgaaatgcttgtaaacgtcctaaacatctgctccgatgatgaacttggtagtgaggaggatggcttcgatggagcgacggcagccgcaaggaaggaagtcattcgaaacaaaatacgtgctatcggcaaaatggcaagggtcttcagcgtcctgagggaggagtctgagagcgtactgactctcaagggcttaacacctactggcatgctgccctctggcgtcctgtcaggaggaaaacagaccctgcaaagcgcaaccgttgaggcaattgaggccgatgaggccatcaagggctttagtccccagcataagatcacctcctttgaggaggccaaaggactggatcggattaatgaacgtatgccaccacgccgcgatgctatgccgtctgatgctaatctaaacagtatcaacaaggcactgaccagcgaaacaaacggtacagactccaacggctctaattctagcaatatccaatag

SEQ ID NO: 17533 - DNA, 1566 bp, Artificial Sequence
  derived and/or modified sequence
atgtctgagcccaaggccatcgaccccaagctgagcaccacagacagagtggtgaaggctgtgcccttcccccccagccaccggctgacagccaaggaggtgtttgacaatgatggcaagccccgggtggacatcctgaaggcccacctgatgaaggagggccgcctggaggagagcgtggccctgcgcatcatcacagagggcgccagcatcctgcggcaggagaagaacctgctggacattgatgcccctgtgacagtgtgtggggacatccacggccagttctttgacctgatgaagctgtttgaggtgggcggcagccctgccaacacccgctacctgttcctgggggactatgtggaccggggctacttcagcattgaatgtgtgctgtacctgtgggccctgaagatcctgtaccccaagaccctcttcctgctgcggggcaaccacgagtgccgccacctgacagagtacttcaccttcaagcaggagtgcaagatcaagtacagcgagcgggtgtatgatgcctgcatggatgcctttgactgcctgcccctggccgccctgatgaaccagcagttcctgtgtgtgcatggaggcctgagccctgagatcaacaccctggatgacatcaggaagctggaccgcttcaaggagcccccagcctacggccccatgtgtgacatcctgtggagcgaccccctggaggactttggaaatgagaagacccaggagcacttcacccacaacacagtgcggggctgcagctacttctacagctacccagctgtgtgtgagttcctgcagcacaacaacctgctgagcatcctgcgggcccacgaggcccaggatgctggctacaggatgtacaggaagagccagaccaccggcttccccagcctcatcaccatcttcagcgcccccaactacctggatgtgtacaacaacaaggctgctgtgctgaagtatgaaaataatgtgatgaacatccggcagttcaactgcagcccccacccctactggctgcccaacttcatggatgtgttcacctggagcctgccctttgtgggggagaaggtgacagagatgctggtgaatgtgctgaacatctgcagtgatgatgagctgggctctgaagaagatggctttgatggagccacagctgctgccaggaaggaggtgatccggaacaagatccgggccatcggcaagatggcccgggtcttctctgtgctgcgggaggagagcgagagcgtgctgaccctgaagggcctgacccccaccggcatgctgcccagcggcgtgctgagcggcggcaagcagaccctgcagagcgccaccgtggaggccatcgaggctgatgaggccatcaagggcttcagcccccagcacaagatcaccagctttgaggaggccaagggcctggaccgcatcaatgaaagaatgccacccaggagagatgccatgcccagtgatgccaacctgaacagcatcaacaaggccctgaccagcgagaccaacggcacagacagcaatggcagcaacagcagcaacatccagtag

SEQ ID NO: 17534 - DNA, 1272 bp, Artificial Sequence
  derived and/or modified sequence
atgaagctgtttgaggtgggcggcagccctgccaacacccgctacctgttcctgggggactatgtggaccggggctacttcagcattgaatgtgtgctgtacctgtgggccctgaagatcctgtaccccaagaccctcttcctgctgcggggcaaccacgagtgccgccacctgacagagtacttcaccttcaagcaggagtgcaagatcaagtacagcgagcgggtgtatgatgcctgcatggatgcctttgactgcctgcccctggccgccctgatgaaccagcagttcctgtgtgtgcatggaggcctgagccctgagatcaacaccctggatgacatcaggaagctggaccgcttcaaggagcccccagcctacggccccatgtgtgacatcctgtggagcgaccccctggaggactttggaaatgagaagacccaggagcacttcacccacaacacagtgcggggctgcagctacttctacagctacccagctgtgtgtgagttcctgcagcacaacaacctgctgagcatcctgcgggcccacgaggcccaggatgctggctacaggatgtacaggaagagccagaccaccggcttccccagcctcatcaccatcttcagcgcccccaactacctggatgtgtacaacaacaaggctgctgtgctgaagtatgaaaataatgtgatgaacatccggcagttcaactgcagcccccacccctactggctgcccaacttcatggatgtgttcacctggagcctgccctttgtgggggagaaggtgacagagatgctggtgaatgtgctgaacatctgcagtgatgatgagctgggctctgaagaagatggctttgatggagccacagctgctgccaggaaggaggtgatccggaacaagatccgggccatcggcaagatggcccgggtcttctctgtgctgcgggaggagagcgagagcgtgctgaccctgaagggcctgacccccaccggcatgctgcccagcggcgtgctgagcggcggcaagcagaccctgcagagcgccaccgtggaggccatcgaggctgatgaggccatcaagggcttcagcccccagcacaagatcaccagctttgaggaggccaagggcctggaccgcatcaatgaaagaatgccacccaggagagatgccatgcccagtgatgccaacctgaacagcatcaacaaggccctgaccagcgagaccaacggcacagacagcaatggcagcaacagcagcaacatccagtag

SEQ ID NO: 17535 - DNA, 870 bp, Artificial Sequence
  derived and/or modified sequence
atgtctgagcccaaggccatcgaccccaagctgagcaccacagacagagtggtgaaggctgtgcccttcccccccagccaccggctgacagccaaggaggtgtttgacaatgatggcaagccccgggtggacatcctgaaggcccacctgatgaaggagggccgcctggaggagagcgtggccctgcgcatcatcacagagggcgccagcatcctgcggcaggagaagaacctgctggacattgatgcccctgtgacagctgctgtgctgaagtatgaaaataatgtgatgaacatccggcagttcaactgcagcccccacccctactggctgcccaacttcatggatgtgttcacctggagcctgccctttgtgggggagaaggtgacagagatgctggtgaatgtgctgaacatctgcagtgatgatgagctgggctctgaagaagatggctttgatggagccacagctgctgccaggaaggaggtgatccggaacaagatccgggccatcggcaagatggcccgggtcttctctgtgctgcgggaggagagcgagagcgtgctgaccctgaagggcctgacccccaccggcatgctgcccagcggcgtgctgagcggcggcaagcagaccctgcagagcgccaccgtggaggccatcgaggctgatgaggccatcaagggcttcagcccccagcacaagatcaccagctttgaggaggccaagggcctggaccgcatcaatgaaagaatgccacccaggagagatgccatgcccagtgatgccaacctgaacagcatcaacaaggccctgaccagcgagaccaacggcacagacagcaatggcagcaacagcagcaacatccagtag

SEQ ID NO: 17536 - DNA, 1365 bp, Artificial Sequence
  derived and/or modified sequence
atgtctgagcccaaggccatcgaccccaagctgagcaccacagacagagtggtgaaggtgtgtggggacatccacggccagttctttgacctgatgaagctgtttgaggtgggcggcagccctgccaacacccgctacctgttcctgggggactatgtggaccggggctacttcagcattgaatgtgtgctgtacctgtgggccctgaagatcctgtaccccaagaccctcttcctgctgcggggcaaccatgaatgtcgccacctgacagagtacttcaccttcaagcaggagtgcaagatcaagtacagcgagcgggtgtatgatgcctgcatggatgcctttgactgcctgcccctggccgccctgatgaaccagcagttcctgtgtgtgcacggcggcctgagccctgagatcaacaccctggatgacatcaggaagctggaccgcttcaaggagcccccagcctacggccccatgtgtgacatcctgtggagcgaccccctggaggactttggaaatgagaagacccaggagcacttcacccacaacacagtgcggggctgcagctacttctacagctacccagctgtgtgtgagttcctgcagcacaacaacctgctgagcatcctgcgggcccacgaggcccaggatgctggctacaggatgtacaggaagagccagaccaccggcttccccagcctcatcaccatcttcagcgcccccaactacctggatgtgtacaacaacaaggctgctgtgctgaagtatgagaacaacgtgatgaacatccggcagttcaactgcagcccccacccctactggctgcccaacttcatggatgtgttcacctggagcctgccctttgtgggggagaaggtgacagagatgctggtgaatgtgctgaacatctgcagtgatgatgagctgggcagcgaggaggatggctttgatggagccacagctgctgccaggaaggaggtgatccggaacaagatccgggccatcggcaagatggcccgggtcttctctgtgctgcgggaggagagcgagagcgtgctgaccctgaagggcctgacccccaccggcatgctgcccagcggcgtgctgagcggcggcaagcagaccctgcagagcgccaccgtggaggccattgaagcagatgaggccatcaagggcttcagcccccagcacaagatcaccagctttgaggaggccaagggcctggaccgcatcaatgaaagaatgcccccaagaagagatgccatgcccagtgatgccaacctgaacagcatcaacaaggccctgaccagcgagaccaatggaacagacagcaatggcagcaacagcagcaacatccagtag

SEQ ID NO: 17537 - DNA, 1566 bp, Artificial Sequence
  derived and/or modified sequence
atgagcgagcccaaggccatcgaccccaagctgagcaccaccgaccgggtcgtgaaggcggtgccgtttccacccagtcatcgcctgacggccaaagaagtgttcgacaacgacggaaaacccagggtcgatatacttaaggcacacctgatgaaagaaggacgactagaggagtcagtcgcactgaggattattaccgagggcgcatccatcctacgacaggaaaagaacttactggatatcgacgctccagttactgtgtgtggagacatccatgggcagttcttcgacctcatgaaactgtttgaggtaggcggcagtcccgctaacacacggtacctctttctgggcgattacgtggaccgtggatacttctctatcgagtgtgtcctgtatctctgggcactcaagatactgtatcccaaaacgctgtttttgcttaggggcaaccacgagtgcagacatctgacagagtacttcacctttaaacaggagtgcaagatcaagtattccgaaagggtctacgacgcttgtatggacgcttttgactgtctgcccttggcagctctcatgaatcagcagtttctttgcgtccacggaggcctcagtcccgaaatcaatactctcgacgacattcgaaagctagaccgattcaaagagcccccggcctatggccctatgtgtgatatcctatggtccgacccactggaagactttgggaacgagaaaacacaggaacacttcacccacaacaccgtgagggggtgttcttacttctattcctatcccgccgtatgtgagttcctgcagcataataacctgctgtccatcctgcgcgctcatgaggctcaggacgccgggtacaggatgtacaggaaaagtcagaccacaggttttccttctctgatcactatcttcagcgctcccaactatttggatgtctataacaataaggccgcagtgcttaagtatgaaaacaacgtcatgaacatacggcagttcaactgttcaccgcacccttactggctgccgaatttcatggatgtttttacctggtccctcccttttgtcggtgaaaaggtgacagagatgttggtgaacgtcctgaatatttgctccgacgatgagttgggttcagaggaggatggcttcgatggagccacggccgctgctcgaaaggaagtgatacgaaacaagatccgggccataggcaaaatggcacgcgttttttcagtcctgagggaggagtcagaatccgtgctgactctgaagggcctgaccccaacagggatgctaccctctggcgtcctgagtggtgggaaacagactctgcagtccgccacagtggaggcaattgaggctgacgaggccattaagggctttagtcctcagcataagatcacatcattcgaagaggcaaaaggcctagatcgaattaacgaaagaatgccgccacgcagggacgccatgcctagcgacgccaatctgaactcgatcaacaaggctttgacatccgaaacaaatggtaccgactctaacggcagcaacagctcaaatattcagtag

SEQ ID NO: 17538 - DNA, 1272 bp, Artificial Sequence
  derived and/or modified sequence
atgaagctgttcgaggtgggcggcagccccgccaacacccggtacttatttctgggtgactacgtagatagggggtactttagtatcgagtgtgttttatacttatgggccctgaaaatattgtatcctaaaaccctctttctcctgcgtgggaatcacgagtgtagacacctgactgagtacttcactttcaagcaagagtgtaaaatcaagtactccgaacgggtttacgacgcctgtatggatgcattcgattgccttccccttgctgctctaatgaatcagcagtttttatgtgttcacggcggattgtctcccgagatcaacacactggacgatattaggaagctggataggtttaaagagcctccagcctatggccccatgtgtgatatcctgtggtccgacccattagaggacttcggcaatgagaagactcaggagcattttacccacaacacagtgaggggctgtagctatttctatagctatccagccgtttgcgagttcctccagcataacaacctgttaagtatcctgcgcgcgcacgaagcacaggatgccgggtatcgtatgtaccggaaatcccagacaaccgggtttccctcactgatcaccatttttagcgcgcccaattacctcgatgtatacaataataaagctgcagtcctgaagtacgagaacaatgtgatgaatattaggcagtttaattgttcaccgcacccctattggctgccgaacttcatggatgtgtttacgtggtctttaccctttgtgggcgagaaggtcacagagatgttggtgaatgtcctgaatatttgcagcgacgacgagctaggcagtgaggaggatgggttcgatggagcaacagcggccgctcggaaagaggtcatccgcaataaaattagggctatcggcaagatggcaagagttttttccgtcctccgagaagagagcgaatccgtactcacattgaaaggtttgaccccgactgggatgctgccctctggggtgctaagcggcggtaagcagactttacagtcagctactgtcgaggccattgaagccgatgaggcgatcaaaggcttttcgccacaacataagattacaagctttgaggaggccaagggcctggatcgcatcaacgaacggatgccacccaggagagatgcaatgccttccgatgctaatctaaacagcatcaacaaagccctgaccagcgagacaaacgggacagattcaaatgggagcaatagctcaaacattcaatag

SEQ ID NO: 17539 - DNA, 870 bp, Artificial Sequence
  derived and/or modified sequence
atgagcgagcccaaggccatcgaccccaagctgagcaccaccgaccgcgttgtgaaggcagttccattccctccgtctcatcggctgaccgcgaaggaggtattcgacaacgatggaaagccaagagtcgacattctgaaggcgcacttgatgaaggaggggcgcctcgaagagtctgtggctctgaggatcattaccgagggcgcctcaattctgaggcaggaaaagaatctgctggatatcgatgctcctgttactgccgctgttctgaagtacgaaaataacgtgatgaacatcaggcagttcaattgttcccctcatccatactggctcccgaatttcatggacgtcttcacgtggtccctgccctttgttggcgagaaagtgactgagatgctggtcaacgtgctcaatatttgttccgacgacgagctgggatccgaggaagatgggttcgatggcgccacagccgccgcacgaaaagaagtgatccgcaataagatccgggccattggcaagatggctcgggtgttcagcgtgctccgggaggagtcagaatccgttctcacactgaagggcttgaccccaacaggtatgctgcctagcggtgtgctatctggaggaaagcaaacgcttcagtcggctactgtggaggctattgaagctgacgaggctatcaaaggattcagcccccagcacaagatcacctccttcgaggaagccaagggattggaccgcatcaacgaaaggatgccacccagaagagacgcaatgccctccgatgcgaaccttaattcaatcaataaggcattgactagcgaaaccaacggaaccgactcaaacggctcgaattcaagcaatattcagtag

SEQ ID NO: 17540 - DNA, 1365 bp, Artificial Sequence
  derived and/or modified sequence
atgagcgagcccaaggccatcgaccccaagctgagcaccaccgacagggtggtcaaggtgtgtggagacattcacggccagtttttcgatctcatgaagttatttgaggtcgggggaagccctgccaatacacgctatttatttctaggggactacgttgaccggggctacttttccatagaatgcgtcttgtatctgtgggccttgaagatcctgtatcctaagaccctattcttactgaggggaaaccacgaatgcagacacctcaccgagtacttcacttttaaacaagaatgcaaaatcaaatattctgagcgggtgtacgatgcatgcatggatgcattcgattgccttcccctcgccgcactcatgaatcagcagttcctctgtgtacacgggggcctgtctcccgaaattaatactctggatgacatccgcaaactggatagattcaaggaaccccccgcctatggaccaatgtgcgacatcctatggtccgatccactggaggacttcggaaatgagaagacccaggaacactttacacataatactgtgagaggatgcagttatttctattcctatccagccgtgtgtgagttcctccaacacaacaatctgctgagcatccttcgggctcatgaggcgcaagacgccggatatcgcatgtatcgtaaaagccagactactgggttccccagtttgatcaccatcttttctgctccaaattacctagacgtctataacaataaagccgccgtgctgaaatatgaaaacaatgtcatgaatattaggcagttcaactgtagtccacatccttattggctaccaaactttatggatgtcttcacctggtcactgcccttcgtgggggaaaaggtgaccgaaatgttagtgaatgtgctcaacatctgttccgatgatgagttagggtcagaggaggatggattcgatggagctacggctgctgctcggaaagaagtcattaggaacaaaatccgcgccatagggaagatggcacgagtattctccgttcttagggaagagtctgaaagtgtcctgaccttgaaaggcctcactcctactgggatgttgccttccggcgtgctcagtgggggtaagcaaacattgcagtctgctacggtcgaagcgattgaagctgacgaagccattaagggtttttccccacagcataaaatcacgtcgttcgaggaggcgaaaggactggatcgcattaatgaaagaatgcccccgaggcgggacgcaatgccatcagatgcaaacctgaactcaatcaacaaggccctgacatcagagactaatgggaccgattcaaatggaagtaacagtagtaacatacaatag

SEQ ID NO: 17541 - DNA, 1566 bp, Artificial Sequence
  derived and/or modified sequence
atgagtgagcctaaggctatcgaccccaagttatccacaactgatagagtggtcaaagcagtcccatttccgccttctcaccgcttgactgccaaagaggtcttcgacaacgatggaaagccaagggttgatattctgaaagcccatttgatgaaggagggccgtctggaagagtcagtcgccctgcgcattatcacggaaggggcttccattctgcggcaagagaaaaatctgcttgacattgacgcgccagtgaccgtgtgcggggacatacatggacagttctttgacctaatgaagttattcgaggtcggtggctcccccgcaaatacaagatatctgttcctcggtgattacgtggataggggttactttagcatcgagtgcgtgctgtatctttgggcgcttaaaattctttaccctaagaccttatttctgctgcgtggaaaccatgaatgtcgacacctgactgaatactttacgtttaagcaggaatgtaaaattaagtattctgagcgtgtgtacgatgcctgcatggacgcattcgactgtctacctctagccgctcttatgaatcaacagtttctgtgcgtacatggcggactgtctcctgaaatcaatacgctcgacgatattagaaaactggatagattcaaggagcctcctgcctacggacctatgtgcgatatactctggtctgacccgttagaagactttgggaacgagaagacacaagagcactttactcataacaccgtccggggatgttcctacttctattcctacccagcggtttgtgaattcttgcaacataataacctgctcagcatcctgagagctcacgaggcccaagatgccggatataggatgtacagaaaaagccaaaccacaggctttcccagtctcattaccattttctcagcgccaaattatctggatgtatataataataaggctgccgtgctcaagtatgagaacaacgtcatgaatataagacagtttaattgctccccccacccatactggctccctaattttatggacgtgtttacttggagcctcccttttgtgggcgagaaggtgacagagatgttagtgaacgttctgaacatatgtagtgatgacgaactgggctctgaggaggacggtttcgatggtgccaccgccgctgctagaaaagaagtgattcgcaacaaaattcgcgctatcggcaaaatggccagagtctttagcgtgctaagagaagagtctgagagtgtcctcaccctaaagggactcactcccacaggcatgctgccttctggggtcctcagtggaggtaagcagaccctacagtcagctaccgtggaggcaattgaagctgacgaggctattaaggggttctctccacagcacaagattacaagcttcgaggaggcgaagggcctggaccgcatcaacgagcgcatgccgccacgcagggacgctatgcctagcgacgccaaccttaactctattaacaaggccctcaccagcgaaactaatgggacagattccaacggatctaattcgtcaaacatacagtag

SEQ ID NO: 17542 - DNA, 1272 bp, Artificial Sequence
  derived and/or modified sequence
atgaagctgttcgaggttgggggtagccctgctaatacaaggtacctgttcctcggggattatgtggacagaggctatttttccatcgagtgcgttttgtatttatgggccctaaagatcctctaccctaagaccctgtttctgttgagaggaaatcatgaatgccgtcatttaactgagtatttcactttcaaacaggagtgcaaaattaaatacagtgaacgggtgtacgacgcctgcatggacgcatttgattgcctgcccctggctgctctcatgaatcagcagttcctttgcgtgcatggcggattgagccccgagattaacacattagatgatatccgcaaactcgatcggtttaaagagccccctgcctatggacccatgtgcgatattctgtggtccgacccactcgaagacttcggcaacgagaaaacccaagaacactttacccacaacacagttcgtgggtgctcctacttctactcttaccccgcagtgtgcgaatttctccaacacaacaatttgttgtctatactgcgggcacacgaggcccaagacgccggttaccgaatgtataggaagagccagaccactggatttccctctctcataaccatcttcagcgctcctaactaccttgacgtgtacaacaacaaggcagctgtgctgaaatatgagaacaatgtcatgaatatacgtcagtttaactgcagtccccacccgtattggctgccgaactttatggatgtcttcacctggtctctccccttcgtgggcgagaaggtgacagagatgttagtaaatgtcctaaacatttgtagcgacgatgaactggggtccgaagaagatgggtttgatggggctacagctgccgcaagaaaagaagtgattcgcaacaaaattcgggcaattggcaagatggctcgcgtgttcagtgtgttgcgcgaagagtcggaatcggttctcacccttaaaggacttaccccgaccggaatgctacctagcggcgttctgtccgggggaaagcagactttgcagtcagccacagtggaggccattgaggcagatgaggccatcaagggattttcaccccagcataagattacctcgttcgaggaagcaaagggcctggacagaatcaacgagaggatgcccccacgtagagacgccatgccatccgatgctaatttgaattcaatcaacaaggccttgacatctgaaacgaacggtaccgactctaatggaagcaacagctccaacatccaatag

SEQ ID NO: 17543 - DNA, 870 bp, Artificial Sequence
  derived and/or modified sequence
atgagcgagccaaaagcaatcgatccaaagctgtccaccaccgatagagtcgtcaaggctgtaccatttcctccatcacacaggctgacggcaaaggaggtgtttgacaacgatggtaagcccagggtggacatcctcaaggcccatctaatgaaagaaggaagattggaagagtccgttgcccttagaattattacagagggggcttcgatcttgagacaagagaagaacctgcttgatattgatgcaccagtcactgcggcagtgctgaaatacgagaacaatgtgatgaatattaggcaattcaactgctccccgcatccgtattggctgcccaacttcatggatgtcttcacctggagcctgcctttcgtaggcgagaaggttacagaaatgcttgtgaatgtgctgaatatctgtagcgatgatgagctggggtccgaggaagacgggtttgacggggcaactgctgcggctaggaaggaagtgataagaaataaaatccgcgctataggaaagatggcacgcgtattttcagtgctgcgcgaagaaagtgaatccgtgctgaccctgaaaggactcacgcccaccgggatgctgcccagcggagtgctgagtggaggtaaacaaacgctacagtccgctacagtggaagctatcgaggccgacgaagccattaagggattcagcccccagcacaaaatcactagcttcgaagaggccaagggcctagatcgcatcaacgagaggatgcccccaaggcgggatgccatgccttccgacgccaatctgaattcgattaacaaagccctgacctctgaaaccaacggtacagactcaaatgggtctaatagctccaatatacaatag

SEQ ID NO: 17544 - DNA, 1365 bp, Artificial Sequence
  derived and/or modified sequence
atgtcggagccaaaagccattgatccaaagctttccacaaccgatagggtagtcaaggtatgtggagacattcatggtcagttctttgacctgatgaagctgttcgaggtgggcggttctcccgcaaacacacggtacctgtttttgggcgactacgtcgatcggggatattttagtatagaatgcgtcctctacctgtgggctttgaaaatcctctatcctaaaaccctcttcctgctacgcggaaaccatgagtgtcggcacctgacagaatacttcacgtttaaacaagaatgcaagatcaagtatagcgaacgggtgtacgatgcttgcatggacgcttttgactgtctgcccttggcggctctgatgaatcagcaattcctctgcgtgcatgggggtctttcaccagagataaacacattggatgatattcggaagctcgacagattcaaggagcctccagcctacggcccaatgtgcgatatcttatggtccgatcccctggaggattttggtaacgagaaaacacaggagcatttcactcacaacactgtacggggttgttcttacttctacagctacccggcagtctgtgagtttttacagcacaataacctgctcagcattttgagggcccatgaggcccaggacgcaggttatcggatgtacaggaaatcccagaccaccgggttcccttctctcattacgattttttctgctcctaattatttagacgtgtacaacaacaaagctgctgtgctcaagtacgagaataatgtgatgaacatcaggcagtttaattgtagcccccacccctattggttacccaatttcatggacgttttcacctggagcctcccttttgtgggagagaaggttacagaaatgctggtgaatgtcttaaatatctgcagtgatgatgagctgggttccgaggaggatggatttgacggtgccacagctgccgcacggaaagaggttattcgaaacaaaatacgggctattgggaaaatggcccgagtattcagcgtactccgtgaggaatctgaaagtgtattgacgctcaaaggcctgactcccaccggaatgttgcccagcggcgttctgagcggcggaaaacagacactgcagagcgccactgttgaggcaatcgaggctgatgaggcaattaagggtttttcaccgcaacataagatcacgagctttgaagaagccaagggccttgataggataaacgagaggatgccccctcgccgtgatgccatgccgtctgacgccaacttgaatagtattaataaggccctgaccagcgagacaaacggcaccgactcaaacgggtccaacagctccaatatccagtag

SEQ ID NO: 17545 - DNA, 4685 bp, Artificial Sequence
  derived and/or modified sequence
ggtgagtggaggagcggcgcggggaggcagaggcgagcgcgggcgatcgcggcggcgggacgtctccggcggccgcggcaccagcggcggcgctctgtgtggagaagcaggggcagcggcagcagcaacagcggcagcggcagcagcagcggcagcagcggcggccgcctctccgccgccggggacgccaaggtgcggctggtggcactgacatcggcggccctgcctctcctccctcgcccccggccttccccatgtgatcggtcttaatcctggccgtgtgtgcgcgcgtggggctccattccgcggtgctgggtctccgtgccggggtgggtgctcgtgtgtgcgcttctcctccccatcccccttcccccaagaataaaagaagaaccgggaggcgtgctcagaaaataaataaataaccaccacacacgcgcagcccggagcgagtcggcggggctggcggcagcggcggaggaggagtgaaggcggcggcggcggaggagggacgcgcggaaaaggcagcaactttaaagccagctcagagcctagacctccagccgagcggtttgcagcgcggcggcggcggcggcggcggcggcgttgagtgtctggcccgccggtccggtcggggtgtgcagtcggacggacgagcagcgcgtcgctgtcctccggcagctggagatgtccgagcccaaggcaattgatcccaagttgtcgacgaccgacagggtggtgaaagctgttccatttcctccaagtcaccggcttacagcaaaagaagtgtttgataatgatggaaaacctcgtgtggatatcttaaaggcgcatcttatgaaggagggaaggctggaagagagtgttgcattgagaataataacagagggtgcatcaattcttcgacaggaaaaaaatttgctggatattgatgcgccagtcactgtttgtggggacattcatggacaattctttgatttgatgaagctctttgaagtcgggggatctcctgccaacactcgctacctcttcttaggggactatgttgacagagggtacttcagtattgaatgtgtgctgtatttgtgggccttgaaaattctctaccccaaaacactgtttttacttcgtggaaatcatgaatgtagacatctaacagagtatttcacatttaaacaagaatgtaaaataaagtattcagaacgcgtatatgatgcctgtatggatgcctttgactgccttcccctggctgccctgatgaaccaacagttcctgtgtgtgcatggtggtttgtctccagagattaacactttagatgatatcagaaaattagaccgattcaaagaaccacctgcatatggacctatgtgtgatatcctgtggtcagaccccctggaagattttggaaatgagaagactcaggaacatttcactcacaacacagtcagggggtgttcatacttctacagttacccggctgtatgtgaattcttacagcacaataacttgttatctatactccgagcccacgaagcccaagatgcagggtaccgcatgtacaggaaaagccaaacaacaggcttcccttctctaattacaattttttcagcaccaaattacttagatgtatacaataacaaagctgcagtattgaagtatgagaacaatgttatgaatatcaggcaattcaactgttctcctcatccatactggcttccaaatttcatggatgtttttacttggtcccttccatttgttggggaaaaagtgactgagatgctggtaaatgtcctcaacatctgctcagatgatgaactagggtcagaagaagatggatttgatggtgcaacagctgcagcccggaaagaggtgataaggaacaagatccgagcaataggcaaaatggccagagtgttctcagtgctcagagaagagagtgagagtgtgctgacgctgaaaggcttgaccccaactggcatgctccccagcggagtactttctggagggaagcaaaccctgcaaagcgctactgttgaggctattgaggctgatgaagctatcaaaggattttcaccacaacataagatcactagcttcgaggaagccaagggcttagaccgaattaatgagaggatgccgcctcgcagagatgccatgccctctgacgccaaccttaactccatcaacaaggctctcacctcagagactaacggcacggacagcaatggcagtaatagcagcaatattcagtgaccacttcctgttcactttttttttttttttttttttttttttttgagctgcggggcatgatggggattgctgcatatcagcagttggatgttcttgcctctgacagtagcttatttgctctgggggccaggaattggattcagtttacactatcattaaaaaagagggagagagataataaactatattttggtggggatggtgattaaacacctcttttgggtatgccttttaaaaatgcttatagagaaaaaaaattttaaaaagaaagctaatgctagtatatactgcaatgttaggggaatgaacatgttttcctactgcattggggacttctagataggttaatgaaaggccttttattctgttactggacatgaaaactttgtctaatttcttactctattgtacgtttacagtcgcagcactaaaaatggatgacatcaaacatttttaacaaaatgatgtacaaactaaggactatttattgataatgttttgctactcttgtcagacaatggctataaactgaattaggcagtcttaaaaaaaaaaaaaaacagaaaaagaaaaaaaagaacgttgcaaatttgttaaaatgccaaaaaggacagtttaattttgtacagattatgcttacctcaggtttctttagtgtgcttgaatgcccttctttccatataacacttatcttcttcttaattcggcaatggaatatcttttaagttttaaaaaaactggaataattatatctatcttttttgccgtttatatttaggggtttttgttgataaaatcaagtcttggttgtggcttgctgaattaaatatttatgagtggtgcatttttaagtatagtgaacaagacaccatattaagtacagtgataaagcatctatattctgtaaaaaaaaaaaaaatctgcctatgcatgttttttaagaaaaaaaaaatggctgtatcggcctgtatgggactgtaatgcgcttagtggtctgacatatactggaaatgtatgtatactggcgtactttatattctctaaaatgcttaatgcctttgaaattttgtaatcaaaaaaaagctttgaaaaaatctaaaggggagagtattctttaaagtttttaacataagcttgtcaatgcacatgtagatggttagcatgtttagcaaaccttgtgaaattataataagtttgtagttacatgtgaaactctaaatgcatggcaactgttaatgtcataacagtttagttattttgttctgttctgtcatgtgccacaaaatatgtacttttttcacttttttccctttgtatatcagttacgggttacaactggttcattctgaaaacaacaacaacaaaagtccattcatattttttaacaattgtataagtgcccaagtaattcactacagcctaaagccttgcctttgtaatttgacttctgacatgttggcaatcaaagcatgcacttgtaacaatgaaaaagaaaaagcattttatattactactcaataaaatgtgcatgaacttacagaattctcatccttccactgagtccgctgaagggatttatgtgcacaaccaccatgtgtcttctaggtgctggcccaccaccacacatcacaggctgatttccacaggcttcttcctaggggcctcgtgatctgaggggtggtgcctacttccactgtaagaaagaatcttggtggatttgtgtctcaaatcagataagagaagcctgtttaaagagcagatgccatcttctggcttcctcaaggagccagttaaaaaaccagagcattcctttttattgaaaaataaaattaatttgttatcaggttgtttcagttgtattggatgccctatctatctgctaaagcaaaaagtactaggctactaagtgcattttcatcacagaaaagagttgcatttgtattaacaagaaatttgtatacccacgcttcagctactatctaatcatcacccgaagatttaagatacaccaaatttcagtttgtttgtaacattgttcatctttagtgcactttgttttatataataaagtatgcctgttatattaaataataagaatatggcaattagcgatatagcatacccaaacaaagatgttctcgatacagtctggcaaagactatcccaaggttattttaatgaattcagacattttttcctgtggatatttctccatcctaaaaaaagtggcaaccaaggaaaatatttagatgcaacttactagagtgatgatgtgaaagaaatggtgattctggtatcatggtgtttattttctttcttataactgcagagaaaatatcctgactaaaaaaaattcatttttttggattcctttcttttacaaattgtgctgaggcaactatggcatagaaataaacatttgacattaaaataag

SEQ ID NO: 17546 - DNA, 1958 bp, Artificial Sequence
  derived and/or modified sequence
cagtcggacggacgagcagcgcgtcgctgtcctccggcagctggagatgtccgagcccaaggcaattgatcccaagttgtcgacgaccgacagggtggtgaaagtttgtggggacattcatggacaattctttgatttgatgaagctctttgaagtcgggggatctcctgccaacactcgctacctcttcttaggggactatgttgacagagggtacttcagtattgaatgtgtgctgtatttgtgggccttgaaaattctctaccccaaaacactgtttttacttcgtggaaatcatgaatgtagacatctaacagagtatttcacatttaaacaagaatgtaaaataaagtattcagaacgcgtatatgatgcctgtatggatgcctttgactgccttcccctggctgccctgatgaaccaacagttcctgtgtgtgcatggtggtttgtctccagagattaacactttagatgatatcagaaaattagaccgattcaaagaaccacctgcatatggacctatgtgtgatatcctgtggtcagaccccctggaagattttggaaatgagaagactcaggaacatttcactcacaacacagtcagggggtgttcatacttctacagttacccggctgtatgtgaattcttacagcacaataacttgttatctatactccgagcccacgaagcccaagatgcagggtaccgcatgtacaggaaaagccaaacaacaggcttcccttctctaattacaattttttcagcaccaaattacttagatgtatacaataacaaagctgcagtattgaagtatgagaacaatgttatgaatatcaggcaattcaactgttctcctcatccatactggcttccaaatttcatggatgtttttacttggtcccttccatttgttggggaaaaagtgactgagatgctggtaaatgtcctcaacatctgctcagatgatgaactagggtcagaagaagatggatttgatggtgcaacagctgcagcccggaaagaggtgataaggaacaagatccgagcaataggcaaaatggccagagtgttctcagtgctcagagaagagagtgagagtgtgctgacgctgaaaggcttgaccccaactggcatgctccccagcggagtactttctggagggaagcaaaccctgcaaagcgctactgttgaggctattgaggctgatgaagctatcaaaggattttcaccacaacataagatcactagcttcgaggaagccaagggcttagaccgaattaatgagaggatgccgcctcgcagagatgccatgccctctgacgccaaccttaactccatcaacaaggctctcacctcagagactaacggcacggacagcaatggcagtaatagcagcaatattcagtgaccacttcctgttcactttttttttttttttttttttttttttttgagctgcggggcatgatggggattgctgcatatcagcagttggatgttcttgcctctgacagtagcttatttgctctgggggccaggaattggattcagtttacactatcattaaaaaagagggagagagataataaactatattttggtggggatggtgattaaacacctcttttgggtatgccttttaaaaatgcttatagagaaaaaaaattttaaaaagaaagctaatgctagtatatactgcaatgttaggggaatgaacatgttttcctactgcattggggacttctagataggttaatgaaaggccttttattctgttactggacatgaaaactttgtctaatttcttactctattgtacgtttacagtcgcagcactaaaaatggatgacatcaaacatttttaacaaaatgatgtacaaactaaggactatttattgataatgttttgctactcttgtcagacaatggctataaactgaattaggcagtcttaa

SEQ ID NO: 17547 - DNA, 4007 bp, Artificial Sequence
  derived and/or modified sequence
gagtggaggagcggcgcggggaggcagaggcgagcgcgggcgatcgcggcggcgggacgtctccggcggccgcggcaccagcggcggcgctctgtgtggagaagcaggggcagcggcagcagcaacagcggcagcggcagcagcagcggcagcagcggcggccgcctctccgccgccggggacgccaaggtgcggctggtggcactgacatcggcggccctgcctctcctccctcgcccccggccttccccatgtgatcggtcttaatcctggccgtgtgtgcgcgcgtggggctccattccgcggtgctgggtctccgtgccggggtgggtgctcgtgtgtgcgcttctcctccccatcccccttcccccaagaataaaagaagaaccgggaggcgtgctcagaaaataaataaataaccaccacacacgcgcagcccggagcgagtcggcggggctggcggcagcggcggaggaggagtgaaggcggcggcggcggaggagggacgcgcggaaaaggcagcaactttaaagccagctcagagcctagacctccagccgagcggtttgcagcgcggcggcggcggcggcggcggcggcgttgagtgtctggcccgccggtccggtcggggtgtgcagtcggacggacgagcagcgcgtcgctgtcctccggcagctggagatgtccgagcccaaggcaattgatcccaagttgtcgacgaccgacagggtggtgaaagctgttccatttcctccaagtcaccggcttacagcaaaagaagtgtttgataatgatggaaaacctcgtgtggatatcttaaaggcgcatcttatgaaggagggaaggctggaagagagtgttgcattgagaataataacagagggtgcatcaattcttcgacaggaaaaaaatttgctggatattgatgcgccagtcactgctgcagtattgaagtatgagaacaatgttatgaatatcaggcaattcaactgttctcctcatccatactggcttccaaatttcatggatgtttttacttggtcccttccatttgttggggaaaaagtgactgagatgctggtaaatgtcctcaacatctgctcagatgatgaactagggtcagaagaagatggatttgatggtgcaacagctgcagcccggaaagaggtgataaggaacaagatccgagcaataggcaaaatggccagagtgttctcagtgctcagagaagagagtgagagtgtgctgacgctgaaaggcttgaccccaactggcatgctccccagcggagtactttctggagggaagcaaaccctgcaaagcgctactgttgaggctattgaggctgatgaagctatcaaaggattttcaccacaacataagatcactagcttcgaggaagccaagggcttagaccgaattaatgagaggatgccgcctcgcagagatgccatgccctctgacgccaaccttaactccatcaacaaggctctcacctcagagactaacggcacggacagcaatggcagtaatagcagcaatattcagtgaccacttcctgttcactttttttttttttttttttttttttttttgagctgcggggcatgatggggattgctgcatatcagcagttggatgttcttgcctctgacagtagcttatttgctctgggggccaggaattggattcagtttacactatcattaaaaaagagggagagagataataaactatattttggtggggatggtgattaaacacctcttttgggtatgccttttaaaaatgcttatagagaaaaaaaattttaaaaagaaagctaatgctagtatatactgcaatgttaggggaatgaacatgttttcctactgcattggggacttctagataggttaatgaaaggccttttattctgttactggacatgaaaactttgtctaatttcttactctattgtacgtttacagtcgcagcactaaaaatggatgacatcaaacatttttaacaaaatgatgtacaaactaaggactatttattgataatgttttgctactcttgtcagacaatggctataaactgaattaggcagtcttaaaaaaaaaaaaaaacagaaaaagaaaaaaaagaacgttgcaaatttgttaaaatgccaaaaaggacagtttaattttgtacagattatgcttacctcaggtttctttagtgtgcttgaatgcccttctttccatataacacttatcttcttcttaattcggcaatggaatatcttttaagttttaaaaaaactggaataattatatctatcttttttgccgtttatatttaggggtttttgttgataaaatcaagtcttggttgtggcttgctgaattaaatatttatgagtggtgcatttttaagtatagtgaacaagacaccatattaagtacagtgataaagcatctatattctgtaaaaaaaaaaaaaatctgcctatgcatgttttttaagaaaaaaaaaatggctgtatcggcctgtatgggactgtaatgcgcttagtggtctgacatatactggaaatgtatgtatactggcgtactttatattctctaaaatgcttaatgcctttgaaattttgtaatcaaaaaaaagctttgaaaaaatctaaaggggagagtattctttaaagtttttaacataagcttgtcaatgcacatgtagatggttagcatgtttagcaaaccttgtgaaattataataagtttgtagttacatgtgaaactctaaatgcatggcaactgttaatgtcataacagtttagttattttgttctgttctgtcatgtgccacaaaatatgtacttttttcacttttttccctttgtatatcagttacgggttacaactggttcattctgaaaacaacaacaacaaaagtccattcatattttttaacaattgtataagtgcccaagtaattcactacagcctaaagccttgcctttgtaatttgacttctgacatgttggcaatcaaagcatgcacttgtaacaatgaaaaagaaaaagcattttatattactactcaataaaatgtgcatgaacttacagaattctcatccttccactgagtccgctgaagggatttatgtgcacaaccaccatgtgtcttctaggtgctggcccaccaccacacatcacaggctgatttccacaggcttcttcctaggggcctcgtgatctgaggggtggtgcctacttccactgtaagaaagaatcttggtggatttgtgtctcaaatcagataagagaagcctgtttaaagagcagatgccatcttctggcttcctcaaggagccagttaaaaaaccagagcattcctttttattgaaaaataaaattaatttgttatcaggttgtttcagttgtattggatgccctatctatctgctaaagcaaaaagtactaggctactaagtgcattttcatcacagaaaagagttgcatttgtattaacaagaaatttgtatacccacgcttcagctactatctaatcatcacccgaagatttaagatacaccaaatttcagtttgtttgtaacattgttcatctttagtgcactttgttttatataataaagtatgcctgttatattaaataataagaatatggcaattagcgatatagcatacccaaacaaagatgttctcgatacagtctggcaaagactatcccaaggttattttaatgaattcagacattttttcctgtggatatttctccatcctaaaaaaagtggcaaccaaggaaaatatttagatgcaacttactagagtgatgatgtgaaagaaatggtgattctggtatcatggtgtttattttctttcttataactgcagagaaaatatcctgactaaaaaaaattcatttttttggattcctttcttttacaaattgtgctgaggcaactatggcatagaaataaacatttgacattaaaataagcagttgatgtgagtattgctt

SEQ ID NO: 17548 - DNA, 1365 bp, Artificial Sequence
  derived and/or modified sequence
atgtccgagcccaaggcaattgatcccaagttgtcgacgaccgacagggtggtgaaagtttgtggggacattcatggacaattctttgatttgatgaagctctttgaagtcgggggatctcctgccaacactcgctacctcttcttaggggactatgttgacagagggtacttcagtattgaatgtgtgctgtatttgtgggccttgaaaattctctaccccaaaacactgtttttacttcgtggaaatcatgaatgtagacatctaacagagtatttcacatttaaacaagaatgtaaaataaagtattcagaacgcgtatatgatgcctgtatggatgcctttgactgccttcccctggctgccctgatgaaccaacagttcctgtgtgtgcatggtggtttgtctccagagattaacactttagatgatatcagaaaattagaccgattcaaagaaccacctgcatatggacctatgtgtgatatcctgtggtcagaccccctggaagattttggaaatgagaagactcaggaacatttcactcacaacacagtcagggggtgttcatacttctacagttacccggctgtatgtgaattcttacagcacaataacttgttatctatactccgagcccacgaagcccaagatgcagggtaccgcatgtacaggaaaagccaaacaacaggcttcccttctctaattacaattttttcagcaccaaattacttagatgtatacaataacaaagctgcagtattgaagtatgagaacaatgttatgaatatcaggcaattcaactgttctcctcatccatactggcttccaaatttcatggatgtttttacttggtcccttccatttgttggggaaaaagtgactgagatgctggtaaatgtcctcaacatctgctcagatgatgaactagggtcagaagaagatggatttgatggtgcaacagctgcagcccggaaagaggtgataaggaacaagatccgagcaataggcaaaatggccagagtgttctcagtgctcagagaagagagtgagagtgtgctgacgctgaaaggcttgaccccaactggcatgctccccagcggagtactttctggagggaagcaaaccctgcaaagcgctactgttgaggctattgaggctgatgaagctatcaaaggattttcaccacaacataagatcactagcttcgaggaagccaagggcttagaccgaattaatgagaggatgccgcctcgcagagatgccatgccctctgacgccaaccttaactccatcaacaaggctctcacctcagagactaacggcacggacagcaatggcagtaatagcagcaatattcagtga

SEQ ID NO: 17549 - protein, 170 aa, Artificial Sequence
  derived and/or modified sequence
MGNEASYPLEMCSHFDADEIKRLGKRFKKLDLDNSGSLSVEEFMSLPELQQNPLVQRVIDIFDTDGNGEVDFKEFIEGVSQFSVKGDKEQKLRFAFRIYDMDKDGYISNGELFQVLKMMVGNNLKDTQLQQIVDKTIINADKDGDGRISFEEFCAVVGGLDIHKKMVVDV

SEQ ID NO: 17550 - DNA, 3023 bp, Artificial Sequence
  derived and/or modified sequence
tgccttgaggttgcgggtcagcgcgagccgctgcagtgagtccgtcacggctccggcgcgagcgcgaggctgcagcccccgagtttcccggccgtcttcgccccctctccccctcctttcttcttctctgcctctcctgcctctcgccgctgctcctcccgcgctctccggctctgaatctcgaccttaatttatttccccctaccctgcccgctccctcgcgtgcccaatcgcccggccggcgcgggccccgcggcgccgcctcccctcccccacgcgcgccccctccccgccggcgacccgagggccgcagctgggccgccgccgccgtttcctgcgagccagcctgagcgcaacacttctccgagccagcgagccagcgagccgccgacccgccgagcaaaatgggaaatgaggcaagttatcctttggaaatgtgctcacactttgatgcggatgaaattaaaaggctaggaaagagatttaagaagcttgatttggacaattctggttctttgagtgtggaagagttcatgtctctgcctgagttacaacagaatcctttagtacagcgagtaatagatatattcgacacagatgggaatggagaagtagactttaaagaattcattgagggcgtctctcagttcagtgtcaaaggagataaggagcagaaattgaggtttgctttccgtatctatgacatggataaagatggctatatttccaatggggaactcttccaggtattgaagatgatggtggggaacaatctgaaagatacacagttacagcaaattgtagacaaaaccataataaatgcagataaggatggagatggaagaatatcctttgaagaattctgtgctgttgtaggtggcctagatatccacaaaaagatggtggtagatgtgtgactcttatcagagagtaccacccaacacttttgctttcttctccatctctgaagatctgctcaagacgtccagcaatgctctctgtgtatttaaatggaagtatttttctctgtgaagccacattttccaacatgagcctcatgaagccaactaagtgttattgaactgtaattctctcaataactcagtgtagcactttaaagtctgaaggacagcaacatgaaaagagcatatcaatgtggtggagaaagggaaggggttggctttttaatttatttttcttcatcttttataacaagaaagtatctatatatacatatgtaaatatttatatatagatatatgtagctttctatatatgtagtaggttggctttaatttaatatacttgattcagaaacaaaacaatagagtacaaaagtgccaagcagaacataaaacatccttacttttatttcacacagttttatatatagatagaagactgtacaatttgagccgggtgttaggccagctattttccttttcctgtgctttctcctttgagagattgacaaagcatttgttaacgtcctattatttaccttaattacatttttgtaacaaaggagtctgtaactttatttatacttatgaatatatccagggactacttctcattgctgagcagcttttaatacacctctgcttgaggagaaagtctagttcattgctactgccaagagctagttcttgtgttcatatagtaactgcacagggcttatagctgcttcattctgctactttgtaactaggagccattgcatttattaaatgtccctcagtaacgttaagtgctagttgtgattttatacataaaggccagaagctgtctgaggcaatcatgattgattgtatgtatcacttactgaagaatacctgaagtgatcatgtaactacttataagggatatccatttgtttgattacatgggtaaataatttgtcattaaacttgtgtttgaatcatgaattcccttgtttcaaaagacttgcagctaatctaaaaaactggtgatatttaatatgcatgtatgtatctaaacacccacatatatttgtggtttaagtgtgagaaatcttgctaatctatatgccacagaagagcaaaattgtatccaaatttatgccacttaaatttctttaccacgagggatagagcatgcatactggtttttttttcttgatttgcccatataattggtaatggataacttaataaatttgtgtgatataaaagtagtgtatcatgttctactgtttgatcttatcccttcccatttctgcaaaggtactgttagctggaagaaaaacattttggttagctttgtatgacagtagtctttccctttatagtttctctataaaaactggttttaaaatcagtggaaaagggcaggttgaatcaaggtgaatcaatctgaaattgagcacacctgcctgccatcgctgttccttcaactgagtgctgcacatcatgggctctgtctgtgagagaaaaatcccggtgcttggtgtccttgcatgacatggagttttgcatgtagatcaatttaaaatgtacctcttgtttacataatttgcataattttaaaagataatgttgccaaactttggaaatgttaatgttcagactgaaaatctccactacatgtaactttcttcctctggatcagtggcatggcttataatcccagccagtggtttgaactgttccagtgtcaactgccatgtgctctgcttcaagggggaactagccttttgtgaattttttgtacataagtatttgttacaaatattttagcaaatgctttctatttctcttgcttgtgcatatcttggctggcgttacagaaaaatagtgtaaacattatttccttaccggggaatgagggttttttctttttctttttttttttttttttttttagtttgtgtgtgggggtgggtaagggaggggatggtttatgttgaatgtttagtttttcttctgcatgatacgtcatgttgtgggatctttagaaaacttcatactgtatgaataagaaaataaaatatttgaaacttg

SEQ ID NO: 17551 - DNA, 513 bp, Artificial Sequence
  derived and/or modified sequence
atgggcaacgaggcttcctatcctttggaaatgtgctctcactttgatgctgacgaaatcaaacggctgggcaaaaggttcaagaagctagatctggataattcaggatccctctcggtagaagagttcatgagtcttccggaactacagcagaaccctcttgttcaacgggtgattgacattttcgacaccgatggtaacggtgaagtagatttcaaggaattcatcgagggcgtgtctcagttcagtgtaaaaggggacaaagagcagaagcttcgatttgcattcaggatttacgatatggacaaggacggctatatctccaacggggagctgttccaggtgctgaaaatgatggtgggaaataacctgaaggatacacagctacagcagatagtcgacaaaaccattatcaacgccgacaaggacggcgacggaagaatatcttttgaagaattttgcgccgtggtgggcggtttagacattcataagaagatggtcgtcgatgtctag

SEQ ID NO: 17552 - DNA, 513 bp, Artificial Sequence
  derived and/or modified sequence
atgggcaacgaggccagctaccccctggagatgtgcagccacttcgacgccgacgagatcaagagactgggcaagagattcaagaagctggacctggacaacagcggcagcctgagcgtggaggagttcatgagcctgcccgagctgcagcagaaccccctggtgcagagagtgatcgacatcttcgacaccgacggcaacggcgaggtggacttcaaggagttcatcgagggcgtgagccagttcagcgtgaagggcgacaaggagcagaagctgagattcgccttcagaatctacgacatggacaaggacggctacatcagcaacggcgagctgttccaggtgctgaagatgatggtgggcaacaacctgaaggacacccagctgcagcagatcgtggacaagaccatcatcaacgccgacaaggacggcgacggcagaatcagcttcgaggagttctgcgccgtggtgggcggcctggacatccacaagaagatggtggtggacgtgtag

SEQ ID NO: 17553 - DNA, 513 bp, Artificial Sequence
  derived and/or modified sequence
atgggtaatgaagcctcctatcccctggagatgtgctcacacttcgacgccgatgaaatcaagcgcctgggtaagcggtttaagaagctggacctcgataattctgggtctctctcggtggaggaatttatgtcccttccggagttacagcagaacccactggttcagagagtgatcgatatatttgacactgacggaaacggagaggtggacttcaaggaattcatcgaaggcgtaagccagttctccgtgaagggcgacaaggagcagaagttacgcttcgcttttcgcatttatgatatggataaagatggatatattagtaacggcgaactgtttcaagttctgaagatgatggtcgggaataatctgaaggacactcaactacaacagatcgttgacaagactattatcaacgctgataaagacggagacggcagaatctcctttgaagagttctgtgcagtggttggtgggcttgacatacataagaagatggtggtcgatgtgtag

SEQ ID NO: 17554 - DNA, 513 bp, Artificial Sequence
  derived and/or modified sequence
atgggaaatgaggccagctaccccctggagatgtgcagccactttgatgctgatgagatcaagaggctgggcaagcgcttcaagaagctggacctggacaacagcggcagcctgtctgtggaggagttcatgagcctgcctgagctgcagcagaaccccctggtgcagagggtgattgacatctttgacacagatggaaatggagaggtggacttcaaggagttcatcgagggcgtgtcccagttctctgtgaagggggacaaggagcagaagctgcgctttgccttccgcatctatgacatggacaaggatggctacatcagcaatggagagctgttccaggtgctgaagatgatggtgggcaacaacctgaaggacacccagctgcagcagatcgtggacaagaccatcatcaatgctgacaaggatggagatggccgcatcagctttgaggagttctgtgctgtggtgggcggcctggacatccacaagaagatggtggtggatgtgtag

SEQ ID NO: 17555 - DNA, 513 bp, Artificial Sequence
  derived and/or modified sequence
atgggcaacgaggccagctaccccctggagatgtgcagccacttcgacgccgacgagataaaacgcctgggaaaaaggtttaaaaagctcgatttggacaactccgggtcgctgagcgtggaggagttcatgtctctgccagaactccagcaaaatccccttgtgcaacgtgtgatcgatattttcgatacagatggcaacggagaggttgattttaaagaattcatcgagggtgtttctcagttcagcgtcaaaggcgataaggagcagaagcttaggtttgcattccgcatctatgatatggataaggacggttacatttcaaatggggaattgtttcaggtgcttaagatgatggttggcaacaatctgaaggacacacagctccagcagatcgtcgataaaaccattattaacgccgacaaagatggcgacggtcgtatatcctttgaggagttttgtgccgtagtagggggcttggatattcataaaaagatggttgtagacgtttag

SEQ ID NO: 17556 - protein, 420 aa, Artificial Sequence
  derived and/or modified sequence
METFDPTELPELLKLYYRRLFPYSQYYRWLNYGGVIKNYFQHREFSFTLKDDIYIRYQSFNNQSDLEKEMQKMNPYKIDIGAVYSHRPNQHNTVKLGAFQAQEKELVFDIDMTDYDDVRRCCSSADICPKCWTLMTMAIRIIDRALKEDFGFKHRLWVYSGRRGVHCWVCDESVRKLSSAVRSGIVEYLSLVKGGQDVKKKVHLSEKIHPFIRKSINIIKKYFEEYALVNQDILENKESWDKILALVPETIHDELQQSFQKSHNSLQRWEHLKKVASRYQNNIKNDKYGPWLEWEIMLQYCFPRLDINVSKGINHLLKSPFSVHPKTGRISVPIDLQKVDQFDPFTVPTISFICRELDAISTNEEEKEENEAESDVKHRTRDYKKTSLAPYVKVFEHFLENLDKSRKGELLKKSDLQKDF

SEQ ID NO: 17557 - protein, 427 aa, Artificial Sequence
  derived and/or modified sequence
METFDPTELPELLKLYYRRLFPYSQYYRWLNYGGVIKNYFQHREFSFTLKDDIYIRYQSFNNQSDLEKEMQKMNPYKIDIGAVYSHRPNQHNTVKLGAFQAQEKELVFDIDMTDYDDVRRCCSSADICPKCWTLMTMAIRIIDRALKGKDFGFKHRLWVYSGRRGVHCWVCDESVRKLSSAVRSGIVEYLSLVKGGQDVKKKVHLSEKIHPFIRKSINIIKKYFEEYALVNQDILENKESWDKILALMGLFLNDPSPIHDELQQSFQKSHNSLQRWEHLKKVASRYQNNIKNDKYGPWLEWEIMLQYCFPRLDINVSKGINHLLKSPFSVHPKTGRISVPIDLQKVDQFDPFTVPTISFICRELDAISTNEEEKEENEAESDVKHRTRDYKKTSLAPYVKVFEHFLENLDKSRKGELLKKSDLQKDF

SEQ ID NO: 17558 - DNA, 1263 bp, Artificial Sequence
  derived and/or modified sequence
atggaaactttcgatccaaccgagctgccagagctacttaagctgtactaccggaggttgtttccctattcacagtactatagatggttaaactacgggggggtcattaagaactattttcagcacagagaattcagcttcaccctcaaggatgacatctatatccggtaccagtcgtttaacaatcagagtgacctagaaaaggagatgcagaaaatgaacccttacaaaattgatatcggagcagtctatagtcaccgcccgaaccagcataacacggtgaaactgggtgcctttcaggctcaggaaaaggaactcgttttcgatatcgacatgacagactacgacgacgttcgccgctgttgctccagtgctgatatctgtccgaagtgttggacacttatgacgatggctatacgcattatcgatagagcattgaaagaagattttggctttaagcacagactgtgggtgtactcagggcgaagaggcgtgcactgctgggtgtgcgatgaatctgtgagaaaactgtcatctgctgtccggtccggcattgtcgaatacctctcactggtgaagggtggccaggatgttaagaagaaggtgcacctgagcgaaaaaatccacccattcattaggaagagtatcaacattattaagaaatactttgaagagtacgccttggtcaatcaagatatcctcgaaaataaggaatcgtgggacaagatcctcgctctggtgccagagacgattcatgatgagctgcagcagtcctttcagaagtcgcacaattccctacagagatgggagcacctgaagaaggtcgcttcgagatatcagaataatattaaaaacgacaagtacggcccgtggttggagtgggagataatgctccagtattgctttcctcgcctagacattaatgtaagtaagggcattaatcatcttctgaagagcccattcagcgtgcatccaaagactggacgaatctccgtgcccatcgacctgcaaaaagtggaccaatttgacccatttactgtgcctacaattagcttcatttgtcgcgagctcgatgcgatatcgaccaacgaagaggaaaaagaggaaaacgaagcagagtctgacgtgaagcaccggacaagggactataaaaaaactagcctagctccttatgtcaaagtgtttgaacactttctggagaacctcgacaagtcaaggaagggagaacttctcaaaaagtctgaccttcagaaggatttttag

SEQ ID NO: 17559 - DNA, 1284 bp, Artificial Sequence
  derived and/or modified sequence
atggagacattcgacccaaccgaattaccggagctcctcaagctgtattatagacggctgttcccatattcacagtattacagatggctgaactacggtggtgttataaagaactatttccagcacagggagttctcctttactctgaaagacgacatctatataagataccagtcgtttaacaatcagagcgacctggagaaggagatgcagaaaatgaatccctacaaaatcgatatcggcgcggtctactcccacaggcctaatcagcacaatactgtcaaattgggagcctttcaggcccaggagaaggaactggtattcgatatcgatatgactgactatgacgatgtccggcgctgttgttcctccgccgatatctgcccaaaatgttggaccttgatgacaatggccattcgcattatcgatcgcgctctcaagggcaaagacttcggatttaagcacagattatgggtgtatagcgggcggcgcggggtgcactgctgggtctgtgatgaatcggtgagaaagctctcatcagctgtgaggagcggtatcgtcgagtacctatctctggtgaaaggcggccaggatgttaaaaaaaaggtacacttgtccgaaaagattcacccattcataaggaaaagtattaatatcatcaagaaatatttcgaggagtacgccctggttaatcaggatatacttgaaaacaaggaaagttgggacaagatcttagccctgatgggtttgttcctaaacgatccaagccccattcacgatgagcttcagcagtcattccaaaaatcccacaacagcttacagaggtgggaacatttaaagaaggtggcttcccgatatcaaaataatatcaagaacgataaatacgggccttggcttgagtgggaaatcatgctgcagtactgttttccacggttagatattaacgtgagtaaaggcatcaatcacctgttaaagagccctttctctgtgcatcccaaaaccggtcgcatttcagtaccaatcgatttgcagaaggtggatcagttcgaccccttcactgtgcccacaatctcctttatctgccgggagctcgatgccattagtaccaatgaggaggaaaaagaagagaacgaggcggaaagcgatgtgaagcatcggacacgggattacaagaagacctcccttgcaccttatgtgaaagtgtttgaacactttctcgagaacctggataagtcgcggaagggcgaactcctgaagaaaagcgacctccaaaaggacttttag

SEQ ID NO: 17560 - DNA, 1263 bp, Artificial Sequence
  derived and/or modified sequence
atggagacctttgaccccacagagctgcctgagctgctgaagctgtactaccgccgcctcttcccctacagccagtactaccgctggctgaactacggcggcgtcatcaagaactacttccagcaccgggagttctccttcaccctgaaggatgacatctacatccgctaccagagcttcaacaaccagagcgacctggagaaggagatgcagaagatgaacccctacaagattgacatcggggctgtgtacagccaccggcccaaccagcacaacacagtgaagctgggcgccttccaggcccaggagaaggagctggtgtttgacatcgacatgacagattatgatgatgtgcggcgctgctgcagcagcgctgacatctgccccaagtgctggaccctgatgaccatggccatccgcatcatcgaccgggccctgaaggaggactttggcttcaagcaccggctgtgggtgtacagcggccggcggggcgtgcactgctgggtgtgtgatgaatctgtgaggaagctgagcagcgctgtgcgctctggaattgtggagtacctgagcctggtgaagggcggccaggatgtgaagaagaaggtgcacctgtctgagaagatccaccccttcatcaggaagagcatcaacatcatcaagaagtactttgaggagtatgccctggtgaaccaggacatcctggagaacaaggagagctgggacaagatcctggccctggtgcctgagaccatccatgatgagctgcagcagagcttccagaagagccacaacagcctgcagcgctgggagcacctgaagaaggtggccagccgctaccagaacaacatcaagaatgacaagtatggcccctggctggagtgggagatcatgctgcagtactgcttcccccggctggacatcaacgtgtccaagggcatcaaccacctgctgaagagccccttctctgtgcaccccaagacaggccgcatctctgtgcccatcgacctgcagaaggtggaccagtttgaccccttcaccgtgcccaccatctccttcatctgccgggagctggatgccatcagcaccaatgaggaggagaaggaggagaatgaggccgagagtgatgtgaagcacaggacccgggactacaagaagaccagcctggccccctacgtgaaggtgtttgagcacttcctggagaacctggacaagagcaggaaaggagagctgctgaagaagagtgacctgcagaaggacttctag

SEQ ID NO: 17561 - DNA, 1284 bp, Artificial Sequence
  derived and/or modified sequence
atggagacctttgaccccacagagctgcctgagctgctgaagctgtactaccgccgcctcttcccctacagccagtactaccgctggctgaactacggcggcgtcatcaagaactacttccagcaccgggagttctccttcaccctgaaggatgacatctacatccgctaccagagcttcaacaaccagagcgacctggagaaggagatgcagaagatgaacccctacaagattgacatcggggctgtgtacagccaccggcccaaccagcacaacacagtgaagctgggcgccttccaggcccaggagaaggagctggtgtttgacatcgacatgacagattatgatgatgtgcggcgctgctgcagcagcgctgacatctgccccaagtgctggaccctgatgaccatggccatccgcatcatcgaccgggccctgaagggcaaggactttggcttcaagcaccggctgtgggtgtacagcggcagaagaggagtgcactgctgggtgtgtgatgagagcgtgaggaagctgagcagcgctgtgcgcagcggcatcgtggagtacctgagcctggtgaagggcggccaggatgtgaagaagaaggtgcacctgtctgagaagatccaccccttcatcaggaagagcatcaacatcatcaagaagtactttgaggagtatgccctggtgaaccaggacatcctggagaacaaggagagctgggacaagatcctggccctgatgggcctcttcctgaatgaccccagccccatccatgatgagctgcagcagagcttccagaagagccacaacagcctgcagcgctgggagcacctgaagaaggtggccagccgctaccagaacaacatcaagaatgacaagtatggcccctggctggagtgggagatcatgctgcagtactgcttcccccggctggacatcaacgtgtccaagggcatcaaccacctgctgaagagccccttctctgtgcaccccaagacaggccgcatctctgtgcccatcgacctgcagaaggtggaccagtttgaccccttcaccgtgcccaccatctccttcatctgccgggagctggatgccatcagcaccaatgaggaggagaaggaggagaatgaagctgagagtgatgtgaagcacaggacccgggactacaagaagaccagcctggccccctacgtgaaggtgtttgagcacttcctggagaacctggacaagagcaggaagggggagctgctgaagaagagtgacctgcagaaggacttctag

SEQ ID NO: 17562 - DNA, 1263 bp, Artificial Sequence
  derived and/or modified sequence
atggagaccttcgaccccaccgagctgcccgagctgctgaagctgtactaccggcggctgttcccttactcacagtattacagatggctgaattacggaggcgtaatcaaaaactacttccaacatagggaattctcctttacactcaaggatgacatttacatacggtaccagtcctttaataaccagagcgacctggagaaggaaatgcagaaaatgaacccctacaaaatcgacataggggctgtgtattctcacagacccaaccagcacaataccgtaaaattgggcgcctttcaggcacaggaaaaggaactggttttcgatattgacatgacagactatgacgacgtaaggaggtgttgctcgagcgctgacatatgcccaaagtgctggacgttaatgacgatggcaatccgcatcattgaccgggccttgaaggaggatttcgggtttaagcatcggctgtgggtctacagcgggaggagaggagtacattgctgggtctgcgacgagtccgttagaaaactgagcagtgctgtcaggtccggaatagttgagtacttgtctttggtgaagggcggacaggatgtgaagaagaaggtgcacctgtcggagaagatccacccatttatcagaaagtcaataaacataataaagaagtactttgaggaatacgccttggtgaaccaggatattttggaaaacaaggaatcctgggataagattctggcgctggtcccagagactatccacgatgagctccagcagagttttcagaaaagccacaactcgttgcagcggtgggaacatcttaaaaaggtcgcatcccggtaccaaaacaacatcaagaacgacaagtatgggccctggctggagtgggaaattatgctgcagtactgtttccctaggctcgatatcaatgtctcgaaaggcattaaccatctgctgaagagccccttttctgtgcaccccaaaactggacgcatctcagtgcccatcgatttgcagaaagtggatcaattcgacccatttacagttccaaccatcagcttcatatgtcgggaactcgacgcaatttctacaaatgaggaggagaaagaggagaatgaagcggagtccgacgtgaagcatcgcaccagagactataagaagaccagccttgcaccttatgtgaaagttttcgaacactttttggagaatctggataaaagtaggaagggcgagcttttgaagaaatcagacttgcagaaggacttctag

SEQ ID NO: 17563 - DNA, 1284 bp, Artificial Sequence
  derived and/or modified sequence
atggagaccttcgaccccaccgagctgcccgagctgctgaagctgtactaccgtcgtctgtttccttactcccaatactatagatggctgaactatggtggggtgattaaaaactattttcaacaccgcgaatttagcttcacgttaaaggacgacatctatattaggtatcagtctttcaataatcaatctgacttagagaaggagatgcaaaagatgaacccctataagattgatattggcgcagtgtatagtcaccgacccaaccagcataatactgttaaactcggcgcttttcaggcgcaggagaaggagctcgtgtttgatatcgatatgactgattacgacgacgtcagaagatgctgtagcagcgctgatatttgtcctaagtgctggaccttgatgaccatggctataaggataatcgatcgtgctttgaaaggcaaagattttggcttcaaacatcgcttgtgggtctattcaggtagacgcggagtccactgctgggtatgtgacgagagtgtccggaagcttagcagtgcagttagaagcgggattgtggaatacttgtctctcgttaaaggaggacaggacgtgaaaaagaaagtgcacctgtcagagaaaatccacccctttattaggaagagcattaacatcattaaaaagtatttcgaggaatatgccttagtcaaccaggacattctcgagaataaagagtcatgggacaaaatcttagcactgatggggctgttcctaaacgacccatctcctatccatgacgagctccagcagagtttccagaaatctcataacagtctgcagcggtgggagcacctgaagaaggtggcatctaggtatcagaacaatatcaaaaacgataaatatgggccatggttggagtgggaaatcatgcttcaatattgttttccgagactcgatatcaatgtgtcaaaggggatcaatcacctgctgaagagccctttttcagtgcaccctaagacaggacgaatctccgtgccaatcgacctccagaaggtagatcaattcgacccttttaccgtgcccacaatatcatttatttgcagagagttggatgctataagtacgaacgaggaagagaaggaggaaaatgaggctgaatctgatgtgaagcacagaacccgggactacaagaagacttcgctggctccgtacgtgaaggtctttgaacatttcctggagaatttagataagagtcggaaaggggaactgctaaagaagagcgacctccagaaggatttctag

SEQ ID NO: 17564 - DNA, 1393 bp, Artificial Sequence
  derived and/or modified sequence
cctgtggtaatccttaccgtggcgagttccgcgctcaatggagacgtttgaccccaccgagctgcccgagctgcttaaactttattaccggaggctctttccctactctcagtactatcgctggctcaactacggtggagtgataaagaattactttcaacaccgtgaattttcattcacattgaaagatgatatttacattcgctaccaatccttcaacaaccagagtgatctggaaaaggagatgcagaaaatgaatccatacaagattgatataggcgcagtatattctcacagacccaatcaacacaatacagtgaagctgggagctttccaggctcaggaaaaagaactggtatttgacattgacatgacagactatgacgatgtgaggagatgttgtagttctgcagacatatgtcctaagtgctggaccctcatgacaatggccatacgcatcattgacagagcattgaaggaggactttggatttaagcatcgtctctgggtatattctggaaggagaggtgttcattgttgggtctgtgatgaatcagttagaaaactgtcttctgcagtacgttctgggatagttgagtatttgagccttgtaaagggtggtcaagacgttaaaaagaaagttcacctaagtgaaaaaattcacccttttatcagaaaatctataaacataataaaaaaatactttgaagaatatgccttggttaatcaagatattctcgaaaataaagaaagctgggataagattttagcccttgttcctgaaacaattcatgatgaacttcaacaaagcttccaaaagtctcacaattcacttcagcgttgggagcacttgaagaaagtagccagcagatatcagaataacatcaaaaatgacaaatatggaccctggctggagtgggagattatgctccagtactgttttccacggctggatatcaatgtcagcaaaggaatcaatcatctactgaagagcccttttagtgttcatcctaaaacaggtcgcatatctgtgcctattgatttgcagaaagtggaccagtttgatccatttactgttccgaccataagcttcatctgccgtgaattggatgccatttccactaatgaagaggaaaaagaggagaatgaagctgaatctgatgtcaaacatagaaccagagattataagaagaccagtctagcaccttatgtgaaagtttttgaacattttcttgaaaatctggataaatcccgaaaaggagaacttcttaagaagagtgatttacaaaaagatttctgaagacagagctcctcaaaccattgtggatatcttctgccttcaaccacagatcaaatacttcaagagccatttaataaatatggcagaactata

SEQ ID NO: 17565 - DNA, 1475 bp, Artificial Sequence
  derived and/or modified sequence
ccgccggccgtgctgttcccgccaattcctgtggtaatccttaccgtggcgagttccgcgctcaatggagacgtttgaccccaccgagctgcccgagctgcttaaactttattaccggaggctctttccctactctcagtactatcgctggctcaactacggtggagtgataaagaattactttcaacaccgtgaattttcattcacattgaaagatgatatttacattcgctaccaatccttcaacaaccagagtgatctggaaaaggagatgcagaaaatgaatccatacaagattgatataggcgcagtatattctcacagacccaatcaacacaatacagtgaagctgggagctttccaggctcaggaaaaagaactggtatttgacattgacatgacagactatgacgatgtgaggagatgttgtagttctgcagacatatgtcctaagtgctggaccctcatgacaatggccatacgcatcattgacagagcattgaagggcaaagactttggatttaagcatcgtctctgggtatattctggaaggagaggtgttcattgttgggtctgtgatgaatcagttagaaaactgtcttctgcagtacgttctgggatagttgagtatttgagccttgtaaagggtggtcaagacgttaaaaagaaagttcacctaagtgaaaaaattcacccttttatcagaaaatctataaacataataaaaaaatactttgaagaatatgccttggttaatcaagatattctcgaaaataaagaaagctgggataagattttagcccttatgggtctgttccttaatgacccatcaccaattcatgatgaacttcaacaaagcttccaaaagtctcacaattcacttcagcgttgggagcacttgaagaaagtagccagcagatatcagaataacatcaaaaatgacaaatatggaccctggctggagtgggagattatgctccagtactgttttccacggctggatatcaatgtcagcaaaggaatcaatcatctactgaagagcccttttagtgttcatcctaaaacaggtcgcatatctgtgcctattgatttgcagaaagtggaccagtttgatccatttactgttccgaccataagcttcatctgccgtgaattggatgccatttccactaatgaagaggaaaaagaggagaatgaagctgaatctgatgtcaaacatagaaccagagattataagaagaccagtctagcaccttatgtgaaagtttttgaacattttcttgaaaatctggataaatcccgaaaaggagaacttcttaagaagagtgatttacaaaaagatttctgaagacagagctcctcaaaccattgtggatatcttctgccttcaaccacagatcaaatacttcaagagccatttaataaatatggcagaactatatatgtgtcttaaacctcaaagtaaattttccttg

SEQ ID NO: 17566 - DNA, 1263 bp, Artificial Sequence
  derived and/or modified sequence
atggaaacttttgatcccactgaattgcccgaactcctgaaactttactaccgccgtctcttcccctacagtcagtattaccgctggttaaactacggcggagtgatcaagaactattttcagcacagagagttctcattcaccctgaaagatgatatctacatcagatatcaaagctttaataaccagtctgacctggagaaagagatgcagaaaatgaatccatacaaaattgacatcggcgctgtgtacagccatcggcctaatcagcacaatactgtgaagctgggagcctttcaggcacaggaaaaggagctcgtctttgatatcgacatgactgactacgatgacgtgcggagatgttgctctagcgccgacatctgcccaaagtgttggaccctcatgaccatggccataagaattattgacagggcccttaaagaagacttcggcttcaagcatagattatgggtctattccggtagacggggagtgcattgttgggtctgtgatgaatctgttagaaagttgtcctcagctgtgcgctctggtattgtggagtacttgtccctggtcaagggaggacaggacgtgaaaaagaaagtgcatctgtcagagaaaattcaccctttcatcagaaagagcataaacattattaaaaaatactttgaggagtatgcactcgttaaccaagatattctggaaaataaggaaagctgggacaaaatcctggctctggttcccgagacaattcacgatgagctgcaacagtcattccagaaaagccacaattcactgcagaggtgggagcatctaaaaaaggtcgcctcccgttaccagaataatatcaagaatgacaagtacggcccttggctcgagtgggaaatcatgctgcagtactgttttcccaggctagatattaatgttagtaaaggcattaaccatctgcttaaaagcccattcagcgttcaccccaagaccggacgtatcagtgtgcctattgatttgcagaaagttgaccaattcgacccatttaccgtccctaccatatcatttatttgccgcgagctggatgcaatctccacgaatgaggaagaaaaggaggaaaacgaggccgagagcgatgtgaaacaccgcactcgggactacaagaaaacttctctggccccttacgtgaaggtgttcgagcactttctcgagaatctggataaaagccgtaagggagagttgcttaagaaaagcgatctgcagaaggacttctag

SEQ ID NO: 17567 - DNA, 1284 bp, Artificial Sequence
  derived and/or modified sequence
atggagacattcgatccaaccgagttgccggagctgctgaaactttattatcgccgtctgtttccatacagccagtattaccgctggctgaactacggcggagtgatcaagaactattttcaacatcgagagtttagtttcactctcaaggacgatatctacatcaggtaccaaagctttaacaatcaaagtgatctggagaaggaaatgcagaaaatgaatccatataaaatcgacatcggagccgtgtatagtcaccggccaaaccagcataataccgttaagctgggtgcttttcaggcacaagagaaagaattagtctttgacatcgacatgaccgattacgatgatgtgcgtcggtgttgctcgtcagcagacatctgccccaagtgctggacattgatgaccatggcgattcggataattgacagagccctcaaaggaaaggattttggcttcaagcatcgtctttgggtctatagtgggaggcgcggtgtgcactgttgggtctgtgacgagtcggttaggaaactgagttcagccgtaagatctggcatagtcgagtatttgtctttagtcaaggggggacaggacgtaaaaaagaaggtgcacctatcagaaaagatccacccatttattcgaaaatctatcaatataatcaagaagtatttcgaagagtacgcacttgtaaatcaggatatcctcgaaaacaaagagtcttgggataaaatcttggctcttatgggattattcctgaatgatccttccccaattcacgatgagctacagcagtccttccagaaaagccacaattctcttcagcgttgggagcacctgaagaaggtcgcttctagatatcaaaacaatatcaagaacgataaatacggcccttggctcgagtgggagataatgttgcagtactgcttcccaagactggatatcaatgtctcaaagggaattaaccacctactcaaatctccgttctctgtccatcctaagactggtaggatatccgtgccaatcgacctgcagaaagtagatcagtttgatccctttacagtgccgaccattagcttcatctgccgcgagctggatgccatctctactaatgaagaggagaaagaggaaaacgaagccgaatctgatgttaagcacagaaccagagattacaagaaaaccagtctggccccatatgtaaaagtgttcgagcatttcctggagaacctcgacaagtcccgcaagggggaacttctcaaaaagtcagacctgcagaaggacttttag

SEQ ID NO: 17568 - DNA, 1263 bp, Artificial Sequence
  derived and/or modified sequence
atggagaccttcgaccccaccgagctgcccgagctgctgaagctgtactacagaagactgttcccctacagccagtactacagatggctgaactacggcggcgtgatcaagaactacttccagcacagagagttcagcttcaccctgaaggacgacatctacatcagataccagagcttcaacaaccagagcgacctggagaaggagatgcagaagatgaacccctacaagatcgacatcggcgccgtgtacagccacagacccaaccagcacaacaccgtgaagctgggcgccttccaggcccaggagaaggagctggtgttcgacatcgacatgaccgactacgacgacgtgagaagatgctgcagcagcgccgacatctgccccaagtgctggaccctgatgaccatggccatcagaatcatcgacagagccctgaaggaggacttcggcttcaagcacagactgtgggtgtacagcggcagaagaggcgtgcactgctgggtgtgcgacgagagcgtgagaaagctgagcagcgccgtgagaagcggcatcgtggagtacctgagcctggtgaagggcggccaggacgtgaagaagaaggtgcacctgagcgagaagatccaccccttcatcagaaagagcatcaacatcatcaagaagtacttcgaggagtacgccctggtgaaccaggacatcctggagaacaaggagagctgggacaagatcctggccctggtgcccgagaccatccacgacgagctgcagcagagcttccagaagagccacaacagcctgcagagatgggagcacctgaagaaggtggccagcagataccagaacaacatcaagaacgacaagtacggcccctggctggagtgggagatcatgctgcagtactgcttccccagactggacatcaacgtgagcaagggcatcaaccacctgctgaagagccccttcagcgtgcaccccaagaccggcagaatcagcgtgcccatcgacctgcagaaggtggaccagttcgaccccttcaccgtgcccaccatcagcttcatctgcagagagctggacgccatcagcaccaacgaggaggagaaggaggagaacgaggccgagagcgacgtgaagcacagaaccagagactacaagaagaccagcctggccccctacgtgaaggtgttcgagcacttcctggagaacctggacaagagcagaaagggcgagctgctgaagaagagcgacctgcagaaggacttctag

SEQ ID NO: 17569 - DNA, 1284 bp, Artificial Sequence
  derived and/or modified sequence
atggagaccttcgaccccaccgagctgcccgagctgctgaagctgtactacagaagactgttcccctacagccagtactacagatggctgaactacggcggcgtgatcaagaactacttccagcacagagagttcagcttcaccctgaaggacgacatctacatcagataccagagcttcaacaaccagagcgacctggagaaggagatgcagaagatgaacccctacaagatcgacatcggcgccgtgtacagccacagacccaaccagcacaacaccgtgaagctgggcgccttccaggcccaggagaaggagctggtgttcgacatcgacatgaccgactacgacgacgtgagaagatgctgcagcagcgccgacatctgccccaagtgctggaccctgatgaccatggccatcagaatcatcgacagagccctgaagggcaaggacttcggcttcaagcacagactgtgggtgtacagcggcagaagaggcgtgcactgctgggtgtgcgacgagagcgtgagaaagctgagcagcgccgtgagaagcggcatcgtggagtacctgagcctggtgaagggcggccaggacgtgaagaagaaggtgcacctgagcgagaagatccaccccttcatcagaaagagcatcaacatcatcaagaagtacttcgaggagtacgccctggtgaaccaggacatcctggagaacaaggagagctgggacaagatcctggccctgatgggcctgttcctgaacgaccccagccccatccacgacgagctgcagcagagcttccagaagagccacaacagcctgcagagatgggagcacctgaagaaggtggccagcagataccagaacaacatcaagaacgacaagtacggcccctggctggagtgggagatcatgctgcagtactgcttccccagactggacatcaacgtgagcaagggcatcaaccacctgctgaagagccccttcagcgtgcaccccaagaccggcagaatcagcgtgcccatcgacctgcagaaggtggaccagttcgaccccttcaccgtgcccaccatcagcttcatctgcagagagctggacgccatcagcaccaacgaggaggagaaggaggagaacgaggccgagagcgacgtgaagcacagaaccagagactacaagaagaccagcctggccccctacgtgaaggtgttcgagcacttcctggagaacctggacaagagcagaaagggcgagctgctgaagaagagcgacctgcagaaggacttctag

SEQ ID NO: 17570 - protein, 21 aa, Artificial Sequence
  derived and/or modified sequence
MKGSLLLLLVSNLLLCQSVAP

SEQ ID NO: 17571 - protein, 227 aa, Artificial Sequence
  derived and/or modified sequence
MNIKGSPWKGSLLLLLVSNLLLCQSVAPLPICPGGAARCQVTLRDLFDRAVVLSHYIHNLSSEMFSEFDKRYTHGRGFITKAINSCHTSSLATPEDKEQAQQMNQKDFLSLIVSILRSWNEPLYHLVTEVRGMQEAPEAILSKAVEIEEQTKRLLEGMELIVSQVHPETKENEIYPVWSGLPSLQMADEESRLSAYYNLLHCLRRDSHKIDNYLKLLKCRIIHNNNC

SEQ ID NO: 17572 - protein, 196 aa, Artificial Sequence
  derived and/or modified sequence
MNIKGSPWKGSLLLLLVSNLLLSHYIHNLSSEMFSEFDKRYTHGRGFITKAINSCHTSSLATPEDKEQAQQMNQKDFLSLIVSILRSWNEPLYHLVTEVRGMQEAPEAILSKAVEIEEQTKRLLEGMELIVSQVHPETKENEIYPVWSGLPSLQMADEESRLSAYYNLLHCLRRDSHKIDNYLKLLKCRIIHNNNC

SEQ ID NO: 17573 - DNA, 684 bp, Artificial Sequence
  derived and/or modified sequence
atgaatattaagggcagcccatggaaggggagcttgttgctgcttctcgtttctaacctgctcctgtgtcaaagcgtagccccactgcccatttgcccaggaggtgccgccaggtgtcaggtgacactgcgcgacctgttcgatagagctgtggtcctgagccactacatccataatctcagctctgagatgttcagcgagtttgataagcggtacacccacgggcgggggttcatcacaaaggcaattaacagctgccatactagctcactcgcaactcctgaggacaaggagcaagcccaacagatgaatcaaaaagatttcttgtcgctgattgtctcaatactgaggtcctggaacgagccattgtaccacctggtgactgaggtgcgggggatgcaggaagcaccagaagccattttgtctaaggctgttgagattgaagagcagaccaaaagactgctggagggaatggagcttatcgtcagccaggtccatcctgagaccaaggagaatgagatctaccccgtgtggtccggactgccaagcctgcagatggccgacgaagaatcgcgtctgagtgcatactacaatcttcttcattgcctgagacgagatagccacaagatagataattaccttaagctgctgaaatgccgcattatccacaacaacaattgctag

SEQ ID NO: 17574 - DNA, 591 bp, Artificial Sequence
  derived and/or modified sequence
atgaatatcaaaggatctccctggaagggatcactgctccttctgctggtatctaacctgctattaagccactatatccataatttgtcttccgagatgttctccgagttcgataagcgatatacccacggtagggggtttatcacgaaagcgataaattcatgccacacatcaagcctcgccacgcctgaggataaggagcaggcccaacaaatgaatcagaaggatttcctgagtttgattgtctccattcttagatcctggaacgaaccactgtaccacctggtcacagaagtgcgtgggatgcaagaggctcccgaggctattctttccaaggccgtggagattgaggagcagaccaagcggcttcttgaaggtatggagctaattgtgagccaggttcaccccgagactaaggaaaacgaaatttatcctgtttggagcggcctgcccagcctccaaatggcggatgaagagagccgactgtcagcgtactataatctgctgcattgccttcgacgagattcccacaagattgacaattatctgaagctgttgaaatgtcgaatcattcataataataattgttag

SEQ ID NO: 17575 - DNA, 684 bp, Artificial Sequence
  derived and/or modified sequence
atgaacatcaagggcagcccctggaagggcagcctgctgctgctgctggtgagcaacctgctgctgtgccagagcgtggcccccctgcccatctgccctggaggagctgcccgctgccaggtgaccctgcgggacctgtttgacagagctgtggtgctgagccactacatccacaacctgagcagcgagatgttcagcgagtttgacaagcgctacacccacggccggggcttcatcaccaaggccatcaacagctgccacaccagcagcctggccaccccagaggacaaggagcaggcccagcagatgaaccagaaggacttcctgagcctcatcgtgtccatcctgcgctcctggaatgagcccctgtaccacctggtgacagaggtgcggggcatgcaggaggcccctgaggccatcctgagcaaggctgtggagattgaggagcagaccaagaggctgctggagggcatggagctgattgtgtcccaggtgcaccctgagaccaaggaaaatgagatctaccctgtgtggagcggcctgcccagcctgcagatggctgatgaggagagccggctgagcgcctactacaacctgctgcactgcctgcggcgggacagccacaagattgacaactacctgaagctgctgaagtgccgcatcatccacaacaacaactgctag

SEQ ID NO: 17576 - DNA, 591 bp, Artificial Sequence
  derived and/or modified sequence
atgaacatcaagggcagcccctggaagggcagcctgctgctgctgctggtgagcaacctgctgctgagccactacatccacaacctgagcagcgagatgttttctgaatttgacaagcgctacacccacggccggggcttcatcaccaaggccatcaacagctgccacaccagcagcctggccaccccagaggacaaggagcaggcccagcagatgaaccagaaggacttcctgagcctgattgtgtccatcctgcgctcctggaatgagcccctgtaccacctggtgacagaggtgcggggcatgcaggaggcccctgaggccatcctgagcaaggctgtggagattgaggagcagaccaagaggctgctggagggcatggagctgattgtgtcccaggtgcaccctgagaccaaggaaaatgagatctaccctgtgtggagcggcctgcccagcctgcagatggctgatgaggagagccggctgagcgcctactacaacctgctgcactgcctgcggcgggacagccacaagattgacaactacctgaagctgctgaagtgccgcatcatccacaacaacaactgctag

SEQ ID NO: 17577 - DNA, 684 bp, Artificial Sequence
  derived and/or modified sequence
atgaacatcaagggcagcccctggaagggcagcctgctgctgctgttagtgtcaaaccttttgctatgtcagtccgttgcccccctgcccatatgtccgggaggcgccgcccggtgtcaggttactctgagagacctcttcgatagagccgtggtgttaagtcactatatccacaacctgtcctcggagatgttttctgaattcgataagagatatacccatggtcgcggattcatcactaaggccatcaattcgtgtcacacttcttcactagcgactccggaagacaaggagcaagctcagcagatgaatcaaaaagacttcttgagcctcatcgtgagcattctgagatcatggaacgagccactataccatctggtaacggaggtacgcgggatgcaggaagcccccgaggccattctgagtaaagcagtggaaatagaggaacagaccaaacgcttgttggagggcatggagttaatcgtatcccaggtccaccccgaaactaaggagaatgaaatctatcctgtgtggagcggactaccttcacttcagatggcagatgaggaatcacgcctgagtgcgtactataatttgctgcattgtctgcgacgggattcccataaaatcgacaactacctcaaactgctgaaatgccggattattcataacaacaactgctag

SEQ ID NO: 17578 - DNA, 591 bp, Artificial Sequence
  derived and/or modified sequence
atgaacatcaagggcagcccctggaagggcagcctgctgctgctgctggtgagcaaccttctcttaagccattatattcataatttgagcagcgagatgttctctgaattcgataaaaggtatacacatgggagggggtttattacgaaggcaatcaactcttgccacacatcaagccttgctacacccgaagataaggaacaggcccagcagatgaatcaaaaggattttctctcacttatcgtcagtatccttcgcagctggaatgagcctctctaccacctcgtgactgaggttagagggatgcaggaggcacccgaagccattttatctaaggctgtagaaatagaagaacagaccaagcggctcctcgagggtatggagctcatcgtgagccaggtgcaccctgagacaaaagagaacgagatctatccagtctggtccggcctgcccagcctgcagatggccgatgaggagtctcggttgagcgcatactataacctcctgcattgtttgagaagggacagtcataaaattgacaattaccttaagctcctaaagtgccgtatcattcataacaataactgttag

SEQ ID NO: 17579 - DNA, 684 bp, Artificial Sequence
  derived and/or modified sequence
atgaacataaaaggctcaccgtggaagggctcattactgctgctcctagtgtctaacttattattgtgtcagtccgtggcacctctgcctatctgtcctgggggagctgcacgatgtcaggtcaccctccgcgaccttttcgacagggccgttgttctcagtcactacatccacaacctgtcttccgagatgttttccgaatttgataaacgctacacccacgggcgtggattcattacaaaggctattaactcctgccatacctcttcgctggccacacctgaggataaagaacaggcccagcagatgaaccagaaagatttcctgtcactgatcgtgagcatattgcggagttggaacgagcccctgtaccaccttgtgactgaggttcggggtatgcaagaagctcctgaagccattttgtctaaagctgtcgagatcgaggaacagacaaaacgactgttggagggcatggagctaattgtctcccaggtccatcccgaaaccaaagaaaacgagatataccccgtctggagtggactcccatctctgcagatggctgacgaagaaagtcgactgtccgcctactacaacctcttgcactgtcttagacgcgatagccataagattgataattatctcaagctcctgaaatgccgtattatacataataacaattgctag

SEQ ID NO: 17580 - DNA, 591 bp, Artificial Sequence
  derived and/or modified sequence
atgaacatcaaaggttccccttggaaggggagcctgctcctgttactggtgagcaacctgctactgtcccactacattcacaatctgtctagcgaaatgttttccgagttcgataaaagatatacgcacggtaggggctttatcaccaaggccatcaacagttgccacaccagctcccttgccacacctgaagataaggaacaggcgcagcagatgaaccagaaagatttcctctctctgattgtgtctattctcaggagctggaatgaacccctgtatcacctcgtcacagaagtgcggggaatgcaagaagcccctgaagctattctcagcaaagctgtcgaaattgaagaacagaccaagcgtcttctggagggcatggagcttattgtcagccaggtgcatccagaaacgaaggagaacgaaatctatcccgtttggtcgggacttccctctctgcaaatggctgatgaagagagccggctgtcagcctactacaacctcttgcactgcttgcggagggactcgcacaagattgataattatctcaaactgctgaaatgccgaataattcacaataataactgctag

SEQ ID NO: 17581 - DNA, 1354 bp, Artificial Sequence
  derived and/or modified sequence
atccttattctatatctcttggtatttagtgtaaaaattttaaaatctttacctagcaatcttgaggaagaaacttgataactgataatacatgagattgttacctaagtgaaatataatcctatatattcaacaaactttagagaaataagataaattttaaagtaaatgacttctgtagttttatagatcctccaaaccaatctagtctcagatctcaccttcatcatttctctcatttccttttggcctaattaatcaaaatccttcctagaatgttcatttctggccagtatgtcttcctgaatatgaataagaaataaaataccatttgatgtttgaaattatgggggtaatctcaatgacggaaatagatgaccaggaaaagggaaacgaatgcctgattcattatattcatgaagatatcaaaggtttataaagccaatatctgggaaagagaaaaccgtgagacttccagatcttctctggtgaagtgtgtttcctgcaacgatcacgaacatgaacatcaaaggatcgccatggaaagggtccctcctgctgctgctggtgtcaaacctgctcctgtgccagagcgtggcccccttgcccatctgtcccggcggggctgcccgatgccaggtgacccttcgagacctgtttgaccgcgccgtcgtcctgtcccactacatccataacctctcctcagaaatgttcagcgaattcgataaacggtatacccatggccgggggttcattaccaaggccatcaacagctgccacacttcttcccttgccacccccgaagacaaggagcaagcccaacagatgaatcaaaaagactttctgagcctgatagtcagcatattgcgatcctggaatgagcctctgtatcatctggtcacggaagtacgtggtatgcaagaagccccggaggctatcctatccaaagctgtagagattgaggagcaaaccaaacggcttctagagggcatggagctgatagtcagccaggttcatcctgaaaccaaagaaaatgagatctaccctgtctggtcgggacttccatccctgcagatggctgatgaagagtctcgcctttctgcttattataacctgctccactgcctacgcagggattcacataaaatcgacaattatctcaagctcctgaagtgccgaatcatccacaacaacaactgctaagcccacatccatttcatctatttctgagaaggtccttaatgatccgttccattgcaagcttcttttagttgtatctcttttgaatccatgcttgggtgtaacaggtctcctcttaaaaaataaaaactgactccttagagacatcaaaatc

SEQ ID NO: 17582 - DNA, 591 bp, Artificial Sequence
  derived and/or modified sequence
atgaacatcaaaggatcgccatggaaagggtccctcctgctgctgctggtgtcaaacctgctcctgtcccactacatccataacctctcctcagaaatgttcagcgaattcgataaacggtatacccatggccgggggttcattaccaaggccatcaacagctgccacacttcttcccttgccacccccgaagacaaggagcaagcccaacagatgaatcaaaaagactttctgagcctgatagtcagcatattgcgatcctggaatgagcctctgtatcatctggtcacggaagtacgtggtatgcaagaagccccggaggctatcctatccaaagctgtagagattgaggagcaaaccaaacggcttctagagggcatggagctgatagtcagccaggttcatcctgaaaccaaagaaaatgagatctaccctgtctggtcgggacttccatccctgcagatggctgatgaagagtctcgcctttctgcttattataacctgctccactgcctacgcagggattcacataaaatcgacaattatctcaagctcctgaagtgccgaatcatccacaacaacaactgctaa

SEQ ID NO: 17583 - DNA, 684 bp, Artificial Sequence
  derived and/or modified sequence
atgaacatcaagggcagcccctggaagggcagcctgctgctgctgctggtgagcaacctgctgctgtgccagagcgtggcccccctgcccatctgccccggcggcgccgccagatgccaggtgaccctgagagacctgttcgacagagccgtggtgctgagccactacatccacaacctgagcagcgagatgttcagcgagttcgacaagagatacacccacggcagaggcttcatcaccaaggccatcaacagctgccacaccagcagcctggccacccccgaggacaaggagcaggcccagcagatgaaccagaaggacttcctgagcctgatcgtgagcatcctgagaagctggaacgagcccctgtaccacctggtgaccgaggtgagaggcatgcaggaggcccccgaggccatcctgagcaaggccgtggagatcgaggagcagaccaagagactgctggagggcatggagctgatcgtgagccaggtgcaccccgagaccaaggagaacgagatctaccccgtgtggagcggcctgcccagcctgcagatggccgacgaggagagcagactgagcgcctactacaacctgctgcactgcctgagaagagacagccacaagatcgacaactacctgaagctgctgaagtgcagaatcatccacaacaacaactgctag

SEQ ID NO: 17584 - DNA, 591 bp, Artificial Sequence
  derived and/or modified sequence
atgaacatcaagggcagcccctggaagggcagcctgctgctgctgctggtgagcaacctgctgctgagccactacatccacaacctgagcagcgagatgttcagcgagttcgacaagagatacacccacggcagaggcttcatcaccaaggccatcaacagctgccacaccagcagcctggccacccccgaggacaaggagcaggcccagcagatgaaccagaaggacttcctgagcctgatcgtgagcatcctgagaagctggaacgagcccctgtaccacctggtgaccgaggtgagaggcatgcaggaggcccccgaggccatcctgagcaaggccgtggagatcgaggagcagaccaagagactgctggagggcatggagctgatcgtgagccaggtgcaccccgagaccaaggagaacgagatctaccccgtgtggagcggcctgcccagcctgcagatggccgacgaggagagcagactgagcgcctactacaacctgctgcactgcctgagaagagacagccacaagatcgacaactacctgaagctgctgaagtgcagaatcatccacaacaacaactgctag

SEQ ID NO: 17585 - protein, 224 aa, Artificial Sequence
  derived and/or modified sequence
MATHHTLWMGLALLGVLGDLQAAPEAQVSVQPNFQQDKFLGRWFSAGLASNSSWLREKKAALSMCKSVVAPATDGGLNLTSTFLRKNQCETRTMLLQPAGSLGSYSYRSPREWGLHRPPGPSLGATLAGTTLGQPPAAEIHGVGDWGSTYSVSVVETDYDQYALLYSQGSKGPGEDFRMATLYSRTQTPRAELKEKFTAFCKAQGFTEDTIVFLPQTDKCMTEQ

SEQ ID NO: 17586 - protein, 160 aa, Artificial Sequence
  derived and/or modified sequence
MATHHTLWMGLALLGVLGDLQAAPEAQVSVQPNFQQDKFLGRWFSAGLASNSSWLREKKAALSMCKSVVAPATDGGLNLTSTFLRKNQCETRTMLLQPAGSLGSYSYRSPREWGLHRPPGPSLGATLAGTTLGQPPAAEIHGVGGDGCPTSVRGKGQAWA

SEQ ID NO: 17587 - protein, 190 aa, Artificial Sequence
  derived and/or modified sequence
MATHHTLWMGLALLGVLGDLQAAPEAQVSVQPNFQQDKFLGRWFSAGLASNSSWLREKKAALSMCKSVVAPATDGGLNLTSTFLRKNQCETRTMLLQPAGSLGSYSYRSPHWGSTYSVSVVETDYDQYALLYSQGSKGPGEDFRMATLYSRTQTPRAELKEKFTAFCKAQGFTEDTIVFLPQTDKCMTEQ

SEQ ID NO: 17588 - protein, 213 aa, Artificial Sequence
  derived and/or modified sequence
  misc_feature (1)..(1): Xaa can be any naturally occurring amino acid
XLRGGGQFLGRGVRGVAARGIGRGGGAGLETGGVDGRGAPAGRRRWVRRVLADAGGGRSPQFLGRWFSAGLASNSSWLREKKAALSMCKSVVAPATDGGLNLTSTFLRKNQCETRTMLLQPAGSLGSYSYRSPHWGSTYSVSVVETDYDQYALLYSQGSKGPGEDFRMATLYSRTQTPRAELKEKFTAFCKAQGFTEDTIVFLPQTDKCMTEQ

SEQ ID NO: 17589 - protein, 195 aa, Artificial Sequence
  derived and/or modified sequence
MATHHTLWMGLALLGVLGDLQAAPEAQVSVQPNFQQDKFLGRWFSAGLASNSSWLREKKAALSMCKSVVAPATDGGLNLTSTFLRKNQCETRTMLLQPAGSLGSYSYRSPREWGLHRPPGPSLGATLAGTTLGQPPAAEIHGVGDWGSTYSVSVVETDYDQYALLYSQGSKGPGEDFRMATLYSRTQTPRAELKE

SEQ ID NO: 17590 - DNA, 675 bp, Artificial Sequence
  derived and/or modified sequence
atggcaactcatcatacactctggatgggtctcgctttgctgggcgtgctgggagacctccaagccgcccctgaagctcaggtttcagtccagcctaattttcagcaggacaaatttctggggcgctggttctcagctgggttggcctctaattccagctggttaagagagaagaaggctgcactgtcaatgtgtaaaagcgtggtagctcctgcaactgacggagggcttaatttgacttccacattccttagaaagaaccagtgcgaaacacggaccatgcttcttcagcctgctggctccttgggctcttattcctatcggagcccaagggagtggggtctgcacagacctcccggcccaagcttgggagccactctcgcaggcacgaccctaggacagccgcccgcagccgaaattcacggggtgggcgactgggggtcgacttactcagtttccgtggttgaaacggactatgaccagtacgccctgctgtactcacagggtagcaaggggccaggcgaggacttccggatggcgacgctctacagcaggacccagaccccccgagctgaactgaaagagaaattcaccgccttctgcaaagctcaaggctttacagaagatacaatcgtgttcctgccacagaccgataagtgcatgactgagcagtag

SEQ ID NO: 17591 - DNA, 483 bp, Artificial Sequence
  derived and/or modified sequence
atggccacccaccacaccctatggatgggcctagcactgctgggcgtccttggtgacctccaggccgcacctgaagcacaggtgtcagtgcaaccaaatttccaacaagacaagttcctcggcagatggttttctgccggcctggcatccaactctagttggttgagggaaaagaaggcagccctttctatgtgtaagagcgtagttgcacccgcgaccgacgggggtctgaacctgacctcaacttttctcaggaaaaatcagtgtgagaccaggaccatgctccttcaaccagccgggagtcttgggagctattcctaccggagcccccgggaatggggccttcatcgccctccgggaccatcactgggtgccaccctagctggcaccactttggggcagcccccagccgccgagattcacggcgtaggcggagacggttgtcccacgtctgtgaggggtaagggtcaagcttgggcgtag

SEQ ID NO: 17592 - DNA, 573 bp, Artificial Sequence
  derived and/or modified sequence
atggctacacaccatacactgtggatgggactggccctgctcggggtgttaggagaccttcaagcggcaccggaggcgcaggtcagcgtccagcctaacttccagcaggataaatttctgggacggtggtttagcgcgggactcgcttcaaactcttcttggctgcgcgagaagaaggccgcactgtccatgtgcaagtctgttgttgcaccagcaacggatggtggtctgaatctcacgagtaccttcctccggaagaaccagtgtgagaccagaaccatgcttctacagcctgcaggttctttaggctcttatagctacagatcaccccattggggctccacctactccgtctccgtcgtggaaactgattacgatcagtatgctctgctgtatagccaggggagcaagggccccggcgaggactttcgtatggcgactctttactcgaggacacagacgccccgagcggaactaaaagaaaagtttacggctttctgcaaggcccagggcttcaccgaggacaccatcgtgtttctgcctcaaactgataaatgcatgactgaacaatag

SEQ ID NO: 17593 - DNA, 642 bp, Artificial Sequence
  derived and/or modified sequence
taactgcgcggcggcggacagttcttgggacgcggcgtccgtggcgtcgccgctagggggatcggacggggcgggggcgccggtttggagacgggaggcgtagacggcagaggggcacctgctggcagacggcgatgggttcgccgcgtactggcagacgctggcggcggaaggtcacctcagttcctgggcaggtggttttctgctggcttagccagcaatagcagctggttgcgtgagaagaaggcagcactgagcatgtgtaagtccgtggtcgctccagccacagatggggggctgaatctcacttccacctttctacggaagaatcaatgtgaaacacggacgatgctgttgcaacctgcaggttccctgggctcatatagttatcgctctcctcactggggttctacatattcagtaagcgtagttgagacagactatgatcagtatgcactgttgtactcccagggaagcaaaggccccggggaagatttccgaatggccaccttgtacagccgcacccagacccctcgggcggagctgaaggaaaagttcacggccttttgcaaagcccagggtttcacagaagacaccatcgtttttttaccccaaactgataagtgcatgactgagcagtag

SEQ ID NO: 17594 - DNA, 588 bp, Artificial Sequence
  derived and/or modified sequence
atggccactcaccacacgctctggatgggcctcgccctgttgggagtccttggcgacctacaagctgcccccgaagcacaggtgtctgtgcagcctaactttcagcaggacaagttcttgggaaggtggttttccgcaggcctggcctccaactcgagttggcttcgggaaaagaaggccgctctgtctatgtgcaaaagtgtcgtggcccctgccaccgacggtggactgaaccttacctctacatttcttcggaagaaccaatgcgagacccgaacaatgttgttacagcccgccggctctcttggtagctacagttatcgcagccctcgggaatggggcttgcatcggcccccggggccttccctgggagccaccttggccgggactacactcggtcagcctcctgccgcagagattcatggcgtcggagattgggggtctacatactcagtttccgttgtggaaacggattacgaccagtacgctctcttatattcccagggaagcaagggccccggcgaggacttccgaatggcaactctctatagcagaactcaaacaccgcgcgcagagttaaaggagtag

SEQ ID NO: 17595 - DNA, 573 bp, Artificial Sequence
  derived and/or modified sequence
atggccacccatcatactctgtggatgggactggccctgctgggagtgctcggagacttgcaggccgccccagaggcacaagtgtcagttcaaccgaattttcagcaagataaatttctgggccggtggttttctgccggactagcatcaaactccagttggctgagggagaagaaggcagctctctccatgtgtaaaagcgtggtggccccagctaccgatggtgggttaaacttaactagcacctttctaagaaaaaatcaatgtgaaacgaggactatgctcctccagcctgctggcagcctgggttcttattcttacaggtccccccactggggctctacctactcggtctcagtggtggaaacagactacgaccagtacgcgctactgtatagccaaggcagtaagggccccggcgaggacttcagaatggctaccttgtactccagaacccagacgccccgtgcagaattaaaagaaaagttcactgctttttgtaaggcacaggggtttactgaggacaccatcgtgtttttaccgcagacagataagtgcatgacagagcagtag

SEQ ID NO: 17596 - DNA, 675 bp, Artificial Sequence
  derived and/or modified sequence
atggccacccaccacaccctgtggatgggcctggccctgctgggcgtgctgggggacctgcaggccgcccctgaggcccaggtgtctgtgcagcccaacttccagcaggacaagttcctgggccgctggttctctgctggcctggccagcaacagctcctggctgcgggagaagaaggccgccctgtccatgtgcaagtctgtggtggccccagccacagatggcggcctgaacctgaccagcaccttcctgaggaagaaccagtgtgagaccaggaccatgctgctgcagcctgctggcagcctgggcagctacagctaccgcagcccccgggagtggggcctgcaccggcccccaggccccagcctgggcgccaccctggccggcaccaccctgggccagcccccagctgctgagatccatggagtgggggactggggcagcacctacagcgtgtctgtggtggagacagattatgaccagtatgccctgctgtacagccagggcagcaaaggacctggagaggacttcaggatggccaccctgtacagcaggacccagacccccagggctgagctgaaggagaagttcaccgccttctgcaaggcccagggcttcacagaggacaccatcgtgttcctgccccagacagacaagtgcatgacagagcagtag

SEQ ID NO: 17597 - DNA, 483 bp, Artificial Sequence
  derived and/or modified sequence
atggccacccaccacaccctgtggatgggcctggccctgctgggcgtgctgggggacctgcaggccgcccctgaggcccaggtgtctgtgcagcccaacttccagcaggacaagttcctgggccgctggttctctgctggcctggccagcaacagctcctggctgcgggagaagaaggccgccctgtccatgtgcaagtctgtggtggccccagccacagatggcggcctgaacctgaccagcaccttcctgaggaagaaccagtgtgagaccaggaccatgctgctgcagcctgctggcagcctgggcagctacagctaccgcagcccccgggagtggggcctgcaccggcccccaggccccagcctgggcgccaccctggccggcaccaccctgggccagcccccagctgctgagatccatggagtgggcggagatggctgccccacctctgtgcggggcaagggccaggcctgggcctag

SEQ ID NO: 17598 - DNA, 573 bp, Artificial Sequence
  derived and/or modified sequence
atggccacccaccacaccctgtggatgggcctggccctgctgggcgtgctgggggacctgcaggccgcccctgaggcccaggtgtctgtgcagcccaacttccagcaggacaagttcctgggccgctggttctctgctggcctggccagcaacagctcctggctgcgggagaagaaggccgccctgtccatgtgcaagtctgtggtggccccagccacagatggcggcctgaacctgaccagcaccttcctgaggaagaaccagtgtgagaccaggaccatgctgctgcagcctgctggcagcctgggcagctacagctaccgcagcccccactggggcagcacctacagcgtgtctgtggtggagacagattatgaccagtatgccctgctgtacagccagggcagcaaaggacctggagaggacttcaggatggccaccctgtacagcaggacccagacccccagggctgagctgaaggagaagttcaccgccttctgcaaggcccagggcttcacagaggacaccatcgtgttcctgccccagacagacaagtgcatgacagagcagtag

SEQ ID NO: 17599 - DNA, 642 bp, Artificial Sequence
  derived and/or modified sequence
tgactgcggggcggcggccagttcctgggccggggcgtgcggggcgtggccgcccggggcatcggccggggcggcggggccggcctggagactggaggagtggatggccgcggggccccagctggaagaagacgctgggtgcggcgggtgctggctgatgctgggggcggccgcagcccccagttcctgggccgctggttctctgctggcctggccagcaacagctcctggctgcgggagaagaaggccgccctgtccatgtgcaagtctgtggtggccccagccacagatggcggcctgaacctgaccagcaccttcctgaggaagaaccagtgtgagaccaggaccatgctgctgcagcctgctggcagcctgggcagctacagctaccgcagcccccactggggcagcacctacagcgtgtctgtggtggagacagattatgaccagtatgccctgctgtacagccagggcagcaagggccctggagaggacttcaggatggccaccctgtacagcaggacccagacccccagggctgagctgaaggagaagttcaccgccttctgcaaggcccagggcttcacagaggacaccatcgtgttcctgccccagacagacaagtgcatgacagagcagtag

SEQ ID NO: 17600 - DNA, 588 bp, Artificial Sequence
  derived and/or modified sequence
atggccacccaccacaccctgtggatgggcctggccctgctgggcgtgctgggggacctgcaggccgcccctgaggcccaggtgtctgtgcagcccaacttccagcaggacaagttcctgggccgctggttctctgctggcctggccagcaacagctcctggctgcgggagaagaaggccgccctgtccatgtgcaagtctgtggtggccccagccacagatggcggcctgaacctgaccagcaccttcctgaggaagaaccagtgtgagaccaggaccatgctgctgcagcctgctggcagcctgggcagctacagctaccgcagcccccgggagtggggcctgcaccggcccccaggccccagcctgggcgccaccctggccggcaccaccctgggccagcccccagctgctgagatccatggagtgggggactggggcagcacctacagcgtgtctgtggtggagacagattatgaccagtatgccctgctgtacagccagggcagcaaaggacctggagaggacttcaggatggccaccctgtacagcaggacccagacccccagggctgagctgaaggagtag

SEQ ID NO: 17601 - DNA, 675 bp, Artificial Sequence
  derived and/or modified sequence
atggccacccaccacaccctgtggatgggcctggccctgctgggcgtgctgggcgacttgcaggcggcaccagaggcgcaggtctcagtgcagccaaacttccagcaggacaagtttctcgggcgctggttctcagctgggctcgcttccaactcgtcatggctgagggaaaagaaagcagcgctctcgatgtgtaaatctgtggttgcgcccgccaccgacggaggcctgaatttgaccagcacttttctcagaaagaaccagtgtgaaacacgcactatgctcttacaacctgccggcagcctgggttcttactcctacagatcaccgagggagtggggcttacatcggccaccaggcccatcattaggagctaccctggcaggcaccaccctcggccaacctccggccgccgaaatccacggtgtgggcgactgggggtctacatatagtgtctcagtggttgaaaccgattacgaccagtacgctcttttgtatagccagggaagcaaggggccaggggaggatttccgtatggctactttgtactcgaggactcagactccacgggccgagctgaaggagaaattcacagcattttgcaaagctcagggctttaccgaagacacgatcgtctttctgccacagacagataaatgtatgactgagcagtag

SEQ ID NO: 17602 - DNA, 483 bp, Artificial Sequence
  derived and/or modified sequence
atggccacccaccacaccctgtggatgggcctggccctgctgggcgtcttgggggacctgcaggctgccccagaggcgcaggtgagcgtccagccaaattttcaacaggacaaatttctcggccggtggtttagcgccggactggcatccaacagttcctggctcagagaaaagaaggcagcactgtccatgtgtaagagcgttgtcgcaccagccaccgacggcggactgaacttaacgtccacattcctgcgcaagaaccagtgtgagacaaggaccatgctcctccagcccgccggcagcttgggttcctactcatatcggtctcctagggaatgggggctccaccgcccacctggcccttctcttggagccaccttagcaggtactacactgggccagccacctgctgccgagatccacggcgttggaggcgatggttgccccacaagcgtgcgcgggaagggacaagcctgggcctag

SEQ ID NO: 17603 - DNA, 573 bp, Artificial Sequence
  derived and/or modified sequence
atggccacccaccacaccctgtggatgggcctggccctgctgggcgtgttaggagatctgcaggccgcccctgaagcccaggtctccgtgcaacctaacttccagcaagacaaattcctgggtcgttggttctccgcgggcctggccagcaattcttcctggctgcgtgagaagaaagccgccctttcaatgtgtaagtcagtagtcgctcctgccactgatggtggtctcaatctcacaagcaccttccttcgcaaaaaccagtgcgagacccgaacaatgttactccagccagctggtagtttgggcagctactcctatcgcagtcctcattggggatcaacatactcagtttcagttgtggaaacagattacgaccagtatgccctgctgtactcacaaggctcaaagggaccaggtgaggacttccggatggcaaccttatattctaggacccagacacctcgcgctgagttgaaagaaaagtttacagcattctgcaaggctcagggtttcaccgaggataccatcgtgttcctgccacaaactgacaagtgtatgaccgagcagtag

SEQ ID NO: 17604 - DNA, 642 bp, Artificial Sequence
  derived and/or modified sequence
tgactgcggggcggcggccagttcctgggccggggcgtgcggggcgtcgccgcgcgcggtatcggacgcggaggaggtgccggactggaaactggaggtgtggatggaagaggtgctcccgcaggacgacgaaggtgggtaaggcgcgtgcttgcagatgccggaggcggcagaagtccccaattcctcggccgctggttctcagccgggttagcgagcaattcttcatggctgagagagaaaaaggccgccttgtccatgtgcaagagcgtggtggccccagctaccgacggaggcctcaacctcaccagtacctttctgcggaaaaaccagtgcgagacccggaccatgctgctccagcctgcagggagccttggctcctacagttacagatctcctcactggggatccacttactccgtaagtgtggtcgagactgattacgatcagtacgccttgctttattctcaaggcagcaagggaccaggtgaggactttagaatggcaaccctttactccagaactcagactcctcgagccgagctgaaggagaagttcactgcattttgcaaggcgcaagggttcacggaagacacaattgttttcctaccccagacagacaaatgtatgaccgagcaatag

SEQ ID NO: 17605 - DNA, 588 bp, Artificial Sequence
  derived and/or modified sequence
atggccacccaccacaccctgtggatgggcctggccctgctgggcgtgctcggggacctccaggccgcccccgaagctcaggtgtccgtacagccgaattttcagcaggataagttcctgggacgctggttttccgccggcctggcctccaactcctcctggcttagggagaagaaagctgcactctcaatgtgtaagtcagtagtcgcccctgcgaccgacgggggcttgaatctgacttctaccttcctgaggaaaaaccaatgcgagactcggacgatgctgctacagcctgcaggaagcctgggaagttactcttatcggtcacctcgggagtgggggcttcacaggccccctggtccatcccttggagccactctggccggcactacccttggacagccccctgccgccgaaatccatggcgtgggagattggggaagcacatattctgtttctgttgtcgaaacagactacgatcagtacgctctgctgtactctcagggttcaaaaggacccggcgaggactttcgtatggccactctttacagtcgaacccagacccccagggccgaacttaaggaatag

SEQ ID NO: 17606 - DNA, 573 bp, Artificial Sequence
  derived and/or modified sequence
atggccacccaccacaccctgtggatgggcctggccctgctgggcgttcttggagacctacaagccgctcccgaggcccaggtaagtgttcagccaaacttccagcaagataaattcctgggcagatggttcagcgccggacttgcctctaactctagttggcttagagagaagaaggcggccctgagcatgtgcaaatcagtcgtcgctcctgctactgacggcgggttgaacttaacatctaccttcctgagaaagaaccagtgtgaaacacggactatgctgctccagccagccgggagcctgggcagctactcgtatcgcagtccccactggggctcaacttactcagtctccgtggttgagaccgactatgaccagtatgccctactgtatagccaagggagcaaaggtcccggggaagacttccgaatggccaccttgtactcacgcacacagacccctagggccgagctcaaggagaagttcactgctttctgtaaagcacagggatttactgaggacactattgtattcctgcctcagaccgacaagtgtatgacagaacagtag

SEQ ID NO: 17607 - DNA, 675 bp, Artificial Sequence
  derived and/or modified sequence
atggccacacatcacaccttgtggatgggactggcgctcctaggtgtcctgggggacctgcaggccgcacccgaagctcaggtctctgttcagcccaactttcagcaagacaagttcctgggacgctggttctcagctgggctcgcctctaatagctcctggcttagagagaagaaggctgccctctctatgtgcaaaagtgtggtcgcaccagccacggatggaggcctaaatctaacatccacatttctcaggaaaaatcaatgcgagactcggaccatgctgctgcagcccgctggtagcctcggctcatactcgtaccgctctccacgagagtggggccttcaccggcctccaggtccctcactgggagccacactggcaggaacaacactgggccagcccccagccgctgagatacacggagtcggggactggggaagcacctatagcgtttccgttgttgaaacggactacgatcagtacgcgctgctctactcccaaggatcaaaaggtccaggggaggatttccgtatggccaccttatattccaggacgcaaacacccagggccgaactcaaagagaagtttaccgctttttgtaaggcccaggggttcaccgaggacacgatcgtcttcttaccacagacagacaagtgtatgaccgaacaatag

SEQ ID NO: 17608 - DNA, 483 bp, Artificial Sequence
  derived and/or modified sequence
atggctacacaccatactctgtggatggggctggccttactgggggtgttgggggacctgcaagctgccccagaggctcaagtctctgtccagccaaattttcagcaggataaattcctcgggagatggttcagcgccggtctggcgtccaattccagttggctgcgggaaaagaaggctgcactgtccatgtgcaagtccgtggtagcgccagcaaccgacgggggactaaatctcacttctacctttctgcgcaagaaccagtgtgagacccggacaatgctgctccagccagccggttctttgggatcctattcctatagaagcccaagggagtggggcctccaccggcctccaggccctagcctgggggcaacgctcgctggaactactttgggacaaccacctgctgccgagatccatggggtgggcggtgatggatgtccaaccagtgtaagaggcaagggacaagcctgggcctag

SEQ ID NO: 17609 - DNA, 573 bp, Artificial Sequence
  derived and/or modified sequence
atggcaacccaccataccctgtggatggggttagccctgctgggagtgctcggtgatctccaggcagctcccgaagcacaggtctctgtgcaaccgaattttcaacaggataaatttctaggacgatggttctccgcagggttagcctccaatagcagctggcttcgcgaaaagaaggccgctctgagtatgtgtaagagcgtggtggcaccagcaaccgatggcggactgaacttgacgagtacatttctcaggaagaaccagtgtgaaacgcgaacaatgctcctacagccagctggatcacttgggtcctacagctaccgaagtcctcactggggctcaacgtacagtgtatctgtggttgagacagattacgaccaatacgctcttttgtactcccaagggtccaaagggcctggagaggacttccgaatggctaccctgtattctagaacacagacccctcgagcggagctaaaggaaaagttcaccgcattctgcaaagcccagggatttacagaagatacaatcgtctttctgccacagaccgataagtgtatgaccgagcaatag

SEQ ID NO: 17610 - DNA, 642 bp, Artificial Sequence
  derived and/or modified sequence
tagctacgtggagggggtcagttcctgggcaggggcgtccgcggagttgccgcacgtggcatcgggaggggaggcggagcgggtctggagactggaggtgtcgacggtcggggagcacccgctggtagacgccgttgggtccgcagagtcctggcagatgccggtggcggacgctccccgcaattcctgggcaggtggttcagcgcaggtctggcaagtaactcttcttggctgagggagaagaaagctgccctgagcatgtgcaagtctgtggttgcccctgccacagatggtggcctcaacctcaccagcactttcctgcggaaaaatcagtgcgaaacgagaaccatgctcttgcagcctgcaggatctctagggtcctacagctatagatctccccactggggatctacctatagcgtttctgtcgtcgaaaccgactacgaccagtacgctctcctgtattcccaaggctctaaaggccctggagaggacttccgcatggccaccctatactccaggacacagacccctcgtgcagagttgaaagaaaagttcaccgcattttgcaaggcacagggttttacagaggataccattgtgtttttgccccagaccgacaaatgcatgaccgaacagtag

SEQ ID NO: 17611 - DNA, 588 bp, Artificial Sequence
  derived and/or modified sequence
atggccacacatcatactttgtggatgggactggcattgttgggggtgctgggcgacctccaggctgcacctgaagctcaggtctcggtccagcccaattttcagcaggacaaatttcttgggcgttggttttcggctggactagcttctaatagtagctggctaagggagaaaaaggcagcacttagtatgtgcaagagcgttgtggcccctgcgaccgatgggggactgaatctcacctccacgtttttgagaaagaatcagtgtgaaacgcgcacaatgctcctccagcctgccggaagtctcgggtcttactcctatagatcaccgcgtgaatggggtctgcatcgaccccctggacccagcttaggcgcaactctggcaggcaccaccctcggtcagccgcctgccgcagaaattcacggggtcggcgactggggctcaacgtattccgtgtctgtggtagaaacggattacgatcagtacgccctgctgtattctcaagggtccaagggacctggcgaggatttccgcatggccacattgtattctcggacccagacaccccgagctgagctgaaggagtag

SEQ ID NO: 17612 - DNA, 573 bp, Artificial Sequence
  derived and/or modified sequence
atggccacacaccatactttgtggatgggcttggcattgctgggcgttctcggggatctgcaggcagcgcctgaagcccaggtgtccgtccaacccaacttccagcaggataaattcctcggcagatggttctctgccggtctggcaagtaacagttcttggcttcgggaaaaaaaggcggctctttcaatgtgcaagtcagttgttgcacctgccaccgacgggggtctcaatctaacatcaacatttctccggaaaaaccagtgtgaaacaagaaccatgctcctccaaccagcaggatcactgggttcatacagttataggtctccccattggggttctacttactctgtctccgtggtggaaacagactacgaccagtatgccctactttatagccaaggttctaagggcccaggagaagactttagaatggcgacattatattctaggacgcagacaccacgcgcagagctgaaagaaaaattcactgccttttgcaaggcacaaggctttactgaagacactattgtcttcctgcctcaaaccgacaaatgtatgaccgagcagtag

SEQ ID NO: 17613 - DNA, 913 bp, Artificial Sequence
  derived and/or modified sequence
gctcctcctgcacacctccctcgctctcccacaccactggcaccaggccccggacacccgctctgctgcaggagaatggctactcatcacacactgtggatgggactggccctgctgggggtgctgggcgacctgcaggcagcaccggaggcccaggtctccgtgcagcccaacttccagcaggacaagttcctggggcgctggttcagcgcgggcctcgcctccaactcgagctggctccgggagaagaaggcggcgttgtccatgtgcaagtctgtggtggcccctgccacggatggtggcctcaacctgacctccaccttcctcaggaaaaaccagtgtgagacccgaaccatgctgctgcagcccgcggggtccctcggctcctacagctaccggagtccccgtgagtggggcctccaccggccccctgggcccagcctgggggcgacacttgccgggacgactctgggccagccccctgccgcggagatccatggggtgggagactggggcagcacctactccgtgtcagtggtggagaccgactacgaccagtacgcgctgctgtacagccagggcagcaagggccctggcgaggacttccgcatggccaccctctacagccgaacccagacccccagggctgagttaaaggagaaattcaccgccttctgcaaggcccagggcttcacagaggataccattgtcttcctgccccaaaccgataagtgcatgacggaacaataggactccccagggctgaagctgggatcccggccagccaggtgacccccacgctctggatgtctctgctctgttccttccccgagcccctgccccggctccccgccaaagcaaccctgcccactcaggcttcatcctgcacaataaactccggaagcaagtcagt

SEQ ID NO: 17614 - DNA, 921 bp, Artificial Sequence
  derived and/or modified sequence
cacctccctcgctctcccacaccactggcaccaggccccggacacccgctctgctgcaggagaatggctactcatcacacactgtggatgggactggccctgctgggggtgctgggcgacctgcaggcagcaccggaggcccaggtctccgtgcagcccaacttccagcaggacaagttcctggggcgctggttcagcgcgggcctcgcctccaactcgagctggctccgggagaagaaggcggcgttgtccatgtgcaagtctgtggtggcccctgccacggatggtggcctcaacctgacctccaccttcctcaggaaaaaccagtgtgagacccgaaccatgctgctgcagcccgcggggtccctcggctcctacagctaccggagtccccgtgagtggggcctccaccggccccctgggcccagcctgggggcgacacttgccgggacgactctgggccagccccctgccgcggagatccatggggtgggaggtgatggctgccccaccagcgtcagaggcaaaggccaggcctgggcgtgactacccatgcacaagtgttagggacagagagacccttcctccagggggttggatcctctctggagcccaccattgtcttgtcaggccccttccctgccctctggagttttccccacataagcagccccccaaggcccctccatatgcctcctcccaattctcctccccaggacccaggggtttcctcactcccacctggggaatggctcccacggggaaacctcttcacttccggttctggcagcgacttctgcggctgcaccaggaatcctggttttctgagcctggctcccccagattctggtttggggacagggttcacaggctgtgcaggcgagagcagggcactggctggagagcagccgggtgggggag

SEQ ID NO: 17615 - DNA, 807 bp, Artificial Sequence
  derived and/or modified sequence
ctcctcctgcacacctccctcgctctcccacaccactggcaccaggccccggacacccgctctgctgcaggagaatggctactcatcacacactgtggatgggactggccctgctgggggtgctgggcgacctgcaggcagcaccggaggcccaggtctccgtgcagcccaacttccagcaggacaagttcctggggcgctggttcagcgcgggcctcgcctccaactcgagctggctccgggagaagaaggcggcgttgtccatgtgcaagtctgtggtggcccctgccacggatggtggcctcaacctgacctccaccttcctcaggaaaaaccagtgtgagacccgaaccatgctgctgcagcccgcggggtccctcggctcctacagctaccggagtccccactggggcagcacctactccgtgtcagtggtggagaccgactacgaccagtacgcgctgctgtacagccagggcagcaagggccctggcgaggacttccgcatggccaccctctacagccgaacccagacccccagggctgagttaaaggagaaattcaccgccttctgcaaggcccagggcttcacagaggataccattgtcttcctgccccaaaccgataagtgcatgacggaacaataggactccccagggctgaagctgggatcccggccagccaggtgacccccacgctctggatgtctctgctctgttccttccccgagcccctgccccggctccccgccaaagcaaccctgcccactcaggcttcatcctgcacaataaactccggaagcaagtc

SEQ ID NO: 17616 - DNA, 754 bp, Artificial Sequence
  derived and/or modified sequence
attgaggggcgggggtcagttcctggggcggggcgtgaggggcgtggctgctcgggggattgggcgtgggggcggggccgggttggagaccggaggagtagacggcagaggcgcccccgcaggtaggcgcaggtgggtccggagggtcctggccgacgcgggtgggggtcgctcgccgcagttcctggggcgctggttcagcgcgggcctcgcctccaactcgagctggctccgggagaagaaggcggcgttgtccatgtgcaagtctgtggtggcccctgccacggatggtggcctcaacctgacctccaccttcctcaggaaaaaccagtgtgagacccgaaccatgctgctgcagcccgcggggtccctcggctcctacagctaccggagtccccactggggcagcacctactccgtgtcagtggtggagaccgactacgaccagtacgcgctgctgtacagccagggcagcaagggccctggcgaggacttccgcatggccaccctctacagccgaacccagacccccagggctgagttaaaggagaaattcaccgccttctgcaaggcccagggcttcacagaggataccattgtcttcctgccccaaaccgataagtgcatgacggaacaataggactccccagggctgaagctgggatcccggccagccaggtgacccccacgctctggatgtctctgctctgttccttccccgagcccctgccccggctccccgccaaagcaaccc

SEQ ID NO: 17617 - DNA, 661 bp, Artificial Sequence
  derived and/or modified sequence
ctcctcctgcacacctccctcgctctcccacaccactggcaccaggccccggacacccgctctgctgcaggagaatggctactcatcacacactgtggatgggactggccctgctgggggtgctgggcgacctgcaggcagcaccggaggcccaggtctccgtgcagcccaacttccagcaggacaagttcctggggcgctggttcagcgcgggcctcgcctccaactcgagctggctccgggagaagaaggcggcgttgtccatgtgcaagtctgtggtggcccctgccacggatggtggcctcaacctgacctccaccttcctcaggaaaaaccagtgtgagacccgaaccatgctgctgcagcccgcggggtccctcggctcctacagctaccggagtccccgtgagtggggcctccaccggccccctgggcccagcctgggggcgacacttgccgggacgactctgggccagccccctgccgcggagatccatggggtgggagactggggcagcacctactccgtgtcagtggtggagaccgactacgaccagtacgcgctgctgtacagccagggcagcaagggccctggcgaggacttccgcatggccaccctctacagccgaacccagacccccagggctgagttaaaggagaa

SEQ ID NO: 17618 - DNA, 989 bp, Artificial Sequence
  derived and/or modified sequence
cctccctcgctctcccacaccactggcaccaggccccggacacccgctctgctgcaggagaatggctactcatcacacactgtggatgggactggccctgctgggggtgctgggcgacctgcaggcagcaccggaggcccaggtctccgtgcagcccaacttccagcaggacaagttcctggggcgctggttcagcgcgggcctcgcctccaactcgagctggctccgggagaagaaggcggcgttgtccatgtgcaagtctgtggtggcccctgccacggatggtggcctcaacctgacctccaccttcctcaggaaaaaccagtgtgagacccgaaccatgctgctgcagcccgcggggtccctcggctcctacagctaccggagtccccactggggcagcacctactccgtgtcagtggtggagaccgactacgaccagtacgcgctgctgtacagccagggcagcaagggccctggcgaggacttccgcatggccaccctctacagccgaacccagacccccagggctgagttaaaggagaaattcaccgccttctgcaaggcccagggcttcacagaggataccattgtcttcctgccccaaaccgataagtgcatgacggaacaatagttccagggcacctggtacatggtcggggtggtgtcagatgaccaggacttcctggactccaaggacaccatgaagatggctgtggtcttagtgacccccttggggaatggtgacctggccctcaagtttggataccccacgccccatggcgggtgccagaaaatggacacgaccttcaccgagggtgctgtaccggggcagttcagcaacccagctcgagcgcccgagctgtttcccgaaggcgcccagaagatgcagctactggcgccccaagtgggcctgagccccagccagggcgtcctgctgccgaagtcggaccagtgtgcgggcgcgctctcccgggtgagtagaccat

SEQ ID NO: 17619 - DNA, 675 bp, Artificial Sequence
  derived and/or modified sequence
atggccacccaccatactctgtggatgggcttggctttgctgggtgtactaggagatctgcaggccgctccagaggctcaggtcagtgtccagccaaacttccaacaagacaaattcctcggacgctggtttagtgctggattggcttccaatagctcctggttgcgggaaaaaaaggccgccctgtctatgtgtaaatccgtcgtagcccccgccacagatgggggactcaatctaacctccacctttttgcgtaagaaccaatgcgaaacaagaacaatgcttcttcagcccgctggcagtcttggctcctactcttaccggagtccacgagaatggggcttgcaccggccccctggcccgtccctgggcgcgacgcttgccgggacaaccctggggcaaccccccgctgcagaaatccatggtgtgggcgactggggctccacgtattcagtctcagtggttgaaacggattatgatcaatacgccctactgtatagccaaggttcgaagggtcctggcgaggattttagaatggctacactttactctcgaacacagacccctagagcagagctgaaagaaaaattcaccgccttttgcaaggcccagggattcactgaagacacaatcgtgttcctgccgcagaccgacaagtgtatgacagagcagtag

SEQ ID NO: 17620 - DNA, 483 bp, Artificial Sequence
  derived and/or modified sequence
atggcaactcaccatacactctggatgggactggcactgctcggtgtcttaggcgatctccaggccgcccccgaagcacaagttagcgtacaacccaatttccagcaggacaaattcttggggagatggttctccgctgggctagccagcaacagtagttggctgcgtgagaagaaagctgccctgagcatgtgtaagagtgttgtggctcccgcaaccgatggcgggctaaatctcacatccacgtttctgcggaagaaccagtgcgaaacccgcaccatgctgttacaacccgccggtagcctcggaagttactcctacagaagtccacgtgaatgggggttacaccgtcctccagggccgtcactcggtgctacactagctggcactactctaggtcagcctcccgcagccgaaatccatggcgtcggaggtgatggatgccctacttccgtaaggggaaaagggcaggcttgggcatag

SEQ ID NO: 17621 - DNA, 573 bp, Artificial Sequence
  derived and/or modified sequence
atggcaactcatcacaccctgtggatgggcctcgcactgctcggagtactgggcgacctgcaagccgctcccgaagcacaagtctcagtgcagccaaattttcaacaagataagtttctggggcgttggttcagcgccggattggcctccaatagtagctggttacgcgagaaaaaagcagctctgagtatgtgcaagtctgtggttgcgccggcaacagacggcgggcttaatttgacttcaaccttcctccgcaagaatcagtgcgagacacgaacaatgctgctgcagcctgccggaagccttggatcatactcctacaggtccccgcactggggctcaacctacagtgtgtccgtggtagaaaccgattacgaccagtatgctctcctatatagccagggatcaaagggccccggtgaagacttcaggatggcaactctttacagcaggactcagacccccagggccgagctcaaggaaaaattcaccgctttctgcaaagcgcaagggtttactgaagacacaattgtatttctgccccaaaccgataaatgcatgactgagcaatag

SEQ ID NO: 17622 - DNA, 642 bp, Artificial Sequence
  derived and/or modified sequence
tagctgaggggaggtgggcagtttctaggaaggggcgtgcgcggtgtggccgcgagagggattggacggggagggggcgcggggttagaaacaggcggagtggatggccggggcgcacctgcagggcgcaggagatgggtgcgcagagttctggcagatgcgggcggcggacgaagtccacaatttttgggaagatggtttagcgctggcctggcctcgaatagcagctggctgcgggagaagaaggcggctctgtccatgtgtaaatccgtggtggcgccagctacagacggcgggttgaacctgacttctaccttcttgaggaaaaatcaatgcgaaactcgcacaatgttgctccaacccgctggaagcctgggctcatacagttacagaagtccccattggggctctacctactcagtctctgtggtggaaaccgactacgaccaatacgccttgctgtattcgcagggctctaagggacctggagaagactttagaatggccacactctatagccggacccagactccgcgcgctgagctgaaggagaaatttacggccttctgcaaagcccaggggttcactgaagacaccatagtgttcctgccacagacagataagtgcatgacagagcagtag

SEQ ID NO: 17623 - DNA, 588 bp, Artificial Sequence
  derived and/or modified sequence
atggcgacacatcacaccctatggatgggacttgctcttttgggcgtcctcggcgatctacaggctgcccccgaggcacaggtcagcgttcagcccaattttcagcaagacaaatttctggggaggtggttctctgcgggcttagcatctaattcatcttggctccgggaaaaaaaagccgctctctccatgtgcaagagtgtggtggcacccgcaaccgatggcggcctaaatctgactagtacatttctgcgcaagaaccagtgcgaaactcgtactatgctgctgcagcccgctggctccttgggatcttatagctatcgatcacctcgcgagtgggggctgcacagaccacctggaccctcattgggtgccacactggctggaaccacactcgggcagcctccggctgctgaaatccacggagtgggggattggggatcgacttatagcgtctcagtcgtggagactgactacgaccagtacgccttattatattcgcaaggaagcaaaggcccaggggaggattttaggatggctactctgtactctcgtacgcagactcccagagccgagctcaaagaatag

SEQ ID NO: 17624 - DNA, 573 bp, Artificial Sequence
  derived and/or modified sequence
atggccacacatcataccttatggatgggactcgctcttctgggcgtccttggagacttgcaggctgcgcccgaggctcaggtgtctgtacagcctaacttccagcaggataagttcctcggacggtggttctcagcaggcctcgcctctaacagtagttggcttagagaaaagaaagcagccctgtcaatgtgtaagtccgttgtcgcccctgcgacagatgggggcctgaacctgacctctaccttcttacggaagaaccagtgtgaaaccaggaccatgttactgcagcctgcaggctcgctaggttcttactcgtatcgtagccctcactggggaagcacatatagcgtttcagtagttgagactgactatgaccagtacgcactgctatacagccagggttctaagggaccaggcgaggacttccgcatggccaccctgtacagccggacacaaaccccaagagctgagctgaaagaaaaattcacagccttttgcaaagcacagggctttaccgaagataccatcgtgtttttgccccagaccgataaatgcatgaccgagcagtag

SEQ ID NO: 17625 - DNA, 675 bp, Artificial Sequence
  derived and/or modified sequence
atggccacccaccacactctttggatgggcttagcgctgttaggcgtactgggagatcttcaggcggcgccagaggcacaggtgtccgtgcaacccaattttcagcaagataaattcctgggcagatggttttccgccggcctcgcatcaaattcttcctggctccgcgagaaaaaggccgccttgtctatgtgtaagagtgtcgttgcacccgctaccgacggagggctgaacctcacatccactttcctccggaagaaccaatgtgaaacgaggaccatgctgttacagcccgcagggtcactcggatcctactcttataggtccccaagggaatggggcctgcaccgaccgccgggaccatctctcggagcaacattggccgggaccacccttggccagccccctgcagcagaaatccacggtgtaggagactggggcagcacttattcagtgtctgttgtggaaaccgattacgaccagtacgctctgctgtactcacaaggatcaaaaggaccaggtgaagatttcaggatggccactctttatagccggacccagacacctcgagcagaactgaaagagaaatttaccgctttttgcaaagcacagggctttaccgaagacacaattgtatttttgcctcagactgacaaatgcatgaccgaacaatag

SEQ ID NO: 17626 - DNA, 483 bp, Artificial Sequence
  derived and/or modified sequence
atggcaacccatcacaccctttggatgggcttagctttgctgggagtgcttggggatttgcaggcagcccccgaagcccaggtgagcgtgcagcctaactttcaacaggacaagttcctcggtcgatggttctccgctggactggcctccaacagcagctggctcagagaaaagaaggccgccctttcgatgtgtaaatctgtagtcgcccccgccactgacggtggtttaaacctgacgagtaccttcctgaggaagaatcagtgcgagactaggactatgctcttgcaacccgctgggagcctcggctcatattcataccgttccccaagagagtggggactgcaccgaccaccaggcccttccctaggagcaaccttggccggtacaaccttaggtcaaccccccgctgcagaaatccatggagttggaggcgacggttgcccaacatccgtcagaggaaagggccaggcatgggcatag

SEQ ID NO: 17627 - DNA, 573 bp, Artificial Sequence
  derived and/or modified sequence
atggccacacatcacactctttggatgggattggctttactcggggtcctcggggaccttcaggcagcccctgaagcgcaggttagcgttcaaccaaattttcagcaggataagtttctaggacggtggttcagcgcaggccttgcatccaatagttcatggctgagagaaaagaaagcagccctttctatgtgtaagagtgttgtcgccccggctacagatggcggactgaatctgactagtaccttcctgaggaaaaatcagtgtgagactcggacaatgctacttcagccagcaggctcactgggctcatactcatacagatcgccacactggggctctacctatagcgtgagcgttgtcgaaaccgattacgaccagtacgccctcctttattcccaaggcagcaaaggccctggcgaagacttccggatggcaactctctactctcggacacaaacaccgcgagcagagttaaaagaaaagtttacagcgttttgtaaagcacagggatttaccgaggacaccattgtgtttctgcctcagacagacaaatgcatgaccgagcagtag

SEQ ID NO: 17628 - DNA, 642 bp, Artificial Sequence
  derived and/or modified sequence
tagctgaggggaggtgggcagtttctaggaaggggcgtgcgcggtgtggccgcgagagggattggacggggagggggcgcggggttagaaacaggcggagtggatggccggggcgcacctgcagggcgcaggagatgggtgcgcagagttctggcagatgcgggcggcggacgaagtccacaatttttgggaagatggtttagcgctggcctggcctcgaatagcagctggctgcgggagaagaaggcggctctgtccatgtgtaaatccgtggtggcgccagctacagacggcgggttgaatctgaccagcacattcctgcgaaagaatcagtgcgagacccgcaccatgctactacagcccgccggcagtttgggctcttacagctacaggtccccgcattggggctccacatattccgtttccgtcgtcgaaactgactacgatcaatatgccctcctgtactcccaaggatccaagggaccaggcgaagactttcgcatggccacattatattcccggactcagactccaagagcagagttaaaagagaaattcaccgcattttgtaaagcgcaaggcttcacagaggacaccatcgtcttccttccccagaccgataagtgtatgaccgaacaatag

SEQ ID NO: 17629 - DNA, 588 bp, Artificial Sequence
  derived and/or modified sequence
atggcaactcaccataccctgtggatgggtttagctctcctgggagtattgggtgacctacaggcagcaccagaagcccaagttagcgtacagccgaacttccagcaggataaatttctcgggcggtggttcagcgccggactggccagtaactcctcgtggcttcgggaaaaaaaggcagcactcagtatgtgtaagtccgtcgtagcgcccgccaccgatggaggcctgaatttgacgtctaccttcctgcgaaaaaaccaatgcgagaccagaacaatgttactgcagcctgcaggaagtcttggtagctattcatataggagcccaagagagtggggattgcaccgacctccaggcccttccttgggtgcaactctggccggcacaacgttggggcaaccaccagccgcagaaattcatggcgtgggcgactggggcagcacttacagtgtctccgtggtcgaaactgactacgaccaatatgctttattatatagccaaggatccaaaggacccggggaggattttaggatggcaactctgtattccagaacccaaactccacgcgctgagttgaaagagtag

SEQ ID NO: 17630 - DNA, 573 bp, Artificial Sequence
  derived and/or modified sequence
atggccactcaccataccctctggatgggcctagcccttctcggagttctgggcgacctgcaagccgcacccgaggcgcaggtgtcagttcagccaaacttccagcaagataaatttctgggaagatggttctccgccgggctcgcctctaactcttcatggctcagggagaagaaggccgctctcagtatgtgcaagtctgtcgtagcaccagccaccgatggcggcctaaacctgacttctacattcctacgcaagaatcagtgcgaaacaagaacaatgctcctccaacctgcaggatcactgggctcctattcctatcgctcgccacattggggaagcacttactcggtatctgtcgttgagaccgactacgaccaatatgccctcctgtattcgcagggcagtaaaggtcctggcgaagactttcgcatggccaccctgtactcacgtacccagacccctcgagcagaattaaaggagaagttcactgcattttgcaaggcacaagggttcaccgaggatacgatcgttttcctgcctcagactgataaatgtatgacagaacaatag

SEQ ID NO: 17631 - DNA, 675 bp, Artificial Sequence
  derived and/or modified sequence
atggccacccaccacaccctgtggatgggcctggccctgctgggcgtgctgggcgacctgcaggccgcccccgaggcccaggtgagcgtgcagcccaacttccagcaggacaagttcctgggcagatggttcagcgccggcctggccagcaacagcagctggctgagagagaagaaggccgccctgagcatgtgcaagagcgtggtggcccccgccaccgacggcggcctgaacctgaccagcaccttcctgagaaagaaccagtgcgagaccagaaccatgctgctgcagcccgccggcagcctgggcagctacagctacagaagccccagagagtggggcctgcacagaccccccggccccagcctgggcgccaccctggccggcaccaccctgggccagccccccgccgccgagatccacggcgtgggcgactggggcagcacctacagcgtgagcgtggtggagaccgactacgaccagtacgccctgctgtacagccagggcagcaagggccccggcgaggacttcagaatggccaccctgtacagcagaacccagacccccagagccgagctgaaggagaagttcaccgccttctgcaaggcccagggcttcaccgaggacaccatcgtgttcctgccccagaccgacaagtgcatgaccgagcagtag

SEQ ID NO: 17632 - DNA, 483 bp, Artificial Sequence
  derived and/or modified sequence
atggccacccaccacaccctgtggatgggcctggccctgctgggcgtgctgggcgacctgcaggccgcccccgaggcccaggtgagcgtgcagcccaacttccagcaggacaagttcctgggcagatggttcagcgccggcctggccagcaacagcagctggctgagagagaagaaggccgccctgagcatgtgcaagagcgtggtggcccccgccaccgacggcggcctgaacctgaccagcaccttcctgagaaagaaccagtgcgagaccagaaccatgctgctgcagcccgccggcagcctgggcagctacagctacagaagccccagagagtggggcctgcacagaccccccggccccagcctgggcgccaccctggccggcaccaccctgggccagccccccgccgccgagatccacggcgtgggcggcgacggctgccccaccagcgtgagaggcaagggccaggcctgggcctag

SEQ ID NO: 17633 - DNA, 573 bp, Artificial Sequence
  derived and/or modified sequence
atggccacccaccacaccctgtggatgggcctggccctgctgggcgtgctgggcgacctgcaggccgcccccgaggcccaggtgagcgtgcagcccaacttccagcaggacaagttcctgggcagatggttcagcgccggcctggccagcaacagcagctggctgagagagaagaaggccgccctgagcatgtgcaagagcgtggtggcccccgccaccgacggcggcctgaacctgaccagcaccttcctgagaaagaaccagtgcgagaccagaaccatgctgctgcagcccgccggcagcctgggcagctacagctacagaagcccccactggggcagcacctacagcgtgagcgtggtggagaccgactacgaccagtacgccctgctgtacagccagggcagcaagggccccggcgaggacttcagaatggccaccctgtacagcagaacccagacccccagagccgagctgaaggagaagttcaccgccttctgcaaggcccagggcttcaccgaggacaccatcgtgttcctgccccagaccgacaagtgcatgaccgagcagtag

SEQ ID NO: 17634 - DNA, 642 bp, Artificial Sequence
  derived and/or modified sequence
tgactgagaggcggcggccagttcctgggcagaggcgtgagaggcgtggccgccagaggcatcggcagaggcggcggcgccggcctggagaccggcggcgtggacggcagaggcgcccccgccggcagaagaagatgggtgagaagagtgctggccgacgccggcggcggcagaagcccccagttcctgggcagatggttcagcgccggcctggccagcaacagcagctggctgagagagaagaaggccgccctgagcatgtgcaagagcgtggtggcccccgccaccgacggcggcctgaacctgaccagcaccttcctgagaaagaaccagtgcgagaccagaaccatgctgctgcagcccgccggcagcctgggcagctacagctacagaagcccccactggggcagcacctacagcgtgagcgtggtggagaccgactacgaccagtacgccctgctgtacagccagggcagcaagggccccggcgaggacttcagaatggccaccctgtacagcagaacccagacccccagagccgagctgaaggagaagttcaccgccttctgcaaggcccagggcttcaccgaggacaccatcgtgttcctgccccagaccgacaagtgcatgaccgagcagtag

SEQ ID NO: 17635 - DNA, 588 bp, Artificial Sequence
  derived and/or modified sequence
atggccacccaccacaccctgtggatgggcctggccctgctgggcgtgctgggcgacctgcaggccgcccccgaggcccaggtgagcgtgcagcccaacttccagcaggacaagttcctgggcagatggttcagcgccggcctggccagcaacagcagctggctgagagagaagaaggccgccctgagcatgtgcaagagcgtggtggcccccgccaccgacggcggcctgaacctgaccagcaccttcctgagaaagaaccagtgcgagaccagaaccatgctgctgcagcccgccggcagcctgggcagctacagctacagaagccccagagagtggggcctgcacagaccccccggccccagcctgggcgccaccctggccggcaccaccctgggccagccccccgccgccgagatccacggcgtgggcgactggggcagcacctacagcgtgagcgtggtggagaccgactacgaccagtacgccctgctgtacagccagggcagcaagggccccggcgaggacttcagaatggccaccctgtacagcagaacccagacccccagagccgagctgaaggagtag

SEQ ID NO: 17636 - protein, 402 aa, Artificial Sequence
  derived and/or modified sequence
MSPCGPLNLSLAGEATTCAAPWVPNTSAVPPSGASPALPIFSMTLGAVSNLLALALLAQAAGRLRRRRSAATFLLFVASLLATDLAGHVIPGALVLRLYTAGRAPAGGACHFLGGCMVFFGLCPLLLGCGMAVERCVGVTRPLLHAARVSVARARLALAAVAAVALAVALLPLARVGRYELQYPGTWCFIGLGPPGGWRQALLAGLFASLGLVALLAALVCNTLSGLALLRARWRRRSRRPPPASGPDSRRRWGAHGPRSASASSASSIASASTFFGGSRSSGSARRARAHDVEMVGQLVGIMVVSCICWSPMLVLVALAVGGWSSTSLQRPLFLAVRLASWNQILDPWVYILLRQAVLRQLLRLLPPRAGAKGGPAGLGLTPSAWEASSLRSSRHSGLSHF

SEQ ID NO: 17637 - DNA, 1209 bp, Artificial Sequence
  derived and/or modified sequence
atgtccccatgcggacctctcaatttaagtctcgcaggtgaagccaccacttgcgcagctccgtgggtccccaacacctccgcagtccctccgtccggagcttctcccgctctcccaatcttctccatgacactgggtgctgtaagtaatctcttggctttagcgctgttagcccaggccgctggccgtctcaggaggaggagatcagccgccacctttctattgttcgtggcgtccttactggctaccgatctggcagggcacgtcatcccaggagctttggtgctgcgactgtatactgcaggacgggcccccgccgggggcgcttgccattttttgggaggatgtatggtgttcttcggactgtgccctctactgctggggtgcgggatggccgtagagcggtgtgtgggggtgacaaggcccctactccacgcggcccgtgtatcggtggcccgagcccgcctcgcactggcagccgtggccgcggtcgccttggccgtcgcactgcttccattggcccgtgtgggaagatatgaactacagtaccccggtacttggtgctttatcgggctagggcctccaggtgggtggcggcaggccctcctcgctggtctatttgctagcctgggcctggtggcgcttttggctgccctggtgtgcaataccctgagcggtctcgcgttgctgagagcgcggtggagaaggcgcagcagaagaccgccccccgcaagcgggcccgattcgaggcgaagatggggcgcgcatgggcccaggtcagccagtgcatcttctgccagctcaatcgcttcagcaagcacattttttgggggttctaggagttcgggcagcgctcgtcgcgcacgagctcatgacgtggagatggtgggtcaactggtgggtatcatggttgtcagttgcatatgttggtcccccatgttggtgctggttgcattagcagtagggggctggagttccaccagcctacaaaggcctctcttccttgccgtaagacttgcatcctggaatcagatcctagatccctgggtttacatcctgctccggcaagcagttctgcggcaacttctcaggttactccctcctcgagctggggcgaaaggagggcccgctgggttggggctgacaccatcagcctgggaggcatccagtctgcgcagctcccgacatagcggccttagccacttttag

SEQ ID NO: 17638 - DNA, 1209 bp, Artificial Sequence
  derived and/or modified sequence
atgagcccctgtggccccctgaacctgagcctggccggggaggccaccacctgtgccgccccctgggtgcccaacaccagcgctgtgccccccagcggggccagccctgccctgcccatcttctccatgaccctgggcgctgtgagcaacctgctggccctggccctgctggcccaggccgccggccgcctgcggaggagaagatctgctgccaccttcctgctgtttgtggccagcctgctggccacagacctggccggccacgtgattcctggggccctggtgctgcggctgtacacagctggccgggccccagctgggggcgcctgccacttcctgggcggctgcatggtgttcttcggcctgtgccccctgctgctgggctgcggcatggctgtggagcgctgtgtgggcgtgacccggcccctgctgcacgccgcccgggtgtctgtggcccgggcccggctggccctggccgctgtggccgctgtggccctggccgtggccctgctgcccctggcccgggtgggccgctatgagctgcagtacccaggcacctggtgcttcatcggcctgggccccccaggcggctggaggcaggccctgctggccggcctgtttgccagcctgggcctggtggccctgctggccgccctggtgtgcaacaccctgagcggcctggccctgctgcgggcccgctggaggcggcgcagcagaagacctcctccagccagcggccctgacagcagaagacgctggggcgcccacggccccaggtctgccagcgccagcagcgccagcagcatcgccagcgccagcaccttcttcggcggcagccgcagcagcggcagcgcccggcgggcccgggcccatgatgtggagatggtgggccagctggtgggcatcatggtggtgtcctgcatctgctggagccccatgctggtgctggtggccctggccgtgggcggctggagcagcaccagcctgcagaggcccctcttcctggccgtgcggctggcctcctggaaccagatcctggacccctgggtgtacatcctgctgcggcaggccgtgctgcggcagctgctgcggctgctgcccccccgggccggggccaagggcggccctgctggcctgggcctgacccccagcgcctgggaggccagcagcctgcggagcagccgccacagcggcctgagccacttctag

SEQ ID NO: 17639 - DNA, 1209 bp, Artificial Sequence
  derived and/or modified sequence
atgagcccctgcggccccctgaacctgagcctggccggcgaggccaccacctgtgccgccccctgggtaccaaatacctcagccgtgcctcccagtggagcttcacctgcgttgcctatcttctccatgacccttggcgccgtttccaaccttctggcattagcgcttctggcccaggccgcaggacgcctcaggaggcgcaggtcagccgccacattcctcttatttgtggcttccttattggccaccgatctcgccggccatgtgattcccggagcactggtgctgcgactgtacacagctgggcgcgcacctgcaggtggcgcatgccactttcttggtggttgtatggtcttctttgggctttgcccccttcttctgggatgcggaatggctgtggaacggtgtgtgggtgtaacacgtccactcctgcacgctgctagagtttccgtagctcgggctagactcgcactagccgccgtagccgccgtcgcccttgcagtagccctcctgcctctggcccgcgtaggacggtatgagctgcagtatcctggtacctggtgttttattggtcttggaccacccggcggatggcggcaggctctgctagcaggtctattcgcctcactaggcctggtggccctgctggctgctctcgtgtgtaacaccctcagcggactggccctgttgagggccagatggcgccgccggagcagaagaccaccacccgccagtggcccagacagtaggcggagatggggagcgcacggccctcgttccgcttctgctagcagtgctagttccatcgcttcggccagcacatttttcgggggctcccgctcgtctggctcggccagacgagccagagcccacgatgtggagatggtgggccaactcgtggggatcatggtagtctcctgtatttgctggagccctatgctagtgctcgtggcgttggctgttggagggtggagctcaacgtctcttcagcggcctcttttcctggccgtccggctcgcctcttggaatcagattctcgatccctgggtatacattctcctgagacaagctgtgctcagacagctgctgaggctgctgcctccccgcgctggcgctaaagggggaccagccgggctgggtctgaccccctcggcctgggaggctagcagcctgaggtctagtcgtcacagtggtctgtcacatttttag

SEQ ID NO: 17640 - DNA, 1209 bp, Artificial Sequence
  derived and/or modified sequence
atgtccccctgtggaccgctcaacttgtctcttgcaggggaggccaccacttgtgctgcaccctgggtccccaatacgtcggcagtgcctcccagcggcgcatcacctgcgttacccatatttagcatgacgttgggtgccgtgtctaatctgctggccctagctctgctggctcaggccgcaggtaggctgcgtcggagaaggtccgctgctacctttctcttattcgtcgcttccctgctagcgactgacttggcgggtcacgtgataccgggagcactagtgctgcgcctgtatacagccggacgtgctcccgctggaggggcttgccatttcctgggtgggtgtatggtgttctttggactgtgtcctctgctcctcggatgtggcatggccgtggagaggtgcgtgggagtcactaggcctctgctgcacgctgccagggtcagtgtcgccagggctagactcgccctggccgctgtggctgctgtggcactggccgtggctctgcttcccttggccagagtgggcagatacgagcttcaatatcccggaacatggtgttttatcggcctgggccctcctgggggatggcgccaggcacttctcgctggcctcttcgcttccctcgggttggtggctctgctcgctgcgcttgtctgtaatacactgagcggtctcgcacttctacgagccaggtggaggcgtcgcagcaggcgccctcctcccgcttccggccctgactctaggcgcagatggggcgctcacggccctcgctccgcctccgcatctagtgcaagcagcatcgcctctgcctcaactttttttggaggatccagatctagcggaagcgctcgcagagccagagcgcatgacgttgaaatggtgggtcagctggtaggtatcatggtggtgagctgcatctgttggtcgcctatgctggttcttgtcgccctggccgtcgggggttggtcctctacttctttgcaacgtccactctttctcgctgtgcggttagcttcatggaaccagatactggacccgtgggtgtacatactccttaggcaagcggtgctgaggcagttgctcagactgctccctccacgggcaggcgcaaaaggcggacccgctggactaggcctgactcccagcgcctgggaggcgagtagtctgcgctcttcccggcacagtggccttagccacttctag

SEQ ID NO: 17641 - DNA, 1421 bp, Artificial Sequence
  derived and/or modified sequence
ggaagagggagggaggaagcggcttgccggagagccagggcgcagtgggcggcagggctgagcggccggtgatggggaccccacatcccaggcagtgccggcacccctggcgcctgacatgagcccttgcgggcccctcaacctgagcctggcgggcgaggcgaccacatgcgcggcgccctgggtccccaacacgtcggccgtgccgccgtcgggcgcttcgcccgcgctgcccatcttctccatgacgctgggcgccgtgtccaacctgctggcgctggcgctgctggcgcaggccgcgggccgcctgcgacgccgccgctcggccgccaccttcctgctgttcgtggccagcctgctggccaccgacctggcgggccacgtgatcccgggcgcgctggtgctgcgtctgtacactgcggggcgcgctccggccggcggggcctgccacttcctgggcggctgcatggtcttcttcggcctgtgcccgctgctgctgggctgtggcatggccgtggagcgctgcgtgggcgtcacgcggccgctgctccacgccgcgcgggtctcggtcgcccgcgcgcgcctggcgctggccgcggtggccgcggtggccttggccgtggcgctgctgccgctggcgcgcgtgggccgctatgagctgcagtacccgggcacgtggtgcttcatcggcctgggtcccccgggcggctggcgccaggcactgcttgctggcctcttcgccagcctcggcctggtcgcgctcctcgccgcgctggtgtgcaacacgctcagcggcctggccctgctacgcgcccgctggcgacgccgctcccgacggcctcccccggcctcaggccccgacagccggcgtcgctggggggcgcacggaccccgctcggcctccgcctcgtccgcctcgtccatcgcttcggcctccaccttctttggcggctctcggagcagcggctcggcacgcagagctcgcgcccacgacgtggagatggtgggccagcttgtcggtatcatggtggtgtcgtgcatctgctggagcccaatgctggtgttggtggcgctggccgtcggcggctggagctctacctccctgcagcggccactgttcctggccgtgcgccttgcctcctggaaccagatcctggacccttgggtgtacatcctactgcgccaggccgtgctgcgccaactgcttcgcctcttgcccccgagggccggagccaagggcggccccgcggggctgggcctaacaccgagcgcctgggaggccagctcgctgcgcagctcccggcacagcggcctcagccacttctaagcacaaccagaggcccaacgactaagccagcccaccctgggctgggcccaggtgcgcggcgcagagcctttgggaataaaaagccattctgcga

SEQ ID NO: 17642 - DNA, 1209 bp, Artificial Sequence
  derived and/or modified sequence
atgagcccctgcggccccctgaacctgagcctggccggcgaggccaccacctgcgccgccccctgggtgcccaacaccagcgccgtgccccccagcggcgccagccccgccctgcccatcttcagcatgaccctgggcgccgtgagcaacctgctggccctggccctgctggcccaggccgccggcagactgagaagaagaagaagcgccgccaccttcctgctgttcgtggccagcctgctggccaccgacctggccggccacgtgatccccggcgccctggtgctgagactgtacaccgccggcagagcccccgccggcggcgcctgccacttcctgggcggctgcatggtgttcttcggcctgtgccccctgctgctgggctgcggcatggccgtggagagatgcgtgggcgtgaccagacccctgctgcacgccgccagagtgagcgtggccagagccagactggccctggccgccgtggccgccgtggccctggccgtggccctgctgcccctggccagagtgggcagatacgagctgcagtaccccggcacctggtgcttcatcggcctgggcccccccggcggctggagacaggccctgctggccggcctgttcgccagcctgggcctggtggccctgctggccgccctggtgtgcaacaccctgagcggcctggccctgctgagagccagatggagaagaagaagcagaagacccccccccgccagcggccccgacagcagaagaagatggggcgcccacggccccagaagcgccagcgccagcagcgccagcagcatcgccagcgccagcaccttcttcggcggcagcagaagcagcggcagcgccagaagagccagagcccacgacgtggagatggtgggccagctggtgggcatcatggtggtgagctgcatctgctggagccccatgctggtgctggtggccctggccgtgggcggctggagcagcaccagcctgcagagacccctgttcctggccgtgagactggccagctggaaccagatcctggacccctgggtgtacatcctgctgagacaggccgtgctgagacagctgctgagactgctgccccccagagccggcgccaagggcggccccgccggcctgggcctgacccccagcgcctgggaggccagcagcctgagaagcagcagacacagcggcctgagccacttctag

SEQ ID NO: 17643 - protein, 358 aa, Artificial Sequence
  derived and/or modified sequence
MGNASNDSQSEDCETRQWLPPGESPAISSVMFSAGVLGNLIALALLARRWRGDVGCSAGRRSSLSLFHVLVTELVFTDLLGTCLISPVVLASYARNQTLVALAPESRACTYFAFAMTFFSLATMLMLFAMALERYLSIGHPYFYQRRVSRSGGLAVLPVIYAVSLLFCSLPLLDYGQYVQYCPGTWCFIRHGRTAYLQLYATLLLLLIVSVLACNFSVILNLIRMHRRSRRSRCGPSLGSGRGGPGARRRGERVSMAEETDHLILLAIMTITFAVCSLPFTIFAYMNETSSRKEKWDLQALRFLSINSIIDPWVFAILRPPVLRLMRSVLCCRISLRTQDATQTSCSTQSDASKQADL

SEQ ID NO: 17644 - DNA, 1077 bp, Artificial Sequence
  derived and/or modified sequence
atgggtaacgccagtaacgattcgcaaagtgaagactgcgagacacggcagtggctcccacctggagagtccccagcaattagctcagtgatgttctccgctggggtactggggaatctgatcgctttggctctcctggctcgtaggtggcgcggagatgttggttgttctgctggccggagatcgagtttgagtctgttccacgttctcgtgacggaactggtgttcacagacctgctcgggacatgccttattagccccgtggtgctggcctcatatgcaagaaatcagactctcgtagctttggcgcccgaaagccgtgcatgcacgtattttgcgttcgcaatgacatttttctccctagccaccatgctgatgctgtttgcaatggccctggagcgctacttgtctatcggacacccctacttctaccagcgtagggtttccaggagtggaggactggctgtgctccccgtaatttatgcagtttctctgcttttttgctcgcttccactgcttgattacggacaatacgtgcagtattgccctgggacctggtgtttcattcgtcacggtcggaccgcatatctgcagctgtatgcaaccttgctcctgctgttgatcgtttccgtgctcgcttgtaacttctccgtcatactgaatctgatcagaatgcatcgtcgctctcgccgatccagatgcggcccaagcctcggaagcgggcgcggaggacccggagctcggcgtcgtggggaacgtgtatccatggcggaggaaaccgaccacctaatactgcttgccatcatgactattacattcgccgtgtgttccctcccctttacaatttttgcctatatgaatgagacctcttcgcggaaggagaagtgggaccttcaagcccttcgcttcctctccatcaattctatcatcgatccttgggtttttgccattctgaggccgccagttctgaggctaatgcgatcagtactgtgttgtcgtatttctctccggacacaggacgcaacccaaacctcctgttccactcaaagcgatgcgtccaagcaagcggatttatag

SEQ ID NO: 17645 - DNA, 1077 bp, Artificial Sequence
  derived and/or modified sequence
atgggaaatgccagcaatgacagccagagcgaggactgtgagacccggcagtggctgcccccaggagagagccctgccatcagctctgtgatgttttctgctggggtgctgggcaacctgattgccctggccctgctggcccggcgctggagaggagatgtgggctgcagcgctggccgccgcagcagcctgagcctcttccacgtgctggtgacagagctggtgttcacagacctgctgggcacctgcctgatcagccctgtggtgctggccagctatgccaggaaccagaccctggtggccctggcccctgagagccgggcctgcacctactttgcctttgccatgaccttcttcagcctggccaccatgctgatgctgtttgccatggccctggagcgctacctgagcatcggccacccctacttctaccagaggagagtgagccgcagcggcggcctggccgtgctgcccgtcatctatgctgtgtccctgctcttctgcagcctgcccctgctggactatggccagtatgtgcagtactgccccggcacctggtgcttcatcagacatggccgcacagcctacctgcagctgtatgccaccctgctgctgctgctgattgtgtctgtgctggcctgcaacttcagcgtcatcctgaacctgatccgcatgcacagaagaagccgccgcagccgctgtggccccagcctgggcagcggccggggcggccctggggccaggagaagaggagagcgggtgtccatggccgaggagacagaccacctgatcctgctggccatcatgaccatcacctttgctgtgtgcagcctgcccttcaccatctttgcctacatgaatgagaccagcagcaggaaggagaagtgggacctgcaggccctgcgcttcctgagcatcaacagcatcatcgacccctgggtgtttgccatcctgcggccccctgtgctgcggctgatgaggtctgtgctgtgctgccgcatcagcctgcggacccaggatgccacccagaccagctgcagcacccagagtgatgccagcaagcaggccgacctgtag

SEQ ID NO: 17646 - DNA, 1077 bp, Artificial Sequence
  derived and/or modified sequence
atgggcaacgccagcaacgacagccagagcgaggactgcgagaccaggcagtggcttcctcctggggagtcccccgctattagctccgttatgttttccgctggcgtgttgggaaacctgatcgccctcgccctccttgcacggcgatggaggggtgacgtcggctgctccgccgggcgtcggtctagccttagcctatttcacgtgctcgttactgagctcgtatttacggatctcttgggcacttgccttatttctccagtggtgctggcatcctacgccaggaatcaaaccttggtcgccctcgctcctgaatcccgagcatgcacatactttgcattcgccatgacctttttctccctggcgactatgctgatgctatttgccatggcgcttgagcgatatcttagtattggccatccttacttctatcagcggcgagtgtcacgctcaggcggactcgccgtcctgccagtaatatatgcagtcagcctcctcttttgttcactcccactgttggattatggacagtacgtccaatattgtccgggcacctggtgttttatcaggcacgggcggactgcatacctgcagctgtacgccactctcctactactgctgatagtctcagtgctcgcctgcaatttttccgtgattctgaatctgattcggatgcaccgaaggagtcgacgaagcaggtgcggaccatccctcggctctggccgcggagggcccggtgctaggcgaaggggggaacgggtttccatggctgaggagaccgatcacctgattctccttgctatcatgacaattaccttcgcggtgtgtagtctgcccttcaccattttcgcctacatgaatgaaactagtagcaggaaagagaagtgggacttacaggctctgaggtttctgagtatcaactcaataattgacccctgggtgttcgcaatcttgcgtccaccagttctgcggttgatgcgcagcgtgctgtgctgtcgaatcagcttgcgaacacaggacgcaactcagacatcgtgctccactcagagcgatgcttccaagcaggccgatctctag

SEQ ID NO: 17647 - DNA, 1077 bp, Artificial Sequence
  derived and/or modified sequence
atgggaaatgcatcaaacgatagtcaatccgaagactgcgaaaccagacagtggttgccaccgggagaatctccggctatttcatccgtaatgttctcagccggagtgctggggaatctaatcgcattggccctcctggcccgaaggtggagaggcgatgtcggctgctccgctggtcggagatcctcgctttctctgtttcatgtgttggttactgagcttgtctttactgacctgctgggcacctgtcttatttctccagttgtcttggcttcctacgccaggaatcaaacgctggtggccctagcgcctgagagtagggcctgtacgtatttcgccttcgctatgacgttcttcagcttggcaacgatgctgatgctgtttgccatggcactggaacgttacctgtctattgggcacccctatttctatcagaggagggtttctcgctcaggcggattggccgttctgcctgttatttacgctgtttcactgttgttctgtagcttaccactgcttgactacggccagtatgtacagtactgtcccggtacatggtgtttcattaggcatgggaggactgcatacctgcagctgtatgccaccttgctcttactcctaattgtgtcagtgctggcctgtaacttctctgtcattttgaatctgattcggatgcatcgtcgaagccggaggtcccgctgtggtccctccctaggcagcgggagggggggaccaggcgcacgtcgcagaggggagagggtaagtatggcagaagaaaccgatcacctgattctccttgccatcatgaccatcacatttgcggtctgcagcctgccctttaccatctttgcttatatgaacgagacctcttcgcgcaaggagaaatgggacttacaggccctgcggttcctaagcattaactctattattgatccatgggtgtttgctatcctcagaccccctgtgttaagattaatgcggtcagtcctgtgttgtaggattagcctccgaacccaagatgcgacccagactagctgtagcacacaatcagacgcctcaaagcaagctgacctgtag

SEQ ID NO: 17648 - DNA, 2383 bp, Artificial Sequence
  derived and/or modified sequence
gccgccgtcggcgcgctgggtgcgggaagggggctctggatttcggtccctcccctttttcctctgagtctcggaacgctccggctctcagaccctcttcctcccaggtaaaggccgggagaggagggcgcatctcttttccaggcaccccaccatgggcaatgcctccaatgactcccagtctgaggactgcgagacgcgacagtggcttcccccaggcgaaagcccagccatcagctccgtcatgttctcggccggggtgctggggaacctcatagcactggcgctgctggcgcgccgctggcggggggacgtggggtgcagcgccggccgcaggagctccctctccttgttccacgtgctggtgaccgagctggtgttcaccgacctgctcgggacctgcctcatcagcccagtggtactggcttcgtacgcgcggaaccagaccctggtggcactggcgcccgagagccgcgcgtgcacctacttcgctttcgccatgaccttcttcagcctggccacgatgctcatgctcttcgccatggccctggagcgctacctctcgatcgggcacccctacttctaccagcgccgcgtctcgcgctccgggggcctggccgtgctgcctgtcatctatgcagtctccctgctcttctgctcgctgccgctgctggactatgggcagtacgtccagtactgccccgggacctggtgcttcatccggcacgggcggaccgcttacctgcagctgtacgccaccctgctgctgcttctcattgtctcggtgctcgcctgcaacttcagtgtcattctcaacctcatccgcatgcaccgccgaagccggagaagccgctgcggaccttccctgggcagtggccggggcggccccggggcccgcaggagaggggaaagggtgtccatggcggaggagacggaccacctcattctcctggctatcatgaccatcaccttcgccgtctgctccttgcctttcacgatttttgcatatatgaatgaaacctcttcccgaaaggaaaaatgggacctccaagctcttaggtttttatcaattaattcaataattgacccttgggtctttgccatccttaggcctcctgttctgagactaatgcgttcagtcctctgttgtcggatttcattaagaacacaagatgcaacacaaacttcctgttctacacagtcagatgccagtaaacaggctgacctttgaggtcagtagtttaaaagttcttagttatatagcatctggaagatcattttgaaattgttccttggagaaatgaaaacagtgtgtaaacaaaatgaagctgccctaataaaaaggagtatacaaacatttaagctgtggtcaaggctacagatgtgctgacaaggcacttcatgtaaagtgtcagaaggagctacaaaacctaccctcagtgagcatggtacttggcctttggaggaacaatcggctgcattgaagatccagctgcctattgatttaagctttcctgttgaatgacaaagtatgtggttttgtaatttgtttgaaaccccaaacagtgactgtactttctattttaatcttgctactaccgttatacacatatagtgtacagccagaccagattaaacttcatatgtaatctctaggaagtcaatatgtggaagcaaccaagcctgctgtcttgtgatcacttagcgaaccctttatttgaacaatgaagttgaaaatcataggcaccttttactgtgatgtttgtgtatgtgggagtactctcatcactacagtattactcttacaagagtggactcagtgggttaacatcagttttgtttactcatcctccaggaactgcaggtcaagttgtcaggttatttattttataatgtccatatgctaatagtgatcaagaagactttaggaatggttctctcaacaagaaataatagaaatgtctcaaggcagttaattctcattaatactctttatttatcctatttctgggggaggatgtacgtggccatgtatgaagccaaatattaggcttaaaaactgaaaaatctggttcattcttcagatatactggaacccttttaaagttgatattggggccatgagtaaaatagattttataagatgactgtgttgtaccaaaattcatctgtctatattttatttagggaacatggtttgactcatcttatatgggaaaccatgtagcagtgagtcatatcttaatatatttctaaatgtttggcatgtaaatgtaaactcagcatcaaaatatttcagtgaatttgcactgtttaatcatagttactgtgtaaactcatctgaaatgttacaaaaataaactataaaacaaaaatttgaaaa

SEQ ID NO: 17649 - DNA, 1077 bp, Artificial Sequence
  derived and/or modified sequence
atgggcaacgccagcaacgacagccagagcgaggactgcgagaccagacagtggctgccccccggcgagagccccgccatcagcagcgtgatgttcagcgccggcgtgctgggcaacctgatcgccctggccctgctggccagaagatggagaggcgacgtgggctgcagcgccggcagaagaagcagcctgagcctgttccacgtgctggtgaccgagctggtgttcaccgacctgctgggcacctgcctgatcagccccgtggtgctggccagctacgccagaaaccagaccctggtggccctggcccccgagagcagagcctgcacctacttcgccttcgccatgaccttcttcagcctggccaccatgctgatgctgttcgccatggccctggagagatacctgagcatcggccacccctacttctaccagagaagagtgagcagaagcggcggcctggccgtgctgcccgtgatctacgccgtgagcctgctgttctgcagcctgcccctgctggactacggccagtacgtgcagtactgccccggcacctggtgcttcatcagacacggcagaaccgcctacctgcagctgtacgccaccctgctgctgctgctgatcgtgagcgtgctggcctgcaacttcagcgtgatcctgaacctgatcagaatgcacagaagaagcagaagaagcagatgcggccccagcctgggcagcggcagaggcggccccggcgccagaagaagaggcgagagagtgagcatggccgaggagaccgaccacctgatcctgctggccatcatgaccatcaccttcgccgtgtgcagcctgcccttcaccatcttcgcctacatgaacgagaccagcagcagaaaggagaagtgggacctgcaggccctgagattcctgagcatcaacagcatcatcgacccctgggtgttcgccatcctgagaccccccgtgctgagactgatgagaagcgtgctgtgctgcagaatcagcctgagaacccaggacgccacccagaccagctgcagcacccagagcgacgccagcaagcaggccgacctgtag

SEQ ID NO: 17650 - protein, 488 aa, Artificial Sequence
  derived and/or modified sequence
MSTPGVNSSASLSPDRLNSPVTIPAVMFIFGVVGNLVAIVVLCKSRKEQKETTFYTLVCGLAVTDLLGTLLVSPVTIATYMKGQWPGGQPLCEYSTFILLFFSLSGLSIICAMSVERYLAINHAYFYSHYVDKRLAGLTLFAVYASNVLFCALPNMGLGSSRLQYPDTWCFIDWTTNVTAHAAYSYMYAGFSSFLILATVLCNVLVCGALLRMHRQFMRRTSLGTEQHHAAAAASVASRGHPAASPALPRLSDFRRRRSFRRIAGAEIQMVILLIATSLVVLICSIPLVVRVFVNQLYQPSLEREVSKNPDLQAIRIASVNPILDPWIYILLRKTVLSKAIEKIKCLFCRIGGSRRERSGQHCSDSQRTSSAMSGHSRSFISRELKEISSTSQTLLPDLSLPDLSENGLGGRNLLPGVPGMGLAQEDTTSLRTLRISETSDSSQGQDSESVLLVDEAGGSGRAGPAPKGSSLQVTFPSETLNLSEKCI

SEQ ID NO: 17651 - DNA, 1467 bp, Artificial Sequence
  derived and/or modified sequence
atgtctacacctggagtgaacagttccgctagtctgtcccccgaccgcttaaactcgccggtcactatacctgcagtgatgttcattttcggcgttgttggcaatctagtcgcaattgtggttctgtgcaaatcccggaaggaacagaaggagacaacgttctacacgctggtgtgcgggctggcagtgaccgatctgctcggcaccctgctggtatcacccgtaacaatcgcaacctatatgaaggggcagtggccaggcggacagccactctgtgagtatagcacctttattctgctgtttttctcgttgagcgggctctccatcatttgtgcgatgagtgtcgagcggtacttggccatcaaccacgcttatttttactcccactacgtggataaacgcctggctggattgactctctttgctgtgtacgcctccaatgtgctcttctgtgctttgcctaacatgggactgggcagcagcaggttgcaataccccgatacctggtgcttcatcgactggactacaaacgtaaccgcacatgctgcttattcatacatgtacgcaggcttttccagctttctgatcttggctaccgtcttgtgtaatgtcttggtgtgcggcgccctgctcaggatgcaccgacaattcatgaggcgcactagtttgggcaccgagcagcatcacgccgccgctgctgcttcagttgctagtagggggcacccggcagcctctcctgcgctcccaagattgtccgacttcagacgccgccgttctttccgacggatagctggtgccgaaattcaaatggtgatcttactgatagccacttcactcgtggtgctgatctgtagtatacctctggttgttcgcgtatttgtgaatcagttataccagcctagcctcgagcgagaggtctcaaaaaatccagatctgcaggctatccgtatcgcttcagtcaatccaattttggatccgtggatatacattctgttgcgtaagacagtgttgagcaaggctatcgagaagataaagtgccttttctgcaggattggcggctcacggagagaacgttcaggacagcattgctcagattcacagaggactagttcagccatgagtggacattctaggagcttcatttctcgcgagttgaaggagatttcaagtacctcccagacactcctccctgacctgagtctgcccgacctgtcagaaaatgggctgggtgggagaaaccttctacctggcgtgcctggcatggggctggctcaagaagacaccacgtcattacgcacgctgaggatcagcgaaacatcggatagctctcagggtcaagactctgaaagcgtgctattggtggatgaggctggcggaagcggtagggccgggccggctcccaagggttccagtttgcaagttacattcccttcagaaacgctgaatttatcagagaagtgtatttag

SEQ ID NO: 17652 - DNA, 1467 bp, Artificial Sequence
  derived and/or modified sequence
atgagcaccccaggagtgaacagcagcgccagcctgagcccagaccggctgaacagccctgtgaccatcccagctgtgatgttcatcttcggcgtggtgggcaacctggtggccatcgtggtgctgtgcaagagcaggaaggagcagaaggagaccaccttctacaccctggtgtgtggcctggccgtgacagacctgctgggcaccctgctggtgtcccctgtgaccatcgccacctacatgaagggccagtggccaggcggccagcccctgtgtgagtacagcaccttcatcctgctcttcttcagcctgagcggcctgagcatcatctgtgccatgtctgtggagcgctacctggccatcaaccacgcctacttctacagccactacgtggacaagaggctggccggcctgaccctgtttgctgtgtatgccagcaatgtgctcttctgtgccctgcccaacatgggcctgggcagcagccggctgcagtacccagacacctggtgcttcatcgactggaccaccaacgtgacagcccacgccgcctacagctacatgtatgccggcttcagcagcttcctgatcctggccaccgtgctgtgcaatgtgctggtgtgtggggccctgctgaggatgcaccggcagttcatgaggaggaccagcctgggcacagagcagcaccacgccgctgctgctgcctctgtggccagccggggccaccctgctgccagccctgccctgccccggctgagtgacttcagaagaagaagaagcttcagaagaattgctggagctgagatccagatggtgatcctgctgattgccaccagcctggtggtgctgatctgcagcatccccctggtggtgcgggtgtttgtgaaccagctgtaccagcccagcctggagcgggaggtgtccaagaacccagacctgcaggccatcagaattgcctctgtgaaccccatcctggacccctggatctacatcctgctgaggaagacagtgctgagcaaggccatcgagaagatcaagtgcctcttctgcagaattggaggcagcagaagagagaggagcggccagcactgcagcgacagccagaggaccagcagcgccatgagcggccacagccgctccttcatcagccgggagctgaaggagatcagcagcaccagccagaccctgctgcctgacctgagcctgcctgacctgtctgaaaatggcctgggcggcaggaacctgctgcccggggtgcccggcatgggcctggcccaggaggacaccaccagcctgcggaccctgcgcatcagcgagaccagtgacagcagccagggccaggacagcgagagcgtgctgctggtggatgaagctgggggcagcggccgggccggccctgcccccaagggcagcagcctgcaggtgaccttccccagcgagaccctgaacctgtctgagaagtgcatctag

SEQ ID NO: 17653 - DNA, 1467 bp, Artificial Sequence
  derived and/or modified sequence
atgagcacccccggcgtgaacagcagcgccagcctgagccccgaccgccttaactctccagtcaccatccccgcagttatgttcatctttggcgtagtcgggaatttagtagccatcgtagtgttatgcaagtctcgaaaagaacagaaggagacaaccttctacactctcgtgtgcggtctggccgttactgatcttctgggaaccctactcgtgtctccagtcacaatcgctacatacatgaaggggcagtggccaggaggacagccactgtgtgaatacagcacattcattctgcttttcttttccctgtccggtttgagtatcatctgcgctatgagtgttgagagataccttgctatcaatcacgcctacttctattctcactacgtggacaaaagattagcaggacttaccctattcgccgtctacgcaagtaatgtgctgttttgtgcccttcccaatatgggcctgggcagctctaggctccagtaccctgacacttggtgttttatcgactggaccaccaacgtgaccgcgcacgcagcatattcttacatgtatgctggattctcctcattcttgatcctagctactgtgctgtgcaacgtcctggtgtgcggtgctttgttgcggatgcaccggcagtttatgagacggacatcattgggaaccgagcagcatcatgcagcggccgcagcatcagtcgccagcagaggacatccagccgcgtctcctgctctgcctcggctttcagactttagacgtaggcgctcttttcgcaggatagccggggctgagatccaaatggtgattctcctgatcgcaacttctcttgtggtcctcatatgttccatccccttggttgtcagggtgttcgtgaaccagctgtaccagcccagcctagagcgcgaagtatccaaaaatcctgatctgcaggcaatcaggatagcgtctgtcaaccccatcctggatccatggatttacatcttgctcagaaagaccgtactgagtaaggctatcgagaagatcaaatgcctcttctgccggatcgggggctcccgcagagaaagaagtgggcaacattgcagcgattcccagcggacctcttctgctatgtctggtcattcaaggagctttatatccagagaactgaaagaaatttcctcaacgtctcagaccctcctgcccgatctaagtctgccagacctctctgagaatggactcggcgggaggaatctgttacccggagtgcccggcatgggactagctcaggaagatactacaagtttgcgaacattacggatctctgaaactagcgactctagtcagggacaggactcagaaagtgtcctcctcgtggacgaagcaggtggctcggggcgagctggaccagcccctaagggatcaagtctacaagtcacttttccctcagagactctgaacctgtctgagaagtgcatctag

SEQ ID NO: 17654 - DNA, 1467 bp, Artificial Sequence
  derived and/or modified sequence
atgtccacccccggagtaaattcttcggcaagtctgtcgcccgaccggcttaattccccagttactattcccgctgtgatgtttattttcggagtcgtcggcaacctggtagctattgtggtcctctgcaagtcaaggaaggagcagaaagagaccaccttttatactctggtctgcgggttagcggtcactgatctgctggggaccctcttagttagcccggtgacaatagcaacttacatgaagggacagtggccaggaggacagccgctgtgcgagtattcaacttttatcctcctgttcttctcgcttagtggtctcagtataatctgcgccatgtctgttgagagatacctggcaatcaaccatgcctacttctactcacattatgtcgataaaagactcgctggactaactctttttgctgtatatgcatctaatgtactattctgtgcccttccaaacatgggactcgggagcagccgtctgcagtaccctgatacctggtgcttcatcgactggacgaccaacgtaacggcccacgctgcatactcttacatgtatgctggattttcatcattcctgatcctggcaacagtgctatgcaacgtcctagtgtgtggcgcactccttaggatgcacagacagtttatgcggaggacctccctggggaccgagcagcaccatgctgccgcagccgctagcgttgcctctcggggtcatcctgcagccagtccagccttgccacggttgagcgattttaggagaagacggtccttccgaagaattgctggagcagaaatccagatggtgatattacttatcgcgacaagtctcgttgttcttatatgcagcatccccttagtcgtacgggtgttcgtgaaccagttgtaccagccttctctcgaacgcgaggtctctaagaaccctgacctacaagctattcgtattgcatctgtaaaccctattttggacccctggatttatattctgttaagaaaaaccgtgctatccaaggcgatcgaaaaaatcaaatgcctgttttgtagaattgggggatctcgaagagaaaggtccgggcagcactgttctgactcacagagaaccagtagcgccatgtcgggccactcccgttccttcatcagcagagagctgaaggaaatcagttcaaccagtcagacactgctcccagatctttccctccccgacctaagtgagaatggtctcggcggtcgcaatctgttgccaggcgtgcccggaatgggactggctcaggaagatacaacctcattaaggacactgaggatctccgagacgtccgattcatcccagggccaggatagtgaatcggtcctgttggtggatgaggccggtgggtcgggtagagctgggccagctccaaaaggatctagtctccaggtgactttcccgagtgagacgctcaatctttccgagaagtgcatctag

SEQ ID NO: 17655 - DNA, 3848 bp, Artificial Sequence
  derived and/or modified sequence
aaaacaactgccctctcttccacgatctagatgttgcggcccgcggacaggaggttcaagaaatagtacactccgagcggcaggcagcgaggcggaaacggtcgccggtttcagtggtggccccactggaagccgagttcaggagcggctaagcggtcgccggggaaagcaccggggcttcccagggtcccctccgagttcccactccgcacctccgagggcgtgaaaaccacgggagccgccccaccccgcgcgcccagccccgccccagcccagacaccgccccccgccagtcttccctgcggcgcccagggaggacgcgctccgcccccttccaatccggccaatgggcgcccgggcagcgcgcggtttgcctccgcctccgccagggaaacttggaggaggagaaaagtttgtacagagggtggaaaggcgagagcggagctccaagcccggcagcccgagaggaagatgaacagccccaggccagagcctctggcagagtggaccccgagccgcccccaggtagccaggagcggcctcagcggcagccgcaaactccagtagccgcccgtgctgcccgtggctggggcggagggcagccagagctggggaccaaggctccgcgccacctgcgcgcacagcctcacacctgaacgctgtcctcccgcagacgagaccggcgggcactgcaaagctgggactcgtctttgaaggaaaaaaaatagcgagtaagaaatccagcaccattcttcactgacccatcccgctgcacctcttgtttcccaagtttttgaaagctggcaactctgacctcggtgtccaaaaatcgacagccactgagaccggctttgagaagccgaagatttggcagtttccagactgagcaggacaaggtgaaagcaggttggaggcgggtccaggacatctgagggctgaccctgggggctcgtgaggctgccaccgctgctgccgctacagacccagccttgcactccaaggctgcgcaccgccagccactatcatgtccactcccggggtcaattcgtccgcctccttgagccccgaccggctgaacagcccagtgaccatcccggcggtgatgttcatcttcggggtggtgggcaacctggtggccatcgtggtgctgtgcaagtcgcgcaaggagcagaaggagacgaccttctacacgctggtatgtgggctggctgtcaccgacctgttgggcactttgttggtgagcccggtgaccatcgccacgtacatgaagggccaatggcccgggggccagccgctgtgcgagtacagcaccttcattctgctcttcttcagcctgtccggcctcagcatcatctgcgccatgagtgtcgagcgctacctggccatcaaccatgcctatttctacagccactacgtggacaagcgattggcgggcctcacgctctttgcagtctatgcgtccaacgtgctcttttgcgcgctgcccaacatgggtctcggtagctcgcggctgcagtacccagacacctggtgcttcatcgactggaccaccaacgtgacggcgcacgccgcctactcctacatgtacgcgggcttcagctccttcctcattctcgccaccgtcctctgcaacgtgcttgtgtgcggcgcgctgctccgcatgcaccgccagttcatgcgccgcacctcgctgggcaccgagcagcaccacgcggccgcggccgcctcggttgcctcccggggccaccccgctgcctccccagccttgccgcgcctcagcgactttcggcgccgccggagcttccgccgcatcgcgggcgccgagatccagatggtcatcttactcattgccacctccctggtggtgctcatctgctccatcccgctcgtggtgcgagtattcgtcaaccagttatatcagccaagtttggagcgagaagtcagtaaaaatccagatttgcaggccatccgaattgcttctgtgaaccccatcctagacccctggatatatatcctcctgagaaagacagtgctcagtaaagcaatagagaagatcaaatgcctcttctgccgcattggcgggtcccgcagggagcgctccggacagcactgctcagacagtcaaaggacatcttctgccatgtcaggccactctcgctccttcatctcccgggagctgaaggagatcagcagtacatctcagaccctcctgccagacctctcactgccagacctcagtgaaaatggccttggaggcaggaatttgcttccaggtgtgcctggcatgggcctggcccaggaagacaccacctcactgaggactttgcgaatatcagagacctcagactcttcacagggtcaggactcagagagtgtcttactggtggatgaggctggtgggagcggcagggctgggcctgcccctaaggggagctccctgcaagtcacatttcccagtgaaacactgaacttatcagaaaaatgtatataataggcaaggaaagaaatacagtactgtttctggacccttataaaatcctgtgcaatagacacatacatgtcacatttagctgtgctcagaagggctatcatcatcctacaactcacattagagaacatcctggcttttgagcacttttcaaacaatcaagttgactcacgtgggtcctgaggcctgcagcacgtcggatgctaccccactatgacagaggattgtggtcacaacttgatggctgcgaagacctaccctccgtttttctactagataggaggatggtagaagtttggctgctgtcataacatccagagctttgtcgtatttggcacacagcagaggcccagatattagaaaggctctattccaataaactatgaggactgccttatggatgatttaagtgtctcactaaagcatgaaatgtgaatttttattgttgtacatacgatttaaggtatttaaagtattttcttctctgtgagaaggtttattgttaatacaaggtataataaaattatcgcaacccctctccttccagtataaccagctgaagttgcagatgttagatatttttcataaacaagttcgagtcaaagttgaaaattcatagtaagattgatatctataaaatagatataaatttttaagagaaagaatttagtattatcaaagggataaagaaaaaaatactatttaagatgtgaaaattacagtccaaaatactgttctttccaggctatgtataaaatacatagtgaaaattgtttagtgatattacatttatttatccagaaaactgtgatttcaggagaacctaacatgctggtgaatattttcaactttttccctcactaattggtacttttaaaaacataacataaattttttgaagtctttaataaataacccataattgaagtgtataatataaaaaattttaaaaatctaagcagcttattgtttctctgaaagtgtgtgtagttttactttcctaaggaattaccaagaatatcctttaaaatttaaaaggatggcaagttgcatcagaaagctttattttgagatgtaaaaagattcccaaacgtggttacattagccattcatgtatgtcagaagtgcagaattggggcacttaatggtcaccttgtaacagttttgtgtaactcccagtgatgctgtacacatatttgaagggtctttctcaaagaaatattaagcatgttttgttgctcagtgtttttgtgaattgcttggttgtaattaaattctgagcctgatattgatatggttttaagaagcagttgtaccaagtgaaattattttggagattataataaatatatacattcaa

SEQ ID NO: 17656 - DNA, 1467 bp, Artificial Sequence
  derived and/or modified sequence
atgagcacccccggcgtgaacagcagcgccagcctgagccccgacagactgaacagccccgtgaccatccccgccgtgatgttcatcttcggcgtggtgggcaacctggtggccatcgtggtgctgtgcaagagcagaaaggagcagaaggagaccaccttctacaccctggtgtgcggcctggccgtgaccgacctgctgggcaccctgctggtgagccccgtgaccatcgccacctacatgaagggccagtggcccggcggccagcccctgtgcgagtacagcaccttcatcctgctgttcttcagcctgagcggcctgagcatcatctgcgccatgagcgtggagagatacctggccatcaaccacgcctacttctacagccactacgtggacaagagactggccggcctgaccctgttcgccgtgtacgccagcaacgtgctgttctgcgccctgcccaacatgggcctgggcagcagcagactgcagtaccccgacacctggtgcttcatcgactggaccaccaacgtgaccgcccacgccgcctacagctacatgtacgccggcttcagcagcttcctgatcctggccaccgtgctgtgcaacgtgctggtgtgcggcgccctgctgagaatgcacagacagttcatgagaagaaccagcctgggcaccgagcagcaccacgccgccgccgccgccagcgtggccagcagaggccaccccgccgccagccccgccctgcccagactgagcgacttcagaagaagaagaagcttcagaagaatcgccggcgccgagatccagatggtgatcctgctgatcgccaccagcctggtggtgctgatctgcagcatccccctggtggtgagagtgttcgtgaaccagctgtaccagcccagcctggagagagaggtgagcaagaaccccgacctgcaggccatcagaatcgccagcgtgaaccccatcctggacccctggatctacatcctgctgagaaagaccgtgctgagcaaggccatcgagaagatcaagtgcctgttctgcagaatcggcggcagcagaagagagagaagcggccagcactgcagcgacagccagagaaccagcagcgccatgagcggccacagcagaagcttcatcagcagagagctgaaggagatcagcagcaccagccagaccctgctgcccgacctgagcctgcccgacctgagcgagaacggcctgggcggcagaaacctgctgcccggcgtgcccggcatgggcctggcccaggaggacaccaccagcctgagaaccctgagaatcagcgagaccagcgacagcagccagggccaggacagcgagagcgtgctgctggtggacgaggccggcggcagcggcagagccggccccgcccccaagggcagcagcctgcaggtgaccttccccagcgagaccctgaacctgagcgagaagtgcatctag

SEQ ID NO: 17657 - protein, 386 aa, Artificial Sequence [sequence omitted]

SEQ ID NO: 17658 - DNA, 1161 bp, Artificial Sequence
  derived and/or modified sequence
atggccgactcctgcaggaatctcacctacgtgagaggcagtgtgggacccgccacaagcacgctcatgttcgtggctggcgtggtcggcaacggcctggcattggggattctgtccgcaagacgtcccgccaggccatcagcattcgcagttttggtcaccggtctggctgccaccgacctcctgggtaccagcttcctgagtccagctgtctttgtagcctatgcccggaactcgtccctgctcgggctagctcgcgggggaccagctctgtgtgacgcttttgcattcgcaatgactttttttggactcgccagtatgctcattctgtttgctatggccgtggaaagatgtctggccctctcacacccctatttatacgcccagttggatgggccccgctgtgctaggttggccttgcccgccatttatgcattttgcgtgctcttttgcgcactccccctgctgggactaggtcagcaccagcagtattgccctgggagctggtgtttccttagaatgcgctgggcgcagcctgggggtgcagccttctcattagcctatgccggactagtggcactgctggtcgccgctatctttctgtgtaatggatctgtgactttatctctctgtaggatgtacagacagcagaaaagacatcaaggatctctcggtccccgccctaggaccggtgaagatgaggtggatcatctgatcctgctggctctgatgactgtggtgatggccgtctgctctctcccactaacgatcagatgtttcacacaggccgtcgcccctgactcgagcagcgagatgggagacctgctagctttccgcttctacgccttcaaccccatccttgacccctgggtgtttattttattcagaaaggctgtgtttcagcgcctgaagctgtgggtttgttgtttgtgtttagggcccgcacacggggactctcagacgccactgagccaactcgccagtgggagaagagatcctcgagctccatcagctcccgtcggaaaggagggaagttgcgtgcctctgagcgcttggggcgaagggcaggtagaaccactccctcctacacagcagtcctcaggctccgccgtgggaacttcttctaaagcagaagcgagcgttgcttgctccctctgttag

SEQ ID NO: 17659 - DNA, 1161 bp, Artificial Sequence
  derived and/or modified sequence
atggctgacagctgcaggaacctgacctacgtgcggggctctgtgggccctgccaccagcaccctgatgtttgtggccggcgtggtgggcaatggcctggccctgggcatcctgagcgcccggcggcctgcccggcccagcgcctttgctgtgctggtgacaggcctggccgccacagacctgctgggcaccagcttcctgagccctgctgtgtttgtggcctatgccaggaacagcagcctgctgggcctggcccggggcggccctgccctgtgtgatgcctttgcctttgccatgaccttcttcggcctggcctccatgctgatcctgtttgccatggctgtggagcgctgcctggccctgagccacccctacctgtatgcccagctggatggcccccgctgtgcccggctggccctgcctgccatctatgccttctgtgtgctcttctgtgccctgcccctgctgggcctgggccagcaccagcagtactgccccggctcctggtgcttcctgaggatgcgctgggcccagcctggaggagctgccttcagcctggcctatgccggcctggtggccctgctggtggccgccatcttcctgtgcaatggatctgtgaccctgagcctgtgcaggatgtaccggcagcagaagaggcaccagggcagcctgggcccccggcccaggactggagaagatgaggtggaccacctgatcctgctggccctgatgacagtggtgatggctgtgtgcagcctgcccctgaccatccgctgcttcacccaggccgtggccccagacagcagcagcgagatgggagacctgctggccttccgcttctacgccttcaaccccatcctggacccctgggtgttcatcctcttcaggaaggctgtgttccagaggctgaagctgtgggtgtgctgcctgtgcctgggccctgcccacggggacagccagacccccctgagccagctggccagcggccggcgggacccccgggcccccagcgcccctgtgggcaaggagggcagctgtgtgcccctgagcgcctggggcgagggccaggtggagcccctgccccccacccagcagagcagcggcagcgctgtgggcaccagcagcaaggccgaggcctctgtggcctgcagcctgtgctag

SEQ ID NO: 17660 - DNA, 1161 bp, Artificial Sequence
  derived and/or modified sequence
atggccgacagctgccggaacctgacctacgtgcggggcagcgtggggccggccacctccaccctgatgtttgtagcaggcgtcgtagggaatggattagctttgggcatcctgtccgccagaagacccgctagaccttccgctttcgccgtgctggttaccgggctggccgcaaccgatctcctgggtacaagcttcttatccccggcagttttcgtagcttacgcaaggaacagttctctcctaggtctcgcgcgtggaggccctgctctgtgcgacgccttcgctttcgcgatgacctttttcggcctcgcatccatgctgatcctgttcgctatggctgtggagaggtgtctcgcgctgtcacatccttacttgtacgcccagctggacggccctaggtgtgcacgcctcgccttacctgccatctatgctttctgcgtcttattttgcgcgcttcccttgctcggactgggccagcatcagcagtactgtccaggaagttggtgctttctgcggatgcgatgggcccagccgggcggcgccgctttttcactcgcttatgctggtctggtggccctattggttgcggccatattcctatgcaatggatctgtcactctttcactgtgtaggatgtatcggcagcagaagcgccatcagggcagccttggcccacgaccacggacaggggaggatgaggtggaccacttaattctgctggcccttatgacagtggttatggcggtctgtagcctgcccttgacaattcgatgctttacacaggccgtcgccccggacagcagtagtgaaatgggagacttgttggcttttagattttatgcctttaatccaattctcgatccatgggtgtttattctcttcaggaaagctgtttttcaaaggctgaagctatgggtttgttgcctgtgcttgggcccagctcacggggactctcagacgcccctgtcccagctagcctctggaaggcgggacccccgagcaccctctgcgcccgtcggaaaggaaggatcctgtgtgcctctgtcagcctggggcgaaggacaggtagaaccattacctccaacacaacagagctctggtagcgccgtcggaaccagctcaaaggctgaggcctctgtggcttgttccctctgttag

SEQ ID NO: 17661 - DNA, 1161 bp, Artificial Sequence
  derived and/or modified sequence
atggcagacagttgccgcaatttaacatatgtgagaggatctgtcgggccagccacctcgacactgatgtttgtcgcaggggtcgtgggtaacggcttggccctgggcatcctctcagcacgcaggccggctaggccgagcgcattcgcggtgctggtcactggtttggctgccaccgatttacttgggaccagcttcctttctcccgctgtcttcgtcgcttacgccaggaacagcagtctgcttgggttggccaggggagggcctgctctctgcgacgcttttgctttcgctatgacattcttcgggctcgcatccatgctgattctgttcgccatggccgttgaacgttgcctggctctgagtcacccttatctctacgcccagttggatgggcctcggtgcgcacggctggcattgcctgctatctacgccttttgcgtgctcttctgcgctctcccattgctcgggctgggtcagcaccagcagtattgcccgggtagctggtgcttcttgcgcatgagatgggcgcagccagggggagccgctttcagcctggcgtacgccggtctggtggctctcttagttgcagcaattttcctttgcaatggatccgtgacattgtcactgtgtaggatgtatcggcaacaaaaacgacatcagggctctctggggcctagaccgcgtaccggagaggacgaggtcgaccacctgatattgctcgccttgatgaccgttgtgatggcagtgtgcagcctgccattgacaatccggtgctttacacaggctgtggcgcctgacagctcatccgagatgggagacttgctggcctttcgcttctatgcctttaatcctattctggacccttgggtgtttatactttttaggaaagccgtgttccagagactcaagctgtgggtctgttgcctttgccttggaccggcacacggcgactcacaaacccccctgagtcaactggcttctggacggagagatccgcgtgctccctccgctcctgtgggcaaagaaggttcatgtgtgccgttatctgcctggggagagggacaagtagaaccgctacccccaacccagcagtcctcagggagtgctgtgggcaccagcagcaaggcagaagctagcgtggcttgttccctgtgttag

SEQ ID NO: 17662 - DNA, 2085 bp, Artificial Sequence
  derived and/or modified sequence
aagctgacacacagaccgacacaggcagcgagagacacgaggagcaaagcaagtgaaggcacagacgcacgggacaggagagcctgggcaagactggagagcccagacctgggatggcggattcgtgcaggaacctcacctacgtgcggggctcggtggggccggccaccagcaccctgatgttcgtggccggtgtggtgggcaacgggctggccctgggcatcctgagcgcacggcgaccggcgcgcccctcggccttcgcggtgctggtgaccggactggcggccaccgacctgctgggcaccagcttcctgagcccggccgtgttcgtggcctatgcgcgcaacagctccctgctgggcctggcccgaggcggccccgccctgtgcgatgccttcgccttcgccatgaccttcttcggcctggcgtccatgctcatcctctttgccatggccgtggagcgctgcctggcgctgagccacccctacctctacgcgcagctggacgggccccgctgcgcccgcctggcgctgccagccatctacgccttctgcgtcctcttctgcgcgctgcccctgctgggcctgggccaacaccagcagtactgccccggcagctggtgcttcctccgcatgcgctgggcccagccgggcggcgccgccttctcgctggcctacgccggcctggtggccctgctggtggctgccatcttcctctgcaacggctcggtcaccctcagcctctgccgcatgtaccgccagcagaagcgccaccagggctctctgggtccacggccgcgcaccggagaggacgaggtggaccacctgatcctgctggccctcatgacagtggtcatggccgtgtgctccctgcctctcacgatccgctgcttcacccaggctgtcgcccctgacagcagcagtgagatgggggacctccttgccttccgcttctacgccttcaaccccatcctggacccctgggtcttcatccttttccgcaaggctgtcttccagcgactcaagctctgggtctgctgcctgtgcctcgggcctgcccacggagactcgcagacacccctttcccagctcgcctcagggaggagggacccaagggccccctctgctcctgtgggaaaggaggggagctgcgtgcctttgtcggcttggggcgaggggcaggtggagcccttgcctcccacacagcagtccagcggcagcgccgtgggaacgtcgtccaaagcagaagccagcgtcgcctgctccctctgctgacatttcaagctgaccctgtgatctctgccctgtcttcgggcgacaggagccagaaaatcagggacatggctgatggctgcggatgctggaaccttggcccccaaactctggggccgatcagctgctgtttctcctgcggcagggcagtcgctgctggctctgggaagagagtgagggacagaggaaacgtttatcctggagtgcagaaagaatggttctctcaaaataaccagtggcctggccgacctgctctggccctggattccccatccatctcattgtctaaatatttagaaggcggagaagttcccagaggcttctgtacagtcaggtctgctctggtctgggtgctggctccaatctgcgtccacttaggaggcccaactgcccaccccaagtccccaggggatggccctccccctctaccaagccactccaagagccagcccctttctgctccacaaaaaccacagttattggaaaagctccctgccttcccttgccgctggtcccccaccaggcttgggagccctggcatcccaaaggggcaacgggaggaaggggaggctgctgcattgtgggtgatgacgtaggacatgtgcttggtacaaaaagggcctgagacattccacctagcttgactggctgcaagatgagaactgggggggtgcaggtggtggggagacagatggagaagctggcagatgaagggtgggggctgcggatcccagggactgccccagaacacaaacctaagtcctgtgcctgtccccagggtcctgaataaataaaagcctccttgcagagcctg

SEQ ID NO: 17663 - DNA, 1161 bp, Artificial Sequence
  derived and/or modified sequence
atggccgacagctgcagaaacctgacctacgtgagaggcagcgtgggccccgccaccagcaccctgatgttcgtggccggcgtggtgggcaacggcctggccctgggcatcctgagcgccagaagacccgccagacccagcgccttcgccgtgctggtgaccggcctggccgccaccgacctgctgggcaccagcttcctgagccccgccgtgttcgtggcctacgccagaaacagcagcctgctgggcctggccagaggcggccccgccctgtgcgacgccttcgccttcgccatgaccttcttcggcctggccagcatgctgatcctgttcgccatggccgtggagagatgcctggccctgagccacccctacctgtacgcccagctggacggccccagatgcgccagactggccctgcccgccatctacgccttctgcgtgctgttctgcgccctgcccctgctgggcctgggccagcaccagcagtactgccccggcagctggtgcttcctgagaatgagatgggcccagcccggcggcgccgccttcagcctggcctacgccggcctggtggccctgctggtggccgccatcttcctgtgcaacggcagcgtgaccctgagcctgtgcagaatgtacagacagcagaagagacaccagggcagcctgggccccagacccagaaccggcgaggacgaggtggaccacctgatcctgctggccctgatgaccgtggtgatggccgtgtgcagcctgcccctgaccatcagatgcttcacccaggccgtggcccccgacagcagcagcgagatgggcgacctgctggccttcagattctacgccttcaaccccatcctggacccctgggtgttcatcctgttcagaaaggccgtgttccagagactgaagctgtgggtgtgctgcctgtgcctgggccccgcccacggcgacagccagacccccctgagccagctggccagcggcagaagagaccccagagcccccagcgcccccgtgggcaaggagggcagctgcgtgcccctgagcgcctggggcgagggccaggtggagcccctgccccccacccagcagagcagcggcagcgccgtgggcaccagcagcaaggccgaggccagcgtggcctgcagcctgtgctag

SEQ ID NO: 17664 - protein, 500 aa, Artificial Sequence
  derived and/or modified sequence
MAWAALLGLLAALLLLLLLSRRRTRRPGEPPLDLGSIPWLGYALDFGKDAASFLTRMKEKHGDIFTILVGGRYVTVLLDPHSYDAVVWEPRTRLDFHAYAIFLMERIFDVQLPHYSPSDEKARMKLTLLHRELQALTEAMYTNLHAVLLGDATEAGSGWHEMGLLDFSYSFLLRAGYLTLYGIEALPRTHESQAQDRVHSADVFHTFRQLDRLLPKLARGSLSVGDKDHMCSVKSRLWKLLSPARLARRAHRSKWLESYLLHLEEMGVSEEMQARALVLQLWATQGNMGPAAFWLLLFLLKNPEALAAVRGELESILWQAEQPVSQTTTLPQKVLDSTPVLDSVLSESLRLTAAPFITREVVVDLAMPMADGREFNLRRGDRLLLFPFLSPQRDPEIYTDPEVFKYNRFLNPDGSEKKDFYKDGKRLKNYNMPWGAGHNHCLGRSYAVNSIKQFVFLVLVHLDLELINADVEIPEFDLSRYGFGLMQPEHDVPVRYRIRP

SEQ ID NO: 17665 - DNA, 1503 bp, Artificial Sequence
  derived and/or modified sequence
atggcatgggccgcactcctgggcctcctcgcagcactgctgcttctgctcctgctgtctcggaggcgaacccgcaggccaggagagccccccctggatctgggaagcattccctggctgggttatgcattggattttgggaaggatgcggcgtcatttctgactagaatgaaagaaaagcatggtgacatcttcacaatcctggtggggggtagatatgttacagtgctgctggatccccactcatatgatgccgtggtgtgggagccccggacaaggctggattttcacgcctacgcaattttcctaatggagcgaatctttgatgtgcagcttccacattacagccccagcgacgagaaggcaaggatgaaactgacactgttgcaccgagaactgcaggctctcacagaagctatgtatactaacctgcatgccgtgttgcttggcgatgctaccgaggcaggaagcggctggcatgaaatggggttacttgacttttcgtactcttttctgttaagagccggctatctcacactctacggaattgaggctctcccgagaacacatgaatctcaggcgcaggatagggtccactccgccgatgtctttcacacctttcgacagttggatagactgctccctaaacttgcccgaggaagcttgtcagtgggggataaagatcacatgtgtagcgttaagagtaggctttggaagctgctttcaccagcacgtctggcccgacgcgcacatcgcagcaaatggctggagtcctaccttttgcatctcgaagagatgggggtgtccgaagaaatgcaggcgcgtgccctcgtgcttcaattatgggcaactcaaggaaatatgggcccagctgcattttggctgctgctgtttctcttgaagaatcccgaggccttagccgccgtgcggggagagctggaaagtatactctggcaggccgagcaacctgtgagccagacaactaccctgccacagaaagttctggattcaaccccggtgcttgattccgtgctaagcgaatctttgagactgaccgccgctccttttattacaagggaagtggtcgtagatttagctatgcctatggctgacggtcgggagttcaacctaagacgcggagacagattgctcctgtttccgttcctgtccccccagagggaccctgagatctatacggatcctgaggtcttcaagtacaatcgctttcttaatcctgacggtagcgaaaagaaggacttctataaagacgggaagcgattaaaaaactacaatatgccttggggtgccgggcacaaccactgtctcggacgcagctacgccgtgaacagcattaagcaattcgtgtttttggtcctcgtccatctagatctcgagctgattaacgccgatgtggagatacccgagttcgacctgtctcgttatggctttggcttgatgcagcccgagcatgacgtacctgtcaggtacagaattagaccctag

SEQ ID NO: 17666 - DNA, 1503 bp, Artificial Sequence
  derived and/or modified sequence
atggcctgggccgccctgctgggcctgctggccgccctgctgctgctgctgctgctgagcagaagaaggaccaggaggcctggagagccccccctggacctgggcagcatcccctggctgggctacgccctggactttgggaaggatgctgccagcttcctgaccaggatgaaggagaagcatggagacatcttcaccatcctggtgggcggccgctacgtgacagtgctgctggacccccacagctatgatgctgtggtgtgggagcccaggacccggctggacttccacgcctatgccatcttcctgatggagcgcatctttgatgtgcagctgccccactacagccccagtgatgagaaggccaggatgaagctgaccctgctgcaccgggagctgcaggccctgacagaggccatgtacaccaacctgcatgctgtgctgctgggagatgccacagaagctggcagcggctggcatgagatgggcctgctggacttctcctacagcttcctgctgcgggccggctacctgaccctgtatggaattgaggccctgcccaggacccatgagagccaggcccaggacagagtgcacagcgcagatgtgttccacaccttccggcagctggaccggctgctgcccaagctggcccggggcagcctgtctgtgggggacaaggaccacatgtgcagcgtgaagagccggctgtggaagctgctgagccctgcccggctggcccggcgggcccacaggagcaagtggctggagagctacctgctgcacctggaggagatgggcgtgtctgaggagatgcaggcccgggccctggtgctgcagctgtgggccacccagggcaacatgggccctgctgccttctggctgctgctcttcctgctgaagaaccctgaggccctggccgctgtgcggggggagctggagagcatcctgtggcaggccgagcagcctgtgtcccagaccaccaccctgccccagaaggtgctggacagcacccctgtgctggacagcgtgctgtctgagagcctgcggctgacagctgcccccttcatcacccgggaggtggtggtggacctggccatgcccatggctgatggccgggagttcaacctgcggcggggggaccggctgctgctcttccccttcctgagcccccagagggaccctgagatctacacagatcctgaggtgttcaagtacaaccgcttcctgaacccagatggcagcgagaagaaggacttctacaaggatggcaagaggctgaagaactacaacatgccctggggcgccggccacaaccactgcctgggccgctcctatgctgtgaacagcatcaagcagtttgtgttcctggtgctggtgcacctggacctggagctgatcaatgctgatgtggagatccctgagtttgacctgagccgctatggcttcggcctgatgcagcctgagcatgatgtgcctgtgcgctaccgcatccggccctag

SEQ ID NO: 17667 - DNA, 1503 bp, Artificial Sequence
  derived and/or modified sequence
atggcctgggccgccctgctgggcctgctggccgccctgctgctgctcctgctattgtccaggagacggacaagacgacccggggaacctcctcttgacctggggagcataccttggttagggtacgctcttgactttgggaaagatgctgcaagctttctcaccagaatgaaggagaaacatggcgacatttttaccattctcgtgggtggtcggtatgtgacggtactgcttgatccacatagctacgacgccgtagtatgggaaccccgcacccggcttgactttcatgcctatgcaatatttctgatggaacggatcttcgacgtccagcttccccactacagccctagcgatgaaaaggccaggatgaagctgaccctgctgcacagggagctgcaggccctaaccgaagcaatgtacaccaatcttcacgccgtactactgggggatgcaaccgaagccggaagcgggtggcatgagatgggtctgctcgacttttcctatagttttctgcttcgtgctggatatctcacgctgtacggaattgaggcccttcctcggactcatgagagccaggcacaggacagagtgcactccgccgacgtctttcatacgttccgtcaattagaccgactgctcccaaagctggcacgggggagtctgagtgttggtgacaaagatcacatgtgctcagtgaaatcgagactttggaaactgcttagtccagcacgtcttgcaaggcgtgcacacaggagcaaatggttggaatcttacctcctccatttggaggagatgggcgtatccgaagaaatgcaggctagagcactggtcctgcagctctgggctacgcagggaaacatggggcccgccgcattctggttgctgctttttttgttaaagaacccagaagcgctggctgcagtgcgcggagagttagagtctatcttgtggcaggctgagcagcctgtgtcccagactacgactctgccacaaaaggtgcttgacagtacaccagtcctggatagcgtgctgtccgagtctttgcggttgactgcagcaccgtttattacccgcgaagtggtagtggacctggctatgcctatggccgacggcagggaattcaacctacgacgcggggacagactgctgctgttcccctttttgtcaccccagagagaccccgagatctacactgaccctgaagttttcaagtataatcggtttttaaatccggatggaagtgagaaaaaagatttttacaaggacggcaagaggctgaaaaactataacatgccatggggagccggtcataaccactgcttaggcaggtcatatgccgtgaactccatcaagcaatttgtcttcctggtgcttgttcacctcgatctcgagctcataaatgccgatgtggaaattcccgagtttgatctttcacgctatgggtttgggctgatgcaaccagagcatgatgtgccagttaggtacaggattcggccatag

SEQ ID NO: 17668 - DNA, 1503 bp, Artificial Sequence
  derived and/or modified sequence
atggcatgggccgcactgttagggttgctggccgctcttctcttacttctccttcttagcaggcgcaggacaagacgcccaggagagcctcccttagaccttgggtctattccctggctcggctacgcactggattttggaaaagacgcagcctcctttctgactagaatgaaagagaaacacggagatatcttcactatcctggtcggcggtcgatatgtcaccgtcctactggatccacattcttatgacgcagtcgtgtgggagccaaggactcgattagatttccacgcgtatgccatcttccttatggaaagaatcttcgacgttcagctcccccactatagtcccagcgatgaaaaagcacgcatgaaacttacccttctccaccgggagttgcaggctttgacagaagctatgtacacaaatttgcacgccgtgctgctgggtgacgccacggaggctggatcaggttggcatgagatgggcctgctcgatttttcttactcttttctcctacgcgctggttaccttaccctgtacggaatagaggccctgcctcgaacccacgaaagccaagcacaggacagagtccatagcgccgatgtattccataccttcagacagctggacagactgctgcctaagctggccagaggcagcttgagtgttggggacaaggatcatatgtgctctgtcaaaagtagactttggaaacttctcagccccgcacggctagccaggagggcccatagaagtaagtggttagagtcttacctgctgcatcttgaggaaatgggagtctccgaagaaatgcaggccagagcactggttcttcaactatgggccacacaaggcaacatggggcctgcagcattttggctgctcctgtttctgctgaagaaccctgaggccctagccgctgtgcgtggcgaactggaatcaatcctgtggcaagcggagcaaccagtgtcgcagaccaccacattaccacagaaggtgctggacagcacacccgttcttgactctgtgttatctgaatccctgcggctgaccgccgcacctttcatcacccgcgaagtggtggtggacttggccatgcctatggccgatggcagagagtttaacttgagacgcggagacaggctcctgctgtttccgttccttagccctcagcgtgaccccgagatttataccgatcccgaagtcttcaaatacaatagattccttaaccccgacggcagtgaaaagaaggacttctacaaagacggcaagcggctgaagaactacaacatgccttggggtgctggtcacaatcattgcctagggaggtcatacgccgtgaacagcattaagcagttcgtctttcttgttctggtccatctggacctggaattgatcaacgccgatgttgaaatccctgaattcgacctgtcaagatatgggttcggccttatgcagccggagcacgacgtgcccgttcggtaccggatccgaccatag

SEQ ID NO: 17669 - DNA, 1998 bp, Artificial Sequence
  derived and/or modified sequence
gccagccccgccagccccgccagccccgcgatggcttgggccgcgctcctcggcctcctggccgcactgttgctgctgctgctactgagccgccgccgcacgcggcgacctggtgagcctcccctggacctgggcagcatcccctggttggggtatgccttggactttggaaaagatgctgccagcttcctcacgaggatgaaggagaagcacggtgacatctttactatactggttgggggcaggtatgtcaccgttctcctggacccacactcctacgacgcggtggtgtgggagcctcgcaccaggctcgacttccatgcctatgccatcttcctcatggagaggatttttgatgtgcagcttccacattacagccccagtgatgaaaaggccaggatgaaactgactcttctccacagagagctccaggcactcacagaagccatgtataccaacctccatgcagtgctgttgggcgatgctacagaagcaggcagtggctggcacgagatgggtctcctcgacttctcctacagcttcctgctcagagccggctacctgactctttacggaattgaggcgctgccacgcacccatgaaagccaggcccaggaccgcgtccactcagctgatgtcttccacacctttcgccagctcgaccggctgctccccaaactggcccgtggctccctgtcagtgggggacaaggaccacatgtgcagtgtcaaaagtcgcctgtggaagctgctatccccagccaggctggccaggcgggcccaccggagcaaatggctggagagttacctgctgcacctggaggagatgggtgtgtcagaggagatgcaggcacgggccctggtgctgcagctgtgggccacacaggggaatatgggtcccgctgccttctggctcctgctcttccttctcaagaatcctgaagccctggctgctgtccgcggagagctcgagagtatcctttggcaagcggagcagcctgtctcgcagacgaccactctcccacagaaggttctagacagcacacctgtgcttgatagcgtgctgagtgagagcctcaggcttacagctgcccccttcatcacccgcgaggttgtggtggacctggccatgcccatggcagacgggcgagaattcaacctgcgacgtggtgaccgcctcctcctcttccccttcctgagcccccagagagacccagaaatctacacagacccagaggtatttaaatacaaccgattcctgaaccctgacggatcagagaagaaagacttttacaaggatgggaaacggctgaagaattacaacatgccctggggggcggggcacaatcactgcctggggaggagttatgcggtcaacagcatcaaacaatttgtgttccttgtgctggtgcacttggacttggagctgatcaacgcagatgtggagatccctgagtttgacctcagcaggtacggcttcggtctgatgcagccggaacacgacgtgcccgtccgctaccgcatccgcccatgacacagggagcagatggatccacgtgctcgcctctgcccagcctgccccagcctgccccagcctcccagctttctgtgtgcacagttggcccgggtgcaggtgctagcattaccacttccctgcttttctcccagaaggctgggtccaggggagggaaaagctaagagggtgaacaaagaaaagacattgaaagctctatggattatccactgcaaagttttctttccaaaatcaggctttgtctgctcccaattcacctcgttactctcacctcgtgatatccacaaatgctattcagataaggcagaactaggagtcttcactgctctgcccccaactcccggaggtgtcaccttcctagttcttatgagctagcatggcccgggccttatccagtcaaagcggatgctggccacagaaaggccactcaggatgtcctttgtgtccattgatgtcattcagcag

SEQ ID NO: 17670 - DNA, 1503 bp, Artificial Sequence
  derived and/or modified sequence
atggcctgggccgccctgctgggcctgctggccgccctgctgctgctgctgctgctgagcagaagaagaaccagaagacccggcgagccccccctggacctgggcagcatcccctggctgggctacgccctggacttcggcaaggacgccgccagcttcctgaccagaatgaaggagaagcacggcgacatcttcaccatcctggtgggcggcagatacgtgaccgtgctgctggacccccacagctacgacgccgtggtgtgggagcccagaaccagactggacttccacgcctacgccatcttcctgatggagagaatcttcgacgtgcagctgccccactacagccccagcgacgagaaggccagaatgaagctgaccctgctgcacagagagctgcaggccctgaccgaggccatgtacaccaacctgcacgccgtgctgctgggcgacgccaccgaggccggcagcggctggcacgagatgggcctgctggacttcagctacagcttcctgctgagagccggctacctgaccctgtacggcatcgaggccctgcccagaacccacgagagccaggcccaggacagagtgcacagcgccgacgtgttccacaccttcagacagctggacagactgctgcccaagctggccagaggcagcctgagcgtgggcgacaaggaccacatgtgcagcgtgaagagcagactgtggaagctgctgagccccgccagactggccagaagagcccacagaagcaagtggctggagagctacctgctgcacctggaggagatgggcgtgagcgaggagatgcaggccagagccctggtgctgcagctgtgggccacccagggcaacatgggccccgccgccttctggctgctgctgttcctgctgaagaaccccgaggccctggccgccgtgagaggcgagctggagagcatcctgtggcaggccgagcagcccgtgagccagaccaccaccctgccccagaaggtgctggacagcacccccgtgctggacagcgtgctgagcgagagcctgagactgaccgccgcccccttcatcaccagagaggtggtggtggacctggccatgcccatggccgacggcagagagttcaacctgagaagaggcgacagactgctgctgttccccttcctgagcccccagagagaccccgagatctacaccgaccccgaggtgttcaagtacaacagattcctgaaccccgacggcagcgagaagaaggacttctacaaggacggcaagagactgaagaactacaacatgccctggggcgccggccacaaccactgcctgggcagaagctacgccgtgaacagcatcaagcagttcgtgttcctggtgctggtgcacctggacctggagctgatcaacgccgacgtggagatccccgagttcgacctgagcagatacggcttcggcctgatgcagcccgagcacgacgtgcccgtgagatacagaatcagaccctag

SEQ ID NO: 17671 - protein, 599 aa, Artificial Sequence
  derived and/or modified sequence
MSRSLLLWFLLFLLLLPPLPVLLADPGAPTPVNPCCYYPCQHQGICVRFGLDRYQCDCTRTGYSGPNCTIPGLWTWLRNSLRPSPSFTHFLLTHGRWFWEFVNATFIREMLMRLVLTVRSNLIPSPPTYNSAHDYISWESFSNVSYYTRILPSVPKDCPTPMGTKGKKQLPDAQLLARRFLLRRKFIPDPQGTNLMFAFFAQHFTHQFFKTSGKMGPGFTKALGHGVDLGHIYGDNLERQYQLRLFKDGKLKYQVLDGEMYPPSVEEAPVLMHYPRGIPPQSQMAVGQEVFGLLPGLMLYATLWLREHNRVCDLLKAEHPTWGDEQLFQTTRLILIGETIKIVIEEYVQQLSGYFLQLKFDPELLFGVQFQYRNRIAMEFNHLYHWHPLMPDSFKVGSQEYSYEQFLFNTSMLVDYGVEALVDAFSRQIAGRIGGGRNMDHHILHVAVDVIRESREMRLQPFNEYRKRFGMKPYTSFQELVGEKEMAAELEELYGDIDALEFYPGLLLEKCHPNSIFGESMIEIGAPFSLKGLLGNPICSPEYWKPSTFGGEVGFNIVKTATLKKLVCLNTKTCPYVSFRVPDASQDDGPAVERPSTEL

SEQ ID NO: 17672 - DNA, 1800 bp, Artificial Sequence
  derived and/or modified sequence
atgagcagaagcctgctgctgtggttcctgctgttcctgctgctgctgccccccctgcccgtgctgctggccgaccccggcgcccccacccccgtgaacccctgctgctactacccctgccagcaccagggcatctgcgtgagattcggcctggacagataccagtgcgactgcaccagaaccggctacagcggccccaactgcaccatccccggcctgtggacctggctgagaaacagcctgagacccagccccagcttcacccacttcctgctgacccacggcagatggttctgggagttcgtgaacgccaccttcatcagagagatgctgatgagactggtgctgaccgtgagaagcaacctgatccccagcccccccacctacaacagcgcccacgactacatcagctgggagagcttcagcaacgtgagctactacaccagaatcctgcccagcgtgcccaaggactgccccacccccatgggcaccaagggcaagaagcagctgcccgacgcccagctgctggccagaagattcctgctgagaagaaagttcatccccgacccccagggcaccaacctgatgttcgccttcttcgcccagcacttcacccaccagttcttcaagaccagcggcaagatgggccccggcttcaccaaggccctgggccacggcgtggacctgggccacatctacggcgacaacctggagagacagtaccagctgagactgttcaaggacggcaagctgaagtaccaggtgctggacggcgagatgtacccccccagcgtggaggaggcccccgtgctgatgcactaccccagaggcatccccccccagagccagatggccgtgggccaggaggtgttcggcctgctgcccggcctgatgctgtacgccaccctgtggctgagagagcacaacagagtgtgcgacctgctgaaggccgagcaccccacctggggcgacgagcagctgttccagaccaccagactgatcctgatcggcgagaccatcaagatcgtgatcgaggagtacgtgcagcagctgagcggctacttcctgcagctgaagttcgaccccgagctgctgttcggcgtgcagttccagtacagaaacagaatcgccatggagttcaaccacctgtaccactggcaccccctgatgcccgacagcttcaaggtgggcagccaggagtacagctacgagcagttcctgttcaacaccagcatgctggtggactacggcgtggaggccctggtggacgccttcagcagacagatcgccggcagaatcggcggcggcagaaacatggaccaccacatcctgcacgtggccgtggacgtgatcagagagagcagagagatgagactgcagcccttcaacgagtacagaaagagattcggcatgaagccctacaccagcttccaggagctggtgggcgagaaggagatggccgccgagctggaggagctgtacggcgacatcgacgccctggagttctaccccggcctgctgctggagaagtgccaccccaacagcatcttcggcgagagcatgatcgagatcggcgcccccttcagcctgaagggcctgctgggcaaccccatctgcagccccgagtactggaagcccagcaccttcggcggcgaggtgggcttcaacatcgtgaagaccgccaccctgaagaagctggtgtgcctgaacaccaagacctgcccctacgtgagcttcagagtgcccgacgccagccaggacgacggccccgccgtggagagacccagcaccgagctgtag

SEQ ID NO: 17673 - DNA, 1800 bp, Artificial Sequence
  derived and/or modified sequence
atgtcaaggagtttgcttttgtggttcctcctgtttttgctactcctgcctccattgcccgtattgctggccgatcccggcgcgccgacgccggtaaatccgtgttgctactacccttgccagcatcagggcatttgtgtaagattcggactcgatcgttaccagtgtgactgtacaagaacaggatacagcggtcccaactgcacaatacccggcctgtggacatggttgcggaactccctgcgtccatcccctagttttactcacttcctgttaacccatggtcggtggttctgggagttcgtgaacgcgacttttatccgagaaatgttgatgaggttggtcttaacagtcaggtccaatctgatccctagccctccgacatataattcagctcatgactatataagttgggagtccttcagtaacgtgtcttactacacccggattcttccatctgtccctaaggactgtcccacaccaatggggactaaaggtaaaaaacaacttcctgatgcacagctgcttgcccggcggtttctactgaggcgaaagttcatacctgacccccaaggcaccaacttgatgtttgcgttctttgcacaacacttcacgcaccaatttttcaaaacatcaggaaaaatggggcccgggttcaccaaggcactcggccacggggtggacctggggcacatctacggagacaacctagagcggcagtaccagctcaggcttttcaaagacggaaaactaaagtaccaggtgttggacggggaaatgtatccccctagtgttgaagaggcgccggtattaatgcactatccaaggggaatcccccctcagtcacagatggccgttggccaggaggtctttggactccttccgggcctcatgctctacgccacactctggttgagagagcacaacagagtatgtgacctgctcaaggcggagcatcctacatggggggacgagcaattattccagacaactcggcttattctaatcggagagacaatcaaaatagtgatcgaagaatacgttcagcagctgagcggctactttctgcaactgaaattcgatcctgaactgctctttggagtacagttccaataccgtaatagaattgctatggaatttaaccacctgtatcactggcatccactgatgcccgactccttcaaagtcggaagccaagaatactcatacgagcaatttctgttcaatacttccatgttggttgattacggagttgaagccctggtggatgcctttagcaggcagattgccgggaggattgggggcggacgcaatatggaccaccacattctgcacgtcgccgtcgacgtgatcagggagtcaagggagatgcggctgcagccattcaatgagtaccggaaacgtttcggcatgaaaccttacactagctttcaggagttggtgggcgagaaagaaatggcagcggaactcgaggagctgtacggggacatcgatgctttggaattctatcccggactcctgctggagaaatgtcacccaaacagtatctttggagagagcatgatcgagatcggtgctccgttttcactcaagggtctactcggtaatcccatttgtagtcccgaatactggaaaccctccacatttggtggtgaggtcggattcaatattgtcaagacagccactctgaaaaagttggtgtgcttaaatactaagacatgcccctatgtgagctttcgcgtcccagacgcgtctcaggatgatggacccgctgttgagagaccttcaacagagctctag

SEQ ID NO: 17674 - DNA, 1800 bp, Artificial Sequence
  derived and/or modified sequence
atgagccgcagcctgctgctgtggttcctgctcttcctgctgctgctgccccccctgcctgtgctgctggccgaccccggggcccccacccctgtgaacccctgctgctactacccctgccagcaccagggcatctgtgtgcgcttcggcctggaccgctaccagtgtgactgcaccaggacaggctacagcggccccaactgcaccatccctggcctgtggacctggctgaggaacagcctgcggcccagccccagcttcacccacttcctgctgacccacggccgctggttctgggagtttgtgaatgccaccttcatccgggagatgctgatgaggctggtgctgactgtgcgcagcaacctgatccccagcccccccacctacaacagcgcccatgactacatctcctgggagagcttcagcaatgtgtcctactacacccgcatcctgcccagcgtgcccaaggactgccccacccccatgggcaccaagggcaagaagcagctgcctgatgcccagctgctggcccggcgcttcctgctgcggaggaagttcatcccagacccccagggcaccaacctgatgtttgccttctttgcccagcacttcacccaccagttcttcaagaccagcggcaagatgggccctggcttcaccaaggccctgggccatggagtggacctgggccacatctatggagacaacctggagcggcagtaccagctgcggctcttcaaggatggcaagctgaagtaccaggtgctggatggagagatgtacccacccagcgtggaggaggcccctgtgctgatgcactacccccggggcatccccccccagagccagatggctgtgggccaggaggtgtttggcctgctgcccggcctgatgctgtatgccaccctgtggctgcgggagcacaacagagtgtgtgacctgctgaaggccgagcaccccacctggggagatgagcagctgttccagaccaccaggctcatcctgattggagagaccatcaagatcgtcatcgaggagtatgtgcagcagctgagcggctacttcctgcagctgaagtttgatcctgagctgctgtttggagtgcagttccagtacagaaaccgcatcgccatggagttcaaccacctgtaccactggcaccccctgatgccagacagcttcaaggtgggcagccaggagtacagctatgagcagttcctgttcaacacctccatgctggtggactatggagtggaggccctggtggatgccttcagccggcagattgctggaagaattggaggcggcaggaacatggaccaccacatcctgcacgtggccgtggatgtgatccgggagagccgggagatgaggctgcagcccttcaatgagtacaggaagagatttggcatgaagccctacaccagcttccaggagctggtgggggagaaggagatggctgctgagctggaggagctgtatggagacattgatgccctggagttctacccaggcctgctgctggagaagtgccaccccaacagcatctttggagagagcatgattgagatcggggcccccttcagcctgaagggcctgctgggcaaccccatctgcagccctgagtactggaagcccagcacctttggaggagaggtgggcttcaacatcgtgaagacagccaccctgaagaagctggtgtgcctgaacaccaagacctgcccctacgtgtccttccgggtgcctgatgccagccaggatgatggccctgctgtggagcggcccagcacagagctgtag

SEQ ID NO: 17675 - DNA, 1800 bp, Artificial Sequence
  derived and/or modified sequence
atgagccggagcctgctgctgtggttcctgctgttcctgctgctgctgccaccattgccagtgctcctagcagatcctggcgctccaactccagtgaacccttgctgctactatccctgtcagcatcagggaatctgcgtgcgcttcgggctggacagatatcagtgcgactgcacgaggacaggatattcagggcccaattgtaccattccgggcctgtggacatggctgagaaacagcttacgaccgagtccaagtttcacccacttcctgcttactcacggacggtggttctgggaattcgtgaatgcgacctttatcagggaaatgctgatgcgcctggtgttaacagtacgcagcaacctgatccccagtccccccacatacaactccgctcacgactacatctcctgggagagcttctccaatgtgagctactatacgagaattttaccctccgtgccaaaggattgtcctaccccgatgggtaccaagggcaaaaaacaactcccagacgcccaactgttggcgcgcagattcttactccgtcgcaaatttatcccagacccccagggaaccaacctcatgtttgcattttttgcccagcacttcacacaccaattcttcaagacctcagggaagatgggtccaggttttactaaggcccttggtcacggggtagatctaggccatatctacggtgataaccttgaaaggcaataccagctgcgcctgtttaaagacgggaaattgaaataccaggtactggacggggaaatgtatccacctagcgtggaagaggcccccgtgttgatgcattaccccagagggatccctccccagagccagatggcagttggccaggaagtctttgggctcctccctggcctgatgctgtacgcaactttgtggctgcgagagcacaatcgcgtctgcgacttattgaaggctgaacatcccacctggggagacgagcaactcttccagaccacaagattgatattgatcggtgagactatcaagattgtgatagaggagtacgttcaacagctctccggatattttctgcagctgaagtttgatcccgaattactgttcggtgtgcagtttcagtacaggaaccgcatcgctatggaattcaaccatctgtatcattggcatcctctaatgccagattccttcaaggtggggagccaggaatactcttacgagcaatttttattcaatacttctatgctcgtggactacggtgttgaggccctggttgatgctttcagccgccagatcgcaggcaggattggcggaggccgaaacatggaccatcacatcttacatgtggcagtggacgtgatccgagaatcccgagagatgcgtctgcaaccatttaacgagtaccgcaaaaggttcggaatgaaaccttatacaagctttcaggaacttgtgggcgagaaagaaatggccgctgagttggaagaactatatggcgatatcgatgcactggaattctatcctgggcttcttctcgagaagtgtcatcccaactcaatctttggtgaatctatgatcgagattggggcccctttctccctgaaggggctgctggggaaccctatttgtagtcctgagtattggaaacctagcacatttggaggagaggtgggctttaatatagtgaaaacagctacgctgaagaaattggtgtgtctcaacactaagacatgcccctatgtctctttcagagtgccggacgcgtcacaggatgacggccccgccgttgagcggccctcaacagagctttag

SEQ ID NO: 17676 - DNA, 1800 bp, Artificial Sequence
  derived and/or modified sequence
atgtctcggtctctattactgtggtttctcttatttctgctgctgttacccccattacccgttctgttagccgatccgggagccccaactccagtcaatccctgctgttactacccttgccagcaccaaggaatttgtgttaggttcggacttgatagataccaatgcgactgtactcgcacaggctattcggggcctaattgtacaatcccgggactgtggacctggctcagaaactcactgcggccttccccatcttttacacactttctgttgacacacggtaggtggttctgggaattcgtgaatgcaacatttatccgggagatgctaatgcgcctcgtcctcacggtccggagtaacctaatcccaagtccaccaacttacaatagtgcgcatgactacatctcctgggaatcattctccaatgtgtcttattacaccaggatactcccttctgttcccaaagactgtcctaccccaatggggactaaggggaaaaagcagttgccagacgcccaactcctagctcgtagattcttactcagacgtaagtttattcctgatccccaaggaactaatttgatgttcgccttcttcgcgcagcactttacccaccagttcttcaagacttctggaaagatgggtcccggatttaccaaggcactcgggcacggtgtggacctgggacacatttatggagataacctcgaacggcagtatcagcttaggctctttaaagacggcaaattaaaataccaagtcctggatggagagatgtatcccccttcggtcgaggaggcacccgtattgatgcactatcccagaggtattccaccccagtctcaaatggctgtcggccaggaggtattcggtctcctaccaggcctgatgttatatgccacactctggctgcgcgaacacaatcgcgtctgcgacctcctcaaagccgagcacccaacatggggcgacgagcagttgtttcagacaactcgccttatactgatcggggaaaccataaagatcgtgatagaggaatacgtacagcagctgtctggctatttccttcagctgaagtttgacccagagctcctgttcggcgtgcagtttcagtatagaaacagaatcgctatggagttcaatcatctgtaccattggcatcccctcatgccggactcattcaaagtcggcagccaggaatactcttatgagcagtttctgtttaacacatccatgctagtcgattacggtgtcgaggctctggtagatgccttttcacgccagattgccggtaggattggcggaggcaggaatatggatcatcatatccttcacgtcgctgtggatgtgatcagagagagcagagagatgaggctacagccctttaacgagtacaggaaaagattcgggatgaaaccttatacctcgtttcaggagctggtgggggaaaaggagatggctgccgaactggaagaactgtacggtgacatcgacgccctcgagttctatcccggattgctgttggagaagtgccacccaaactccatattcggcgaatctatgatcgagatcggagcaccattttccctcaaaggactcctgggaaaccctatttgctcccctgaatactggaagcctagtacatttggaggcgaggtgggatttaacatcgtgaagaccgctacactgaaaaagctggtctgtctcaatactaagacatgtccatacgtgtcttttagagttcccgatgcatctcaggacgatggacccgctgtggagcggcctagcacggaactttag

SEQ ID NO: 17677 - DNA, 4964 bp, Artificial Sequence
  derived and/or modified sequence
gcgccatgagccggagtctcttgctctggttcttgctgttcctgctcctgctcccgccgctccccgtcctgctcgcggacccaggggcgcccacgccagtgaatccctgttgttactatccatgccagcaccagggcatctgtgtccgcttcggccttgaccgctaccagtgtgactgcacccgcacgggctattccggccccaactgcaccatccctggcctgtggacctggctccggaattcactgcggcccagcccctctttcacccacttcctgctcactcacgggcgctggttctgggagtttgtcaatgccaccttcatccgagagatgctcatgcgcctggtactcacagtgcgctccaaccttatccccagtccccccacctacaactcagcacatgactacatcagctgggagtctttctccaacgtgagctattacactcgtattctgccctctgtgcctaaagattgccccacacccatgggaaccaaagggaagaagcagttgccagatgcccagctcctggcccgccgcttcctgctcaggaggaagttcatacctgacccccaaggcaccaacctcatgtttgccttctttgcacaacacttcacccaccagttcttcaaaacttctggcaagatgggtcctggcttcaccaaggccttgggccatggggtagacctcggccacatttatggagacaatctggagcgtcagtatcaactgcggctctttaaggatgggaaactcaagtaccaggtgctggatggagaaatgtacccgccctcggtagaagaggcgcctgtgttgatgcactacccccgaggcatcccgccccagagccagatggctgtgggccaggaggtgtttgggctgcttcctgggctcatgctgtatgccacgctctggctacgtgagcacaaccgtgtgtgtgacctgctgaaggctgagcaccccacctggggcgatgagcagcttttccagacgacccgcctcatcctcataggggagaccatcaagattgtcatcgaggagtacgtgcagcagctgagtggctatttcctgcagctgaaatttgacccagagctgctgttcggtgtccagttccaataccgcaaccgcattgccatggagttcaaccatctctaccactggcaccccctcatgcctgactccttcaaggtgggctcccaggagtacagctacgagcagttcttgttcaacacctccatgttggtggactatggggttgaggccctggtggatgccttctctcgccagattgctggccggatcggtgggggcaggaacatggaccaccacatcctgcatgtggctgtggatgtcatcagggagtctcgggagatgcggctgcagcccttcaatgagtaccgcaagaggtttggcatgaaaccctacacctccttccaggagctcgtaggagagaaggagatggcagcagagttggaggaattgtatggagacattgatgcgttggagttctaccctggactgcttcttgaaaagtgccatccaaactctatctttggggagagtatgatagagattggggctcccttttccctcaagggtctcctagggaatcccatctgttctccggagtactggaagccgagcacatttggcggcgaggtgggctttaacattgtcaagacggccacactgaagaagctggtctgcctcaacaccaagacctgtccctacgtttccttccgtgtgccggatgccagtcaggatgatgggcctgctgtggagcgaccatccacagagctctgaggggcaggaaagcagcattctggaggggagagctttgtgcttgtcattccagagtgctgaggccagggctgatggtcttaaatgctcattttctggtttggcatggtgagtgttggggttgacatttagaactttaagtctcacccattatctggaatattgtgattctgtttattcttccagaatgctgaactccttgttagcccttcagattgttaggagtggttctcatttggtctgccagaatactgggttcttagttgacaacctagaatgtcagatttctggttgatttgtaacacagtcattctaggatgtggagctactgatgaaatctgctagaaagttagggggttcttattttgcattccagaatcttgactttctgattggtgattcaaagtgttgtgttcctggctgatgatccagaacagtggctcgtatcccaaatctgtcagcatctggctgtctagaatgtggatttgattcattttcctgttcagtgagatatcatagagacggagatcctaaggtccaacaagaatgcattccctgaatctgtgcctgcactgagagggcaaggaagtggggtgttcttcttgggacccccactaagaccctggtctgaggatgtagagagaacaggtgggctgtattcacgccattggttggaagctaccagagctctatccccatccaggtcttgactcatggcagctgtttctcatgaagctaataaaattcgctttctaaagttacctgttatatatctcttttggtcccatcctctaaagcagaggcaacactggaacatggctagcctttcttgtagccatggctgggcgtgctagaggttgcagcatgagactttctgctgggatccttgggcccatcactgtatagacatgctaccactggtacttcctttctccctgcgggccaggcactgcccttttcaggaagctctcttaaaatacccattgccccagacctggaagatataacattcagttcccaccatctgattaaaacaacttcctcccttacagagcatacaacagagggggcacccggggaggagagcacatactgtgttccaatttcacgcttttaattctcatttgttctcacaccaacagtgtgaagtgcgtggtataatctccatttcaaaaccaaggaagcagcctcagagtggtcgagtgacacacctcacgcaggctgagtccagagcttgtgctcctcttgattcctggtttgactcagttccaggcctgatcttgcctgtctggctcagggtcaaagacagaatggtggagtgtagcctccacctgatattcaggctactcattcagtcccaaatatgtattttcctaagtgtttactatgtgccagttcctgtaacaggtgtggggacacagcagtgagtaatcaatacagacaaggttctgcccttatggagctcacactccagtggcagacaaacagaccataaataaggaaacgatgaaataagatatatacaaggtgagtgtgacttcccttctaaccccctctgctctgtcctcccctattgcgctctcaagaccagagacccaacagcagtgatctcagggcagacagccctccactccagctctgagacccttttctcaggacctctgtaggcagcagagagagaggacagaggggtaagatgaggggttgagggaaggttcttcatgatccacactttgggcttagtatttctcaggaagagctatggcccagaaacaacaggggaaactagagttcggtctgacagtccttggggttaagtctcctgtcttatggtccagaaactcctgtttctccttagttggctggaaactgctcccatcattccttctggcctctgctgaatgcagggaatgcaatccttccctgctcttgcagttgctctgacgtagaaagatccttcgggtgctggaagtctccatgaagagcttgtgtcctgtcctttcttgcagattctatttcccctcttctgctaatacctcttactttgcttgagaatcctctcctttcttattaatttcagtcttggtggttctatcaggggtgcattctggccaaggggtgggcctgtgaatcaatcctgggcaatcagacaccctctccttaaaaactggcccgtggagactgagatcactgactctgactcatccccacagctggctctgacaagatggtccatttgttcctgcttccgagatccccagggcagcctggatccctgcccttctcaagactttagcttttccttccatccggtggcctattccaggaattcctcttttgcttaaatcagttggagtttgtgtctgttgcttgtaatcaagcctttatggctgctgggctgagtgacacaagcactttaatggcctggagggacttttaatcagtgaagatgcaatcagacaagtgttttggaaagagcaccctcgagaagggtggatgacagggcagagcaggaaggacaggaagctggcagaacggaggaggctgcagccgtggtccaaccaggagctgatggcagctggggctaggggaagggctttgagggtggaaggatgggatgggttccagaggtattcctctcttaaatgcaagtgcctagattaggtagactttgcttagtattgacaactgcacatgaaagttttgcaaagggaaacaggctaaatgcaccaagaaagcttcttcagagtgaagaatcttaatgcttgtaatttaaacatttgttcctggagttttgatttggtggatgtgatggttggttttatttgtcagtttggttgggctatagcacacagttatttaatcaaacagtaatctaggtgtggctgtgaaggtattttgtagatgtgattaacatctacaatcagttgactttaagtgaaagagattacttaaataatttgggtgagctgcacctgattagttgaaaggcctcaagaacaaacactgcagtttcctggaaaagaagaaactttgcctcaagactatagccatcgactcctgcctgagtttccagcctgctagtctgccctatggatttgaagtttgccaaccccaacaattgtgtgaattaatttctaaaaataaagctatatacagcca

SEQ ID NO: 17678 - DNA, 2073 bp, Artificial Sequence
  derived and/or modified sequence
agcttgtggctcttctgcctgccgaggcagagctctagggccatggcgggaggccttccggctccacctcagacagctgttgagggcctggaagatgagggactccttttggtcaggctggagtgaatccctgttgttactatccatgccagcaccagggcatctgtgtccgcttcggccttgaccgctaccagtgtgactgcacccgcacgggctattccggccccaactgcaccatccctggcctgtggacctggctccggaattcactgcggcccagcccctctttcacccacttcctgctcactcacgggcgctggttctgggagtttgtcaatgccaccttcatccgagagatgctcatgcgcctggtactcacagtgcgctccaaccttatccccagtccccccacctacaactcagcacatgactacatcagctgggagtctttctccaacgtgagctattacactcgtattctgccctctgtgcctaaagattgccccacacccatgggaaccaaagggaagaagcagttgccagatgcccagctcctggcccgccgcttcctgctcaggaggaagttcatacctgacccccaaggcaccaacctcatgtttgccttctttgcacaacacttcacccaccagttcttcaaaacttctggcaagatgggtcctggcttcaccaaggccttgggccatggggtagacctcggccacatttatggagacaatctggagcgtcagtatcaactgcggctctttaaggatgggaaactcaagtaccaggtgctggatggagaaatgtacccgccctcggtagaagaggcgcctgtgttgatgcactacccccgaggcatcccgccccagagccagatggctgtgggccaggaggtgtttgggctgcttcctgggctcatgctgtatgccacgctctggctacgtgagcacaaccgtgtgtgtgacctgctgaaggctgagcaccccacctggggcgatgagcagcttttccagacgacccgcctcatcctcataggggagaccatcaagattgtcatcgaggagtacgtgcagcagctgagtggctatttcctgcagctgaaatttgacccagagctgctgttcggtgtccagttccaataccgcaaccgcattgccatggagttcaaccatctctaccactggcaccccctcatgcctgactccttcaaggtgggctcccaggagtacagctacgagcagttcttgttcaacacctccatgttggtggactatggggttgaggccctggtggatgccttctctcgccagattgctggccggatcggtgggggcaggaacatggaccaccacatcctgcatgtggctgtggatgtcatcagggagtctcgggagatgcggctgcagcccttcaatgagtaccgcaagaggtttggcatgaaaccctacacctccttccaggagctcgtaggagagaaggagatggcagcagagttggaggaattgtatggagacattgatgcgttggagttctaccctggactgcttcttgaaaagtgccatccaaactctatctttggggagagtatgatagagattggggctcccttttccctcaagggtctcctagggaatcccatctgttctccggagtactggaagccgagcacatttggcggcgaggtgggctttaacattgtcaagacggccacactgaagaagctggtctgcctcaacaccaagacctgtccctacgtttccttccgtgtgccggatgccagtcaggatgatgggcctgctgtggagcgaccatccacagagctctgaggggcaggaaagcagcattctggaggggagagctttgtgcttgtcattccagagtgctgaggccagggctgatggtcttaaatgctcattttctggtttggcatggtgagtgttggggttgacatttagaactttaagtctcacccattatctggaatattgtgattctgtttattcttccagaatgctgaactccttgttagcccttcagattgttaggagtggttctcatttggtctgccag

SEQ ID NO: 17679 - protein, 604 aa, Artificial Sequence
  derived and/or modified sequence
MLARALLLCAVLALSHTANPCCSHPCQNRGVCMSVGFDQYKCDCTRTGFYGENCSTPEFLTRIKLFLKPTPNTVHYILTHFKGFWNVVNNIPFLRNAIMSYVLTSRSHLIDSPPTYNADYGYKSWEAFSNLSYYTRALPPVPDDCPTPLGVKGKKQLPDSNEIVEKLLLRRKFIPDPQGSNMMFAFFAQHFTHQFFKTDHKRGPAFTNGLGHGVDLNHIYGETLARQRKLRLFKDGKMKYQIIDGEMYPPTVKDTQAEMIYPPQVPEHLRFAVGQEVFGLVPGLMMYATIWLREHNRVCDVLKQEHPEWGDEQLFQTSRLILIGETIKIVIEDYVQHLSGYHFKLKFDPELLFNKQFQYQNRIAAEFNTLYHWHPLLPDTFQIHDQKYNYQQFIYNNSILLEHGITQFVESFTRQIAGRVAGGRNVPPAVQKVSQASIDQSRQMKYQSFNEYRKRFMLKPYESFEELTGEKEMSAELEALYGDIDAVELYPALLVEKPRPDAIFGETMVEVGAPFSLKGLMGNVICSPAYWKPSTFGGEVGFQIINTASIQSLICNNVKGCPFTSFSVPDPELIKTVTINASSSRSGLDDINPTVLLKERSTEL

SEQ ID NO: 17680 - DNA, 1815 bp, Artificial Sequence
  derived and/or modified sequence
atgctggccagagccctgctgctgtgcgccgtgctggccctgagccacaccgccaacccctgctgcagccacccctgccagaacagaggcgtgtgcatgagcgtgggcttcgaccagtacaagtgcgactgcaccagaaccggcttctacggcgagaactgcagcacccccgagttcctgaccagaatcaagctgttcctgaagcccacccccaacaccgtgcactacatcctgacccacttcaagggcttctggaacgtggtgaacaacatccccttcctgagaaacgccatcatgagctacgtgctgaccagcagaagccacctgatcgacagcccccccacctacaacgccgactacggctacaagagctgggaggccttcagcaacctgagctactacaccagagccctgccccccgtgcccgacgactgccccacccccctgggcgtgaagggcaagaagcagctgcccgacagcaacgagatcgtggagaagctgctgctgagaagaaagttcatccccgacccccagggcagcaacatgatgttcgccttcttcgcccagcacttcacccaccagttcttcaagaccgaccacaagagaggccccgccttcaccaacggcctgggccacggcgtggacctgaaccacatctacggcgagaccctggccagacagagaaagctgagactgttcaaggacggcaagatgaagtaccagatcatcgacggcgagatgtacccccccaccgtgaaggacacccaggccgagatgatctaccccccccaggtgcccgagcacctgagattcgccgtgggccaggaggtgttcggcctggtgcccggcctgatgatgtacgccaccatctggctgagagagcacaacagagtgtgcgacgtgctgaagcaggagcaccccgagtggggcgacgagcagctgttccagaccagcagactgatcctgatcggcgagaccatcaagatcgtgatcgaggactacgtgcagcacctgagcggctaccacttcaagctgaagttcgaccccgagctgctgttcaacaagcagttccagtaccagaacagaatcgccgccgagttcaacaccctgtaccactggcaccccctgctgcccgacaccttccagatccacgaccagaagtacaactaccagcagttcatctacaacaacagcatcctgctggagcacggcatcacccagttcgtggagagcttcaccagacagatcgccggcagagtggccggcggcagaaacgtgccccccgccgtgcagaaggtgagccaggccagcatcgaccagagcagacagatgaagtaccagagcttcaacgagtacagaaagagattcatgctgaagccctacgagagcttcgaggagctgaccggcgagaaggagatgagcgccgagctggaggccctgtacggcgacatcgacgccgtggagctgtaccccgccctgctggtggagaagcccagacccgacgccatcttcggcgagaccatggtggaggtgggcgcccccttcagcctgaagggcctgatgggcaacgtgatctgcagccccgcctactggaagcccagcaccttcggcggcgaggtgggcttccagatcatcaacaccgccagcatccagagcctgatctgcaacaacgtgaagggctgccccttcaccagcttcagcgtgcccgaccccgagctgatcaagaccgtgaccatcaacgccagcagcagcagaagcggcctggacgacatcaaccccaccgtgctgctgaaggagagaagcaccgagctgtag

SEQ ID NO: 17681 - DNA, 1815 bp, Artificial Sequence
  derived and/or modified sequence
atgcttgctagagctttgttattgtgtgctgtactggctctgagccataccgccaacccatgttgcagtcacccatgtcagaaccggggagtgtgcatgtctgttggctttgatcagtacaagtgtgattgtactagaactggcttttacggggagaattgcagcacccccgagttcctgacccgcataaagctgttcttgaaacctacacctaacacggttcattatattttgacacatttcaaaggcttctggaacgtggtcaacaacattcccttcttacggaacgcaattatgagctacgtgcttacatccaggagtcacctgattgactctccacccacgtataatgccgactacgggtacaaatcttgggaagcattttcaaatctgagctactatactagagctctgcctcccgtcccggacgattgcccgaccccccttggagtgaagggaaaaaagcagctccctgactccaatgagatcgtagagaagctactgctccggcgcaaattcattcccgatcctcaagggtctaatatgatgttcgcattttttgcccagcacttcacccaccagtttttcaaaacagaccataagagaggccctgccttcactaacggtttaggtcatggtgtggacttgaaccacatctacggcgagactcttgcccgccagcgcaagctccgcctgttcaaagacgggaaaatgaaatatcagattatcgacggggaaatgtaccctcccactgtaaaagacactcaggccgagatgatctatccccctcaggtgccagagcacctgcggtttgctgtgggtcaggaggtctttggattagtcccgggactcatgatgtatgctacaatatggttgagagaacataaccgggtctgtgacgtattaaagcaggagcacccagaatggggtgacgagcagctcttccagacctcacggctaatcttgataggcgaaacaattaagatcgtaatcgaagactacgttcagcatttgagtggctaccacttcaagctgaagtttgatcctgaacttctattcaacaagcagttccagtaccagaatcgcatcgccgcagagtttaatacactgtaccattggcatccccttctgccagatactttccagatacacgaccagaaatacaattaccagcaatttatctataacaattccatcttgcttgaacacggaattacccagtttgtggagagcttcaccagacaaatcgccggcagggtggccggcggccgtaacgttcctcctgccgttcagaaagtctcacaggcctcgatcgaccagagccgacagatgaagtaccagagtttcaatgaatatcggaagcggttcatgctcaagccctatgaaagttttgaggagttgacaggtgagaaggagatgagcgccgagctggaagccctgtacggcgatattgatgctgtggagctgtatcctgctctgcttgtggagaaaccccggccagatgcaatcttcggcgaaacgatggttgaggttggcgctcccttcagcctgaaaggtctgatggggaacgtcatctgcagtccagcatactggaagccctctacctttggcggggaagtgggcttccaaatcatcaataccgcctctattcagtctcttatctgcaataacgttaaaggctgcccattcactagcttcagcgtacctgatcccgaattgattaaaacagtcacgatcaacgcgagttcctctcggtccggtctagacgatataaaccctacggtgcttctcaaagaaagatcaacagagttgtag

SEQ ID NO: 17682 - DNA, 1815 bp, Artificial Sequence
  derived and/or modified sequence
atgctggcccgggccctgctgctgtgtgctgtgctggccctgagccacacagccaacccctgctgcagccacccctgccagaacagaggagtgtgcatgtctgtgggctttgaccagtacaagtgtgactgcaccaggacaggcttctacggggagaactgcagcaccccagagttcctgacccgcatcaagctgttcctgaagcccacccccaacacagtgcactacatcctgacccacttcaagggcttctggaatgtggtgaacaacatccccttcctgagaaatgccatcatgtcctatgtgctgaccagccgcagccacctgattgacagcccccccacctacaatgctgactatggctacaagtcctgggaggccttcagcaacctgagctactacacccgggccctgccccctgtgcctgatgactgccccacccccctgggcgtgaagggcaagaagcagctgcctgacagcaatgaaattgtggagaagctgctgctgcggaggaagttcatcccagacccccagggcagcaacatgatgtttgccttctttgcccagcacttcacccaccagttcttcaagacagaccacaagaggggccctgccttcaccaacggcctgggccacggcgtggacctgaaccacatctacggggagaccctggcccggcagaggaagctgcggctcttcaaggatggcaagatgaagtaccagatcattgatggagagatgtacccacccaccgtgaaggacacccaggccgagatgatctacccaccccaggtgcctgagcacctgcgctttgctgtgggccaggaggtgtttggcctggtgcccggcctgatgatgtatgccaccatctggctgcgggagcacaacagagtgtgtgatgtgctgaagcaggagcaccctgagtggggagatgagcagctgttccagaccagccgcctcatcctgattggagagaccatcaagatcgtgattgaggactatgtgcagcacctgagcggctaccacttcaagctgaagtttgatcctgagctgctcttcaacaagcagttccagtaccagaacagaattgctgctgagttcaacaccctgtaccactggcaccccctgctgcctgacaccttccagatccatgaccagaagtacaactaccagcagttcatctacaacaacagcatcctgctggagcacggcatcacccagtttgtggagagcttcacccggcagattgctggccgggtggccggcggcagaaatgtgcccccagctgtgcagaaggtgtcccaggccagcattgaccagagccggcagatgaagtaccagagcttcaatgagtacaggaagcgcttcatgctgaagccctatgagagctttgaggagctgaccggggagaaggagatgtctgctgagctggaggccctgtatggagacattgatgctgtggagctgtacccagccctgctggtggagaagcccaggccagatgccatctttggagagaccatggtggaggtgggcgcccccttcagcctgaagggcctgatgggaaatgtcatctgcagccctgcctactggaagcccagcaccttcggcggggaggtgggcttccagatcatcaacacagccagcatccagagcctcatctgcaacaacgtgaagggctgccccttcaccagcttctctgtgcctgaccctgagctgatcaagacagtgaccatcaatgccagcagcagccgcagcggcctggatgacatcaaccccaccgtgctgctgaaggagaggagcacagagctgtag

SEQ ID NO: 17683 - DNA, 1815 bp, Artificial Sequence
  derived and/or modified sequence
atgctggcccgggccctgctgctgtgcgccgtgctggccctgagccacactgccaatccctgctgttcacatccttgccagaatcgcggcgtgtgtatgagcgtcgggttcgaccagtataagtgcgactgcaccagaaccgggttttacggagagaactgctcgacacctgagtttttaacccgaatcaagctttttcttaaacccactcccaacacagtacattacattctcactcatttcaaggggttctggaatgtcgttaataatatcccatttctcaggaatgctattatgtcttacgtcctgacctctcgaagccacctgatcgatagtccccccacctacaatgcagattatggatataagtcttgggaagcttttagtaacttgtcctattatacacgggccttacctccggttcctgacgactgcccgacacctctgggcgtgaagggtaagaaacagctgccggactccaatgagatcgtagagaagctgttacttagaaggaaattcattccggacccccagggcagcaatatgatgtttgcttttttcgcacagcacttcactcaccaattcttcaagacagaccataaacgaggtcccgctttcaccaacggcctgggtcacggcgtagacttgaatcatatctatggcgagaccctggcaagacagagaaagctgcggttgttcaaggacggtaagatgaagtaccagattatcgatggggagatgtatccccccactgtgaaagacactcaggctgagatgatctatccgccccaggttcccgagcatcttaggtttgcagtggggcaggaagtgttcggacttgttcccggacttatgatgtacgccacaatttggctgcgggagcataaccgagtctgtgacgtgttaaaacaggaacaccctgagtggggagacgagcagttatttcaaaccagtcgcctcatcctgatcggagaaaccattaagatcgttatagaggactacgtgcagcacctgtcaggttaccactttaagctaaagtttgatcccgagcttctgttcaataagcagtttcaatatcagaaccggatcgctgccgagtttaatacactttaccactggcatccgcttctccctgatactttccaaatacacgaccagaaatacaactatcagcagttcatttacaataattcgatactgctggaacatggcataacacaatttgtggagtctttcacaaggcagattgccggcagagtcgctggcggaagaaacgtgcctcccgctgtgcaaaaagtctcccaagccagcattgaccagtcgcgccagatgaagtaccaaagctttaatgaatatagaaagaggttcatgttgaagccatatgaaagctttgaagaactgaccggggagaaggagatgagtgctgagttagaggcactctacggggatattgatgcggtggaactgtacccagcattgctggtggagaaacctaggcccgacgctatctttggagaaactatggttgaggtgggagctccatttagtctgaaaggcctgatgggtaacgtcatctgtagccctgcatattggaagccaagcaccttcggtggcgaggtggggtttcagataataaatacagccagtattcaatccttaatctgtaacaatgtgaagggttgccccttcacttccttctcagtccctgatcccgagctcatcaagaccgtcaccatcaacgcttcttcaagccgcagcggccttgatgacattaatccaactgtgcttctgaaagagcgttcaacagagctgtag

SEQ ID NO: 17684 - DNA, 1815 bp, Artificial Sequence
  derived and/or modified sequence
atgttagcaagggcgttattgctctgcgctgttctagcgctgtcacatacagcgaacccatgctgcagtcatccctgtcaaaaccggggagtctgcatgagtgtggggtttgaccaatacaagtgcgactgtacacgcactggtttttatggggagaactgctccacgccagagtttctgactcggatcaaactgttcctgaagccaacccccaataccgtccattatattctcactcactttaaggggttctggaatgtcgtcaataacatcccatttcttcggaacgcaattatgtcttatgtgcttacatctagatcgcacctgatcgactccccgccaacatataatgcagactatgggtacaagtcctgggaagcattctctaacctgtcttattacactagggcattgcctccagtacccgacgattgccccactccactgggggtgaagggcaaaaaacagctgccagactctaacgagattgtggaaaagctactgctccgtcgaaaatttatccccgacccacaaggtagcaacatgatgttcgctttcttcgcacagcacttcacccaccaattcttcaagaccgatcacaagcggggacctgcgttcaccaatggcttgggccacggcgtggacctgaatcacatttatggcgaaactctcgcccgacagcgtaaattgagactctttaaagacggtaaaatgaagtaccagattatagacggtgagatgtaccccccaaccgtgaaagatactcaggccgaaatgatctatccccctcaagtacctgaacacttgcggttcgccgttggccaggaagtgtttggtttagtgcctgggctcatgatgtatgcaacaatttggcttcgagagcacaacagagtgtgtgatgtgctcaagcaagaacatcccgagtggggtgacgagcagctgttccagacatctcgacttatcttgatcggggagacaattaaaatcgttatcgaggactacgtacaacacctctctggataccatttcaaacttaagtttgacccggaactccttttcaataaacagtttcagtaccagaataggatcgcagccgaattcaatactctctaccattggcaccctttactccctgatacatttcagattcacgatcagaagtacaactaccagcagttcatctacaacaactccattttgctggagcacggtatcacacaatttgttgagagcttcactcgtcagatagccggacgagtcgccggtgggaggaatgttcccccagccgtgcagaaggttagtcaagcctctatagaccagtcccgacagatgaagtatcagagtttcaacgagtatcgtaagaggtttatgttaaagccttatgaaagctttgaagaactgacaggtgagaaggagatgtctgcggagctggaggccctttatggagatatcgatgccgttgaactatatcccgctctcttggtggagaaacctcgccctgatgcaatttttggagagacgatggtggaagttggagccccattcagtctgaagggactgatgggcaacgtcatctgtagccccgcttactggaaaccctccaccttcggtggcgaggtcggtttccagatcataaacaccgcaagcatccaatccctgatctgtaacaacgtgaaaggatgcccctttacatcgttttcagtgccggaccctgagctgatcaaaactgttacaatcaatgcaagctcttcccgttcaggtctggacgatattaaccctacagtactacttaaggagaggtccactgagctgtag

SEQ ID NO: 17685 - DNA, 4514 bp, Artificial Sequence
  derived and/or modified sequence
gaccaattgtcatacgacttgcagtgagcgtcaggagcacgtccaggaactcctcagcagcgcctccttcagctccacagccagacgccctcagacagcaaagcctacccccgcgccgcgccctgcccgccgctgcgatgctcgcccgcgccctgctgctgtgcgcggtcctggcgctcagccatacagcaaatccttgctgttcccacccatgtcaaaaccgaggtgtatgtatgagtgtgggatttgaccagtataagtgcgattgtacccggacaggattctatggagaaaactgctcaacaccggaatttttgacaagaataaaattatttctgaaacccactccaaacacagtgcactacatacttacccacttcaagggattttggaacgttgtgaataacattcccttccttcgaaatgcaattatgagttatgtgttgacatccagatcacatttgattgacagtccaccaacttacaatgctgactatggctacaaaagctgggaagccttctctaacctctcctattatactagagcccttcctcctgtgcctgatgattgcccgactcccttgggtgtcaaaggtaaaaagcagcttcctgattcaaatgagattgtggaaaaattgcttctaagaagaaagttcatccctgatccccagggctcaaacatgatgtttgcattctttgcccagcacttcacgcatcagtttttcaagacagatcataagcgagggccagctttcaccaacgggctgggccatggggtggacttaaatcatatttacggtgaaactctggctagacagcgtaaactgcgccttttcaaggatggaaaaatgaaatatcagataattgatggagagatgtatcctcccacagtcaaagatactcaggcagagatgatctaccctcctcaagtccctgagcatctacggtttgctgtggggcaggaggtctttggtctggtgcctggtctgatgatgtatgccacaatctggctgcgggaacacaacagagtatgcgatgtgcttaaacaggagcatcctgaatggggtgatgagcagttgttccagacaagcaggctaatactgataggagagactattaagattgtgattgaagattatgtgcaacacttgagtggctatcacttcaaactgaaatttgacccagaactacttttcaacaaacaattccagtaccaaaatcgtattgctgctgaatttaacaccctctatcactggcatccccttctgcctgacacctttcaaattcatgaccagaaatacaactatcaacagtttatctacaacaactctatattgctggaacatggaattacccagtttgttgaatcattcaccaggcaaattgctggcagggttgctggtggtaggaatgttccacccgcagtacagaaagtatcacaggcttccattgaccagagcaggcagatgaaataccagtcttttaatgagtaccgcaaacgctttatgctgaagccctatgaatcatttgaagaacttacaggagaaaaggaaatgtctgcagagttggaagcactctatggtgacatcgatgctgtggagctgtatcctgcccttctggtagaaaagcctcggccagatgccatctttggtgaaaccatggtagaagttggagcaccattctccttgaaaggacttatgggtaatgttatatgttctcctgcctactggaagccaagcacttttggtggagaagtgggttttcaaatcatcaacactgcctcaattcagtctctcatctgcaataacgtgaagggctgtccctttacttcattcagtgttccagatccagagctcattaaaacagtcaccatcaatgcaagttcttcccgctccggactagatgatatcaatcccacagtactactaaaagaacgttcgactgaactgtagaagtctaatgatcatatttatttatttatatgaaccatgtctattaatttaattatttaataatatttatattaaactccttatgttacttaacatcttctgtaacagaagtcagtactcctgttgcggagaaaggagtcatacttgtgaagacttttatgtcactactctaaagattttgctgttgctgttaagtttggaaaacagtttttattctgttttataaaccagagagaaatgagttttgacgtctttttacttgaatttcaacttatattataagaacgaaagtaaagatgtttgaatacttaaacactgtcacaagatggcaaaatgctgaaagtttttacactgtcgatgtttccaatgcatcttccatgatgcattagaagtaactaatgtttgaaattttaaagtacttttggttatttttctgtcatcaaacaaaaacaggtatcagtgcattattaaatgaatatttaaattagacattaccagtaatttcatgtctactttttaaaatcagcaatgaaacaataatttgaaatttctaaattcatagggtagaatcacctgtaaaagcttgtttgatttcttaaagttattaaacttgtacatataccaaaaagaagctgtcttggatttaaatctgtaaaatcagtagaaattttactacaattgcttgttaaaatattttataagtgatgttcctttttcaccaagagtataaacctttttagtgtgactgttaaaacttccttttaaatcaaaatgccaaatttattaaggtggtggagccactgcagtgttatcttaaaataagaatattttgttgagatattccagaatttgtttatatggctggtaacatgtaaaatctatatcagcaaaagggtctacctttaaaataagcaataacaaagaagaaaaccaaattattgttcaaatttaggtttaaacttttgaagcaaacttttttttatccttgtgcactgcaggcctggtactcagattttgctatgaggttaatgaagtaccaagctgtgcttgaataatgatatgttttctcagattttctgttgtacagtttaatttagcagtccatatcacattgcaaaagtagcaatgacctcataaaatacctcttcaaaatgcttaaattcatttcacacattaattttatctcagtcttgaagccaattcagtaggtgcattggaatcaagcctggctacctgcatgctgttccttttcttttcttcttttagccattttgctaagagacacagtcttctcatcacttcgtttctcctattttgttttactagttttaagatcagagttcactttctttggactctgcctatattttcttacctgaacttttgcaagttttcaggtaaacctcagctcaggactgctatttagctcctcttaagaagattaaaagagaaaaaaaaaggcccttttaaaaatagtatacacttattttaagtgaaaagcagagaattttatttatagctaattttagctatctgtaaccaagatggatgcaaagaggctagtgcctcagagagaactgtacggggtttgtgactggaaaaagttacgttcccattctaattaatgccctttcttatttaaaaacaaaaccaaatgatatctaagtagttctcagcaataataataatgacgataatacttcttttccacatctcattgtcactgacatttaatggtactgtatattacttaatttattgaagattattatttatgtcttattaggacactatggttataaactgtgtttaagcctacaatcattgatttttttttgttatgtcacaatcagtatatcttctttggggttacctctctgaatattatgtaaacaatccaaagaaatgattgtattaagatttgtgaataaatttttagaaatctgattggcatattgagatatttaaggttgaatgtttgtccttaggataggcctatgtgctagcccacaaagaatattgtctcattagcctgaatgtgccataagactgaccttttaaaatgttttgagggatctgtggatgcttcgttaatttgttcagccacaatttattgagaaaatattctgtgtcaagcactgtgggttttaatatttttaaatcaaacgctgattacagataatagtatttatataaataattgaaaaaaattttcttttgggaagagggagaaaatgaaataaatatcattaaagataactcaggagaatcttctttacaattttacgtttagaatgtttaaggttaagaaagaaatagtcaatatgcttgtataaaacactgttcactgttttttttaaaaaaaaaacttgatttgttattaacattgatctgctgacaaaacctgggaatttgggttgtgtatgcgaatgtttcagtgcctcagacaaatgtgtatttaacttatgtaaaagataagtctggaaataaatgtctgtttatttttgtactatttaaaaattgacagatcttttctgaagataaactttgattgtttctata

SEQ ID NO: 17686 - protein, 448 aa, Artificial Sequence
  derived and/or modified sequence
MFDCMDVLSVSPGQILDFYTASPSSCMLQEKALKACFSGLTQTEWQHRHTAQSIETQSTSSEELVPSPPSPLPPPRVYKPCFVCQDKSSGYHYGVSACEGCKGFFRRSIQKNMIYTCHRDKNCVINKVTRNRCQYCRLQKCFEVGMSKESVRNDRNKKKKETSKQECTESYEMTAELDDLTEKIRKAHQETFPSLCQLGKYTTNSSADHRVRLDLGLWDKFSELATKCIIKIVEFAKRLPGFTGLTIADQITLLKAACLDILILRICTRYTPEQDTMTFSDGLTLNRTQMHNAGFGPLTDLVFTFANQLLPLEMDDTETGLLSAICLICGDRQDLEEPTKVDKLQEPLLEALKIYIRKRRPSKPHMFPKILMKITDLRSISAKGAERVITLKMEIPGSMPPLIQEMLENSEGHEPLTPSSSGNTAEHSPSISPSSVENSGVSQSPLVQ

SEQ ID NO: 17687 - DNA, 3142 bp, Artificial Sequence
  derived and/or modified sequence
tgcgagctgtttgaggactgggatgccgagaacgcgagcgatccgagcagggtttgtctgggcaccgtcggggtaggatccggaacgcattcggaaggctttttgcaagcatttacttggaaggagaacttgggatctttctgggaaccccccgccccggctggattggccgagcaagcctggaaaatggtaaatgatcatttggatcaattacaggcttttagctggcttgtctgtcataattcatgattcggggctgggaaaaagaccaacagcctacgtgccaaaaaaggggcagagtttgatggagttgggtggacttttctatgccatttgcctccacacctagaggataagcacttttgcagacattcagtgcaagggagatcatgtttgactgtatggatgttctgtcagtgagtcctgggcaaatcctggatttctacactgcgagtccgtcttcctgcatgctccaggagaaagctctcaaagcatgcttcagtggattgacccaaaccgaatggcagcatcggcacactgctcaatcaattgaaacacagagcaccagctctgaggaactcgtcccaagccccccatctccacttcctccccctcgagtgtacaaaccctgcttcgtctgccaggacaaatcatcagggtaccactatggggtcagcgcctgtgagggatgtaagggctttttccgcagaagtattcagaagaatatgatttacacttgtcaccgagataagaactgtgttattaataaagtcaccaggaatcgatgccaatactgtcgactccagaagtgctttgaagtgggaatgtccaaagaatctgtcaggaatgacaggaacaagaaaaagaaggagacttcgaagcaagaatgcacagagagctatgaaatgacagctgagttggacgatctcacagagaagatccgaaaagctcaccaggaaactttcccttcactctgccagctgggtaaatacaccacgaattccagtgctgaccatcgagtccgactggacctgggcctctgggacaaattcagtgaactggccaccaagtgcattattaagatcgtggagtttgctaaacgtctgcctggtttcactggcttgaccatcgcagaccaaattaccctgctgaaggccgcctgcctggacatcctgattcttagaatttgcaccaggtataccccagaacaagacaccatgactttctcagacggccttaccctaaatcgaactcagatgcacaatgctggatttggtcctctgactgaccttgtgttcacctttgccaaccagctcctgcctttggaaatggatgacacagaaacaggccttctcagtgccatctgcttaatctgtggagaccgccaggaccttgaggaaccgacaaaagtagataagctacaagaaccattgctggaagcactaaaaatttatatcagaaaaagacgacccagcaagcctcacatgtttccaaagatcttaatgaaaatcacagatctccgtagcatcagtgctaaaggtgcagagcgtgtaattaccttgaaaatggaaattcctggatcaatgccacctctcattcaagaaatgctggagaattctgaaggacatgaacccttgaccccaagttcaagtgggaacacagcagagcacagtcctagcatctcacccagctcagtggaaaacagtggggtcagtcagtcaccactcgtgcaataagacattttctagctacttcaaacattccccagtaccttcagttccaggatttaaaatgcaagaaaaaacatttttactgctgcttagtttttggactgaaaagatattaaaactcaagaaggaccaagaagttttcatatgtatcaatatatatactcctcactgtgtaacttacctagaaatacaaacttttccaattttaaaaaatcagccatttcatgcaaccagaaactagttaaaagcttctattttcctctttgaacactcaagattgcatggcaaagacccagtcaaaatgatttacccctggttaagtttctgaagactttgtacatacagaagtatggctctgttctttctatactgtatgtttggtgctttccttttgtcttgcatactcaaaataaccatgacaccaaggttatgaaatagactactgtacacgtctacctaggttcaaaaagataactgtcttgctttcatggaatagtcaagacatcaaggtaaggaaacaggactattgacaggactattgtacagtatgacaagataaggctgaagatattctactttagttagtatggaagcttgtctttgctctttctgatgctctcaaactgcatcttttatttcatgttgcccagtaaaagtatacaaattccctgcactagcagaagagaattctgtatcagtgtaactgccagttcagttaatcaaatgtcatttgttcaattgttaatgtcactttaaattaaaagtggtttattacttgtttaatgacataactacacagttagttaaaaaaaatttttttacagtaatgatagcctccaaggcagaaacacttttcagtgttaagtttttgtttacttgttcacaagccattagggaaatttcatgggataattagcaggctggtctaccacctggaccatgtaactctagtgtccttcctgattcatgcctgatattgggatttttttttccagccttcttgatgccaaggggctaattaatattaacaactcccaaagaaacaggcatagaatctgcctcctttgaccttgttcaatcactatgaagcagagtgaaagctgtggtagagtggttaacagatacaagtgtcagtttcttagttctcatttaagcactagtggaattttttttttttgatatattagcaagtctgtgatgtactttcactggctctgtttgtacattgagattgtttgtttaacaatgctttctatgttcatatactgtttacctttttccatggagtctcctggcaaagaataaaatatatttattttaaaaaaaaaaaaaaaaaaaaaaaaaaaaaaaaaaaaaaaaaaaaaaaaaaaaaaaaaaaaaaaaaaaaaaaaaaaaaaaaaaaaaaaaaaaaa

SEQ ID NO: 17688 - DNA, 1347 bp, Artificial Sequence
  derived and/or modified sequence
atgttcgactgcatggacgtgctgagcgtgagccccggccagatcctggacttctacaccgccagccccagcagctgcatgctgcaggagaaggccctgaaggcctgcttcagcggcctgacccagaccgagtggcagcacagacacaccgcccagagcatcgagacccagagcaccagcagcgaggagctggtgcccagcccccccagccccctgcccccccccagagtgtacaagccctgcttcgtgtgccaggacaagagcagcggctaccactacggcgtgagcgcctgcgagggctgcaagggcttcttcagaagaagcatccagaagaacatgatctacacctgccacagagacaagaactgcgtgatcaacaaggtgaccagaaacagatgccagtactgcagactgcagaagtgcttcgaggtgggcatgagcaaggagagcgtgagaaacgacagaaacaagaagaagaaggagaccagcaagcaggagtgcaccgagagctacgagatgaccgccgagctggacgacctgaccgagaagatcagaaaggcccaccaggagaccttccccagcctgtgccagctgggcaagtacaccaccaacagcagcgccgaccacagagtgagactggacctgggcctgtgggacaagttcagcgagctggccaccaagtgcatcatcaagatcgtggagttcgccaagagactgcccggcttcaccggcctgaccatcgccgaccagatcaccctgctgaaggccgcctgcctggacatcctgatcctgagaatctgcaccagatacacccccgagcaggacaccatgaccttcagcgacggcctgaccctgaacagaacccagatgcacaacgccggcttcggccccctgaccgacctggtgttcaccttcgccaaccagctgctgcccctggagatggacgacaccgagaccggcctgctgagcgccatctgcctgatctgcggcgacagacaggacctggaggagcccaccaaggtggacaagctgcaggagcccctgctggaggccctgaagatctacatcagaaagagaagacccagcaagccccacatgttccccaagatcctgatgaagatcaccgacctgagaagcatcagcgccaagggcgccgagagagtgatcaccctgaagatggagatccccggcagcatgccccccctgatccaggagatgctggagaacagcgagggccacgagcccctgacccccagcagcagcggcaacaccgccgagcacagccccagcatcagccccagcagcgtggagaacagcggcgtgagccagagccccctggtgcagtag

SEQ ID NO: 17689 - DNA, 1347 bp, Artificial Sequence
  derived and/or modified sequence
atgtttgattgcatggatgtgttgtcagtgagccccggacagatcctggatttctacacagcctcaccaagttcctgtatgttacaagagaaagccctgaaggcctgtttcagcggcctgactcaaacagaatggcaacatcgccacaccgcgcagtcaatagagactcagtctacatcttctgaagaactggtgcccagcccccccagccccttgcccccccctagggtctacaagccttgcttcgtttgtcaggacaagtcttctggatatcactacggtgtcagcgcatgtgagggatgcaagggttttttccgcagatccatccaaaaaaatatgatttacacctgtcacagggataagaactgcgtcatcaataaggtcacacgaaatcggtgtcaatattgcaggctgcagaaatgtttcgaggtcgggatgtcaaaggagagtgtccggaatgatagaaataagaaaaagaaggaaaccagcaaacaagaatgcactgaaagctacgagatgactgccgaattagacgatttaactgagaaaatccgtaaagcacatcaagagacatttccttctctgtgtcagctcggcaaatataccacaaactcttcggccgatcatcgagtgaggctggatctgggtctgtgggataagttcagtgaacttgctacaaagtgtatcataaaaatcgtggagtttgcaaaaaggcttcccggattcaccggccttaccatcgctgatcaaatcaccttgctgaaagcagcctgcctagacatactgatcttgagaatctgtacaaggtacactccagagcaggacacgatgactttttctgacggtctgactttgaataggacccagatgcacaacgcaggcttcggccctcttaccgaccttgtattcactttcgctaatcagttgcttcctctggagatggatgatacggagacgggtctgctgtccgccatctgcctcatttgcggtgaccggcaggaccttgaagagccgaccaaggttgacaagctgcaggaaccactgctggaggccctgaagatttatattcggaagagaaggccatctaagccccacatgttcccgaagatcttaatgaaaatcacagacttgagatctatctctgcaaaaggggcagagcgcgtaatcactctaaagatggagattccaggatctatgcctcccctcatccaggagatgctggagaacagcgagggccatgaaccactgactcctagcagttcgggaaacacagccgaacactcaccctcaatcagtccatcctctgttgaaaactctggcgtctcgcagtcgccactggtccagtag

SEQ ID NO: 17690 - DNA, 1347 bp, Artificial Sequence
  derived and/or modified sequence
atgtttgactgcatggatgtgctgtctgtgtccccaggccagatcctggacttctacacagccagccccagcagctgcatgctgcaggagaaggccctgaaggcctgcttcagcggcctgacccagacagagtggcagcaccgccacacagcccagagcattgagacccagagcaccagcagcgaggagctggtgcccagcccccccagccccctgcccccaccccgggtgtacaagccctgctttgtgtgccaggacaagagcagcggctaccactatggagtgtctgcctgtgagggctgcaagggcttcttccgccgcagcatccagaagaacatgatctacacctgccaccgggacaagaactgtgtgatcaacaaggtgaccaggaaccgctgccagtactgccgcctgcagaagtgctttgaggtgggcatgagcaaggagagcgtgagaaatgacaggaacaagaagaagaaggagaccagcaagcaggagtgcacagagagctatgagatgacagctgagctggatgacctgacagagaagatcaggaaggcccaccaggagaccttccccagcctgtgccagctgggcaagtacaccaccaacagcagcgctgaccaccgggtgcggctggacctgggcctgtgggacaagttcagcgagctggccaccaagtgcatcatcaagatcgtggagtttgccaagaggctgcccggcttcaccggcctgaccatcgctgaccagatcaccctgctgaaggccgcctgcctggacatcctgatcctgcgcatctgcacccgctacaccccagagcaggacaccatgaccttcagtgatggcctgaccctgaacagaacccagatgcacaatgccggcttcggccccctgacagacctggtgttcacctttgccaaccagctgctgcccctggagatggatgacacagaaacaggcctgctgagcgccatctgcctgatctgtggggaccggcaggacctggaggagcccaccaaggtggacaagctgcaggagcccctgctggaggccctgaagatctacatcaggaagagaagacccagcaagccccacatgttccccaagatcctgatgaagatcacagacctgcggagcatcagcgccaagggagctgagagggtcatcaccctgaagatggagatccctggctccatgccacccctcatccaggagatgctggagaacagcgagggccacgagcccctgacccccagcagcagcggcaacacagctgagcacagccccagcatcagccccagctctgtggagaacagcggcgtgtcccagagccccctggtgcagtag

SEQ ID NO: 17691 - DNA, 1347 bp, Artificial Sequence
  derived and/or modified sequence
atgttcgactgcatggacgtgctgagcgtgagccccggccagatcttggacttttatacagctagcccttctagctgtatgctacaagagaaagccctgaaagcatgcttcagcggactcacccaaacagagtggcagcacagacacactgctcagtccatagagacccagtcaaccagctctgaagaactggtcccaagtcccccctcccccttgcccccaccaagagtttacaagccttgctttgtctgtcaggacaaaagctcgggctaccactacggtgtgagcgcctgtgagggatgcaaaggattcttccggaggtcaatccagaaaaacatgatttacacttgtcatcgcgacaagaattgcgtgataaataaggttacccgtaaccggtgtcagtattgtcgactccagaagtgttttgaagtcggtatgtctaaagaatcagtcagaaatgatcgtaataaaaaaaaaaaggagacaagcaagcaagagtgcaccgagagctatgagatgacagccgagctcgacgatctcactgaaaagattcgaaaagcgcaccaggagacattcccttcgctgtgtcaactcggaaaatacaccactaattcctcagccgaccatcgggtgcgactggatctcggattatgggataagtttagcgaactagcgacaaaatgcatcattaaaatcgttgagtttgcgaagcgcctaccaggctttacagggcttacaatcgctgaccagattaccctactgaaggccgcgtgtctggacattttgatcctgcgcatttgtactaggtatacaccggagcaggacacaatgactttcagcgacggtttgacacttaaccggacacagatgcacaacgccgggttcggccccctaacggacctggtctttacctttgctaaccagctgctgccactcgaaatggatgacaccgagaccggactcctgtccgccatctgtctcatctgcggagataggcaggatttggaagaacctacaaaagtggataaactccaggaacctctactggaagcattgaagatttacatcagaaaaagacggcccagtaaaccacatatgttccccaaaatcctgatgaagatcactgatctccggagcatcagcgcaaaaggcgccgaacgcgtcattacacttaagatggagatcccagggtccatgcccccactaatacaggagatgctggaaaatagcgaaggccatgaacctctaacgccttcctccagcgggaatacagctgagcatagcccctcaattagcccctcgtctgtcgagaattccggcgtctcccagtcccccctcgtccagtag

SEQ ID NO: 17692 - DNA, 1347 bp, Artificial Sequence
  derived and/or modified sequence
atgttcgactgtatggacgtgctgtcagtgtctccaggccagattttggatttctacaccgcatctccttcatcttgtatgctccaagagaaggctctgaaggcatgctttagtggcctgacccagactgagtggcagcatagacacaccgctcaatcaatagagacgcaatctacttcatcggaagagctggtgccgagtcctccatcacccctcccacccccacgggtctataaaccctgtttcgtgtgtcaggataaatcctcaggataccattatggagtatccgcttgtgagggatgcaagggattttttcgtagaagcattcaaaaaaatatgatttatacttgtcatagggacaagaactgtgtcattaacaaggtgaccagaaaccgctgccagtattgtcgtctgcagaaatgtttcgaggtcgggatgtccaaagagagcgtgcggaatgaccgaaacaagaaaaaaaaggagactagtaagcaagagtgtaccgaatcttacgagatgacagccgaactagacgatcttacggaaaaaattaggaaggcccaccaagaaacctttcccagcctgtgtcaacttggtaaatacaccaccaactcaagtgctgaccatagagtgagactggacctgggactctgggacaaattcagcgaactcgccactaaatgtatcattaaaatcgttgagttcgccaagcggctgccaggcttcacaggcctgaccatcgccgatcaaataaccctgctcaaggcggcatgcctcgacatacttatcctccgtatctgcacgcgctacacacctgagcaggacaccatgaccttcagcgatggcttaaccctcaaccgaacacagatgcacaatgcaggcttcgggcctcttaccgatcttgttttcacattcgccaaccaacttcttccccttgaaatggacgatactgagactggtcttttgtctgcaatctgcttgatctgtggagatagacaagaccttgaagaacctaccaaggtggacaaacttcaggagccactactggaagcattgaagatatacatccgaaagcggagacccagtaagccacatatgttccccaagatcttgatgaaaatcacagacctgcgctccatctcagctaaaggcgctgagagagtcataaccctaaaaatggagatccctggttccatgcctcctctgatccaggagatgctggagaattcggagggccatgagcctctaactccttcgagcagtggaaataccgctgaacattcaccttcaatcagtccttcgtccgttgaaaacagcggagtgtctcagagcccacttgtacaatag

SEQ ID NO: 17693 - DNA, 3084 bp, Artificial Sequence
  derived and/or modified sequence
tctttgccaaaggggggaccagaattcccccatgcgagctgtttgaggactgggatgccgagaacgcgagcgatccgagcagggtttgtctgggcaccgtcggggtaggatccggaacgcattcggaaggctttttgcaagcatttacttggaaggagaacttgggatctttctgggaaccccccgccccggctggattggccgagcaagcctggaaaatggtaaatgatcatttggatcaattacaggcttttagctggcttgtctgtcataattcatgattcggggctgggaaaaagaccaacagcctacgtgccaaaaaaggggcagagtttgatggagttgggtggacttttctatgccatttgcctccacacctagaggataagcacttttgcagacattcagtgcaagggagatcatgtttgactgtatggatgttctgtcagtgagtcctgggcaaatcctggatttctacactgcgagtccgtcttcctgcatgctccaggagaaagctctcaaagcatgcttcagtggattgacccaaaccgaatggcagcatcggcacactgctcaatcaattgaaacacagagcaccagctctgaggaactcgtcccaagccccccatctccacttcctccccctcgagtgtacaaaccctgcttcgtctgccaggacaaatcatcagggtaccactatggggtcagcgcctgtgagggatgtaagggctttttccgcagaagtattcagaagaatatgatttacacttgtcaccgagataagaactgtgttattaataaagtcaccaggaatcgatgccaatactgtcgactccagaagtgctttgaagtgggaatgtccaaagaatctgtcaggaatgacaggaacaagaaaaagaaggagacttcgaagcaagaatgcacagagagctatgaaatgacagctgagttggacgatctcacagagaagatccgaaaagctcaccaggaaactttcccttcactctgccagctgggtaaatacaccacgaattccagtgctgaccatcgagtccgactggacctgggcctctgggacaaattcagtgaactggccaccaagtgcattattaagatcgtggagtttgctaaacgtctgcctggtttcactggcttgaccatcgcagaccaaattaccctgctgaaggccgcctgcctggacatcctgattcttagaatttgcaccaggtataccccagaacaagacaccatgactttctcagacggccttaccctaaatcgaactcagatgcacaatgctggatttggtcctctgactgaccttgtgttcacctttgccaaccagctcctgcctttggaaatggatgacacagaaacaggccttctcagtgccatctgcttaatctgtggagaccgccaggaccttgaggaaccgacaaaagtagataagctacaagaaccattgctggaagcactaaaaatttatatcagaaaaagacgacccagcaagcctcacatgtttccaaagatcttaatgaaaatcacagatctccgtagcatcagtgctaaaggtgcagagcgtgtaattaccttgaaaatggaaattcctggatcaatgccacctctcattcaagaaatgctggagaattctgaaggacatgaacccttgaccccaagttcaagtgggaacacagcagagcacagtcctagcatctcacccagctcagtggaaaacagtggggtcagtcagtcaccactcgtgcaataagacattttctagctacttcaaacattccccagtaccttcagttccaggatttaaaatgcaagaaaaaacatttttactgctgcttagtttttggactgaaaagatattaaaactcaagaaggaccaagaagttttcatatgtatcaatatatatactcctcactgtgtaacttacctagaaatacaaacttttccaattttaaaaaatcagccatttcatgcaaccagaaactagttaaaagcttctattttcctctttgaacactcaagattgcatggcaaagacccagtcaaaatgatttacccctggttaagtttctgaagactttgtacatacagaagtatggctctgttctttctatactgtatgtttggtgctttccttttgtcttgcatactcaaaataaccatgacaccaaggttatgaaatagactactgtacacgtctacctaggttcaaaaagataactgtcttgctttcatggaatagtcaagacatcaaggtaaggaaacaggactattgacaggactattgtacagtatgacaagataaggctgaagatattctactttagttagtatggaagcttgtctttgctctttctgatgctctcaaactgcatcttttatttcatgttgcccagtaaaagtatacaaattccctgcactagcagaagagaattctgtatcagtgtaactgccagttcagttaatcaaatgtcatttgttcaattgttaatgtcactttaaattaaaagtggtttattacttgtttaatgacataactacacagttagttaaaaaaaatttttttacagtaatgatagcctccaaggcagaaacacttttcagtgttaagtttttgtttacttgttcacaagccattagggaaatttcatgggataattagcaggctggtctaccacctggaccatgtaactctagtgtccttcctgattcatgcctgatattgggatttttttttccagccttcttgatgccaaggggctaattaatattaacaactcccaaagaaacaggcatagaatctgcctcctttgaccttgttcaatcactatgaagcagagtgaaagctgtggtagagtggttaacagatacaagtgtcagtttcttagttctcatttaagcactagtggaattttttttttttgatatattagcaagtctgtgatgtactttcactggctctgtttgtacattgagattgtttgtttaacaatgctttctatgttcatatactgtttacctttttccatggagtctcctggcaaagaataaaatatatttattttaaa

SEQ ID NO: 17694 - protein, 403 aa, Artificial Sequence
  derived and/or modified sequence
MSHRKFSAPRHGSLGFLPRKRSSRHRGKVKSFPKDDPSKPVHLTAFLGYKAGMTHIVREVDRPGSKVNKKEVVEAVTIVETPPMVVVGIVGYVETPRGLRTFKTVFAEHISDECKRRFYKNWHKSKKKAFTKYCKKWQDEDGKKQLEKDFSSMKKYCQVIRVIAHTQMRLLPLRQKKAHLMEIQVNGGTVAEKLDWARERLEQQVPVNQVFGQDEMIDVIGVTKGKGYKGVTSRWHTKKLPRKTHRGLRKVACIGAWHPARVAFSVARAGQKGYHHRTEINKKIYKIGQGYLIKDGKLIKNNASTDYDLSDKSINPLGGFVHYGEVTNDFVMLKGCVVGTKKRVLTLRKSLLVQTKRRALEKIDLKFIDTTSKFGHGRFQTMEEKKAFMGPLKKDRIAKEEGA

SEQ ID NO: 17695 - protein, 351 aa, Artificial Sequence
  derived and/or modified sequence
MTHIVREVDRPGSKVNKKEVVEAVTIVETPPMVVVGIVGYVETPRGLRTFKTVFAEHISDECKRRFYKNWHKSKKKAFTKYCKKWQDEDGKKQLEKDFSSMKKYCQVIRVIAHTQMRLLPLRQKKAHLMEIQVNGGTVAEKLDWARERLEQQVPVNQVFGQDEMIDVIGVTKGKGYKGVTSRWHTKKLPRKTHRGLRKVACIGAWHPARVAFSVARAGQKGYHHRTEINKKIYKIGQGYLIKDGKLIKNNASTDYDLSDKSINPLGGFVHYGEVTNDFVMLKGCVVGTKKRVLTLRKSLLVQTKRRALEKIDLKFIDTTSKFGHGRFQTMEEKKAFMGPLKKDRIAKEEGA

SEQ ID NO: 17696 - DNA, 1212 bp, Artificial Sequence
  derived and/or modified sequence
atgagccacagaaagttcagcgcccccagacacggcagcctgggcttcctgcccagaaagagaagcagcagacacagaggcaaggtgaagagcttccccaaggacgaccccagcaagcccgtgcacctgaccgccttcctgggctacaaggccggcatgacccacatcgtgagagaggtggacagacccggcagcaaggtgaacaagaaggaggtggtggaggccgtgaccatcgtggagaccccccccatggtggtggtgggcatcgtgggctacgtggagacccccagaggcctgagaaccttcaagaccgtgttcgccgagcacatcagcgacgagtgcaagagaagattctacaagaactggcacaagagcaagaagaaggccttcaccaagtactgcaagaagtggcaggacgaggacggcaagaagcagctggagaaggacttcagcagcatgaagaagtactgccaggtgatcagagtgatcgcccacacccagatgagactgctgcccctgagacagaagaaggcccacctgatggagatccaggtgaacggcggcaccgtggccgagaagctggactgggccagagagagactggagcagcaggtgcccgtgaaccaggtgttcggccaggacgagatgatcgacgtgatcggcgtgaccaagggcaagggctacaagggcgtgaccagcagatggcacaccaagaagctgcccagaaagacccacagaggcctgagaaaggtggcctgcatcggcgcctggcaccccgccagagtggccttcagcgtggccagagccggccagaagggctaccaccacagaaccgagatcaacaagaagatctacaagatcggccagggctacctgatcaaggacggcaagctgatcaagaacaacgccagcaccgactacgacctgagcgacaagagcatcaaccccctgggcggcttcgtgcactacggcgaggtgaccaacgacttcgtgatgctgaagggctgcgtggtgggcaccaagaagagagtgctgaccctgagaaagagcctgctggtgcagaccaagagaagagccctggagaagatcgacctgaagttcatcgacaccaccagcaagttcggccacggcagattccagaccatggaggagaagaaggccttcatgggccccctgaagaaggacagaatcgccaaggaggagggcgcctag

SEQ ID NO: 17697 - DNA, 1056 bp, Artificial Sequence
  derived and/or modified sequence
atgacacacatcgtgagagaagtcgatagaccgggcagtaaggtcaacaaaaaggaggtggtggaggctgtgacaattgtggagacaccgccaatggtggtggttggaatcgtggggtatgtagaaaccccacggggtctgcgtactttcaaaacagtgtttgctgaacatatcagcgatgaatgtaagagacgtttttataagaactggcataaaagcaagaaaaaagcttttacgaagtactgcaaaaaatggcaggacgaggacggaaagaaacagctcgaaaaagacttctcttccatgaagaagtactgtcaagtgatcagagtgatcgctcatacccagatgagactactgccactgcgacagaagaaagcccatttgatggaaatacaagtaaatgggggcaccgtcgctgagaagctggattgggccagggaacgcctggaacaacaggtcccagtgaatcaagtgtttggtcaggacgagatgatagacgtcatcggtgttacgaaaggaaaaggttataagggcgtcactagccgctggcacaccaagaagcttccaagaaagacacaccgcggcctccgcaaagttgcatgtatcggagcgtggcaccccgcacgtgtagccttcagtgtggctcgtgcgggccagaaagggtatcatcatagaacagagattaacaaaaagatctacaaaattggccaggggtatctgatcaaggatggcaaactcataaaaaacaacgcttccacagattatgatttatcagacaagagtatcaatccccttggcggtttcgtacattatggggaagtcaccaacgattttgtgatgttaaaaggttgcgtggtggggaccaagaagcgggttctcactttaagaaagagcctccttgtgcagaccaaaaggagagcattggagaaaatagacctgaagtttattgacaccacaagcaagtttggacacgggagattccagactatggaagaaaaaaaagcctttatgggccctctgaaaaaagaccgtatagctaaggaagaaggagcatag

SEQ ID NO: 17698 - DNA, 1212 bp, Artificial Sequence
  derived and/or modified sequence
atgagtcacagaaagttttccgctccacgacatgggagtcttggtttcttgcctcggaaaagaagttcacggcaccgaggaaaagtaaagtctttccctaaggacgacccttctaaacccgtgcatctaactgcgttcctcggatacaaggccggcatgacccacattgttagggaagttgaccggcccggcagcaaggttaataaaaaagaagtcgtcgaagccgttactatcgtggagactccacctatggtggttgtgggaattgtcggatatgtggagacccctcgtggcttgcggacgttcaagacagtctttgctgagcacatcagcgacgagtgcaaaaggcggttctataagaattggcacaagtctaaaaaaaaagccttcacaaagtactgcaaaaaatggcaggatgaggacggtaagaaacagctcgagaaggatttcagttcaatgaaaaagtattgtcaagtcatcagagttatcgcccatactcagatgcgcttacttcctctgaggcagaagaaggctcacttaatggagattcaggttaacggcggcacagttgccgaaaaactggattgggctcgcgagagattggaacagcaggtgccagtgaaccaggtgttcgggcaagatgagatgatcgatgtcatcggagtgactaagggcaaagggtataaaggggtcacgtcccggtggcatacaaagaaactcccccgaaagacgcatcgggggcttcggaaggtcgcttgcatcggggcttggcaccctgctagagtagccttttctgtagcgagggcaggccagaaagggtatcaccaccggaccgagataaataaaaagatctacaagataggccaggggtacttaatcaaggacggtaagctgatcaagaacaatgcctctactgactatgatcttagcgataagagcattaaccccctaggcgggtttgttcactatggggaagttactaacgacttcgtcatgctcaagggctgtgtggttggtaccaagaaacgtgtgcttactctgcgcaagagtctcctagttcagactaagcggagggctctagagaagatcgacctaaaatttatcgacacaactagcaaatttggtcatggccgcttccaaaccatggaagagaaaaaagcgttcatgggcccactgaagaaagaccgtatagcaaaggaagagggcgcatag

SEQ ID NO: 17699 - DNA, 1056 bp, Artificial Sequence
  derived and/or modified sequence
atgacccacatcgtgcgggaggtggacaggcctggcagcaaggtgaacaagaaggaggtggtggaggccgtgaccatcgtggagaccccacccatggtggtggtgggcatcgtgggctacgtggagaccccccggggcctgcggaccttcaagacagtgtttgctgagcacatcagtgatgagtgcaagaggcgcttctacaagaactggcacaagagcaagaagaaggccttcaccaagtactgcaagaagtggcaggatgaagatggcaagaagcagctggagaaggacttcagctccatgaagaagtactgccaggtgatccgggtgattgcccacacccagatgaggctgctgcccctgcggcagaagaaggcccacctgatggagatccaggtgaatggaggcaccgtggccgagaagctggactgggcccgggagcggctggagcagcaggtgcctgtgaaccaggtgtttggccaggatgagatgattgatgtgattggagtgaccaagggcaagggctacaagggcgtgaccagccgctggcacaccaagaagctgcccaggaagacccaccggggcctgaggaaggtggcctgcatcggggcctggcacccagcccgggtggccttctctgtggcccgggccggccagaagggctaccaccacaggacagagatcaacaagaagatctacaagattggccagggctacctgatcaaggatggcaagctgatcaagaacaatgccagcacagattatgacctgagtgacaagagcatcaaccccctgggcggctttgtgcactatggagaggtgaccaatgactttgtgatgctgaagggctgtgtggtgggcaccaagaagagggtgctgaccctgaggaagagcctgctggtgcagaccaagagaagagccctggagaagattgacctgaagttcatcgacaccaccagcaagtttggccacggccgcttccagaccatggaggagaagaaggccttcatgggccccctgaagaaggacagaattgccaaggaggagggcgcctag

SEQ ID NO: 17700 - DNA, 1212 bp, Artificial Sequence
  derived and/or modified sequence
atgagccacaggaagttcagcgcccccaggcatggcagcctgggcttcctgcccaggaagaggagcagccgccaccggggcaaggtgaagagcttccccaaggatgaccccagcaagcctgtgcacctgacagccttcctgggctacaaggccggcatgacccacatcgtgcgggaggtggacaggcctggcagcaaggtgaacaagaaggaggtggtggaggccgtgaccatcgtggagaccccacccatggtggtggtgggcatcgtgggctacgtggagaccccccggggcctgcggaccttcaagacagtgtttgctgagcacatcagtgatgagtgcaagaggcgcttctacaagaactggcacaagagcaagaagaaggccttcaccaagtactgcaagaagtggcaggatgaagatggcaagaagcagctggagaaggacttcagctccatgaagaagtactgccaggtgatccgggtgattgcccacacccagatgaggctgctgcccctgcggcagaagaaggcccacctgatggagatccaggtgaatggaggcaccgtggccgagaagctggactgggcccgggagcggctggagcagcaggtgcctgtgaaccaggtgtttggccaggatgagatgattgatgtgattggagtgaccaagggcaagggctacaagggcgtgaccagccgctggcacaccaagaagctgcccaggaagacccaccggggcctgaggaaggtggcctgcatcggggcctggcacccagcccgggtggccttctctgtggcccgggccggccagaagggctaccaccacaggacagagatcaacaagaagatctacaagattggccagggctacctgatcaaggatggcaagctgatcaagaacaatgccagcacagattatgacctgagtgacaagagcatcaaccccctgggcggctttgtgcactatggagaggtgaccaatgactttgtgatgctgaagggctgtgtggtgggcaccaagaagagggtgctgaccctgaggaagagcctgctggtgcagaccaagagaagagccctggagaagattgacctgaagttcatcgacaccaccagcaagtttggccacggccgcttccagaccatggaggagaagaaggccttcatgggccccctgaagaaggacagaattgccaaggaggagggcgcctag

SEQ ID NO: 17701 - DNA, 1056 bp, Artificial Sequence
  derived and/or modified sequence
atgacccacatcgtgcgggaggtggaccggcccggcagcaaggtgaacaaaaaggaagtggtggaggcagtgaccatcgttgagacgcctccaatggtagtggttggaatcgtgggatacgttgagacgcctagaggcctgagaacctttaaaacagtgttcgctgaacacataagcgatgagtgcaaacgacgcttttataagaactggcacaaatcgaagaaaaaagcctttaccaaatactgtaaaaagtggcaggatgaagatggaaagaagcaacttgaaaaggatttcagtagcatgaagaagtattgtcaggtcatccgggtcatagctcacacacaaatgcggttgctcccgctgagacaaaagaaggcacatctaatggagattcaggtgaacggtgggacagtggctgaaaagttagattgggcacgagagagattggagcaacaggtgcccgtcaaccaggtttttggacaggacgagatgattgatgtgatcggcgtcacgaaggggaagggctataagggagtgacttcccgttggcacaccaagaagcttcctagaaagacgcatcgaggtttacgaaaagtagcgtgtattggggcctggcaccccgctcgtgtcgcttttagcgtggcccgggccggccagaagggatatcaccacagaaccgaaatcaacaagaagatttataagattggccagggatacctcatcaaggacggcaaactaattaaaaacaatgcatccacagactatgatttgtcagacaaaagcatcaaccctttaggcggcttcgtgcattacggagaagtcaccaatgacttcgtgatgttaaagggatgtgtggtgggaacaaagaagagggttctcactctgcggaagtccctgctggtgcagaccaaaagaagagccctggagaaaatcgatttaaagtttatagacaccacgagtaagtttggacacggaaggttccagaccatggaggagaaaaaagccttcatgggccctctgaaaaaggacagaatagctaaagaggagggagcttag

SEQ ID NO: 17702 - DNA, 1212 bp, Artificial Sequence
  derived and/or modified sequence
atgagccaccggaagttcagcgccccccggcacggcagcctgggcttcctgccacgcaagcggtccagccggcaccgcggaaaagtgaaaagcttccccaaagatgaccctagtaagcctgttcacctaaccgcttttcttggttacaaagctgggatgacacacatcgttcgcgaggtggatcgacccggctccaaagtaaacaagaaggaggtggtggaagctgtcacaatagtggagacacctcccatggtggtcgtcggcatcgtgggttacgtcgagaccccccgtggtcttcggacatttaagaccgttttcgccgaacacatcagtgatgaatgtaaacgccggttctacaagaattggcataaatccaagaagaaagcctttactaaatactgtaaaaagtggcaggatgaagacggtaagaaacagttagaaaaagatttcagttctatgaaaaaatactgccaggtgataagggttattgcccacactcaaatgcggctgctgcccctgcgtcagaaaaaagcccatctgatggagattcaggtaaatggcggcaccgtcgccgaaaagctcgattgggctagggagagattggaacagcaggttccagtcaatcaggtatttggccaggatgagatgatcgacgtcataggcgtgaccaagggaaaagggtataagggagtcacctccagatggcacaccaagaaactgccccggaagacccacagaggtctccgtaaggtggcatgcatcggggcttggcatcccgccagggtggctttcagcgtggcccgcgccggacagaagggctatcatcatcggactgaaataaataaaaagatctacaagattggacagggttacctgatcaaagacggaaagctgataaaaaacaacgctagcactgattacgacctctctgataagtctattaaccccctcggcgggttcgtgcactacggagaggtgaccaatgatttcgtcatgttgaaaggttgcgtggtgggaaccaaaaagagagtgctgacgttgcggaaatccctcctggtgcagacaaagcgtcgagcactggaaaagatcgacctcaaattcatcgacacaaccagcaaatttggtcatggcaggttccagacgatggaggagaaaaaggccttcatgggaccacttaaaaaggacaggattgctaaggaggaaggagcctag

SEQ ID NO: 17703 - DNA, 1056 bp, Artificial Sequence
  derived and/or modified sequence
atgacccacatagttcgcgaggtagatagaccaggaagcaaggtcaacaaaaaggaggtggtggaggcagtaacaatcgtggaaaccccgcctatggtggtagtcggaattgtaggttacgtggagacaccgcgaggcttgagaactttcaaaacggtgttcgcagagcatatcagtgacgagtgtaagaggcgcttttacaaaaactggcacaagagcaaaaaaaaagcatttacaaaatattgtaagaaatggcaagatgaagatggcaagaagcaactcgagaaagacttcagctctatgaaaaaatattgccaggtcattcgcgttatcgctcacacacagatgcggctcttacccctccggcagaagaaagcccacctaatggagatccaggtgaatgggggaacagtggccgagaagctggattgggccagagaaagactggaacaacaggtgcccgtgaaccaggtgtttggacaagatgaaatgattgatgttatcggggtaaccaaaggaaagggctacaagggggtgacttcccgctggcacactaagaagctgccccgaaaaacacaccggggtttgaggaaagtcgcctgcataggcgcatggcaccccgctcgcgtggcttttagtgtcgccagggccggtcaaaagggctatcatcatagaactgagattaacaagaagatttacaagattggacagggatatctgattaaggatggcaagctgataaagaataatgcctccacggactatgatctgagcgacaagagtatcaaccctttaggtgggtttgtgcattacggagaggtgactaacgacttcgtaatgctcaaagggtgcgtggtgggaactaagaagcgtgtgctgaccctgagaaaaagtttgctggtacagaccaaaaggcgggctctcgaaaaaattgatttaaagtttattgacacaacctcgaaattcgggcatggacggtttcagactatggaggaaaagaaggcttttatgggtccgcttaagaaagatcggatcgccaaggaggagggagcctag

SEQ ID NO: 17704 - DNA, 1212 bp, Artificial Sequence
  derived and/or modified sequence
atgtctcacaggaagttcagtgcaccacgccacggctcgctgggatttctgcctagaaaacggtcttcgcgccaccggggaaaagtgaagagcttccccaaagacgaccccagtaagcctgtgcaccttactgcatttcttggatacaaggctgggatgactcacattgtgcgcgaagtggaccggccagggagtaaggtcaacaagaaagaggtcgtggaggccgtgacaattgtggaaaccccaccgatggtggtggtgggaatagtgggctatgtcgaaactcctcgcggacttcgcacatttaagacggtattcgcggaacacattagcgacgaatgcaaaaggagattttataagaattggcacaaaagtaaaaaaaaagcctttactaaatactgtaaaaaatggcaggacgaggacggcaaaaagcagctggaaaaagatttctcctctatgaagaagtattgtcaggtgatccgcgtcatcgcccacacgcagatgcgcctgctgcctctaaggcagaagaaagcacacctcatggaaatccaggtgaacgggggaaccgtcgccgagaagcttgactgggcacgggagagacttgaacaacaggttcccgtcaatcaggtcttcggccaggacgagatgatcgacgtcatcggggtcacaaagggcaaaggctacaagggtgtgaccagcagatggcacaccaaaaaactgccaaggaaaactcatcgtgggctccgtaaagtggcctgcataggtgcctggcacccagccagggtcgcattttctgttgcaagggcaggacagaaggggtaccaccaccgcaccgagattaataaaaaaatctacaaaatcggccagggctatctgattaaggatggcaagctgattaaaaacaacgcctctactgattatgacctgagcgataaatcgatcaacccactggggggatttgtgcactacggggaggtgacaaacgatttcgtgatgttaaaaggctgtgtagtgggaactaagaagagagtgctcacccttaggaaatccctattggtgcagaccaagaggcgagctctggagaagatcgatctaaaattcattgacaccaccagtaaatttgggcacgggagattccagacaatggaagaaaagaaagcattcatgggtcctttgaagaaggatcggatcgccaaggaggaaggcgcatag

SEQ ID NO: 17705 - DNA, 1442 bp, Artificial Sequence
  derived and/or modified sequence
gaacgaaagctaggagcggaagagcgtgcgtggaaatggcgctcggtacgtgcccccgacctgtcgtctgccgcgggggcgcgctcgcacgccggaaggggcggggccagatttggctttatatagcggacccgtaaggccgaccggcctctaccggcgggatttgatggcgtgatgtctcacagaaagttctccgctcccagacatgggtccctcggcttcctgcctcggaagcgcagcagcaggcatcgtgggaaggtgaagagcttccctaaggatgacccgtccaagccggtccacctcacagccttcctgggatacaaggctggcatgactcacatcgtgcgggaagtcgacaggccgggatccaaggtgaacaagaaggaggtggtggaggctgtgaccattgtagagacaccacccatggtggttgtgggcattgtgggctacgtggaaacccctcgaggcctccggaccttcaagactgtctttgctgagcacatcagtgatgaatgcaagaggcgtttctataagaattggcataaatctaagaagaaggcctttaccaagtactgcaagaaatggcaggatgaggatggcaagaagcagctggagaaggacttcagcagcatgaagaagtactgccaagtcatccgtgtcattgcccacacccagatgcgcctgcttcctctgcgccagaagaaggcccacctgatggagatccaggtgaacggaggcactgtggccgagaagctggactgggcccgcgagaggcttgagcagcaggtacctgtgaaccaagtgtttgggcaggatgagatgatcgacgtcatcggggtgaccaagggcaaaggctacaaaggggtcaccagtcgttggcacaccaagaagctgccccgcaagacccaccgaggcctgcgcaaggtggcctgtattggggcatggcatcctgctcgtgtagccttctctgtggcacgcgctgggcagaaaggctaccatcaccgcactgagatcaacaagaagatttataagattggccagggctaccttatcaaggacggcaagctgatcaagaacaatgcctccactgactatgacctatctgacaagagcatcaaccctctgggtggctttgtccactatggtgaagtgaccaatgactttgtcatgctgaaaggctgtgtggtgggaaccaagaagcgggtgctcaccctccgcaagtccttgctggtgcagacgaagcggcgggctctggagaagattgaccttaagttcattgacaccacctccaagtttggccatggccgcttccagaccatggaggagaagaaagcattcatgggaccactgaagaaagaccgaattgcaaaggaagaaggagcttaatgccaggaacagattttgcagttggtggggtctcaataaaagttattttccactga

SEQ ID NO: 17706 - DNA, 1289 bp, Artificial Sequence
  derived and/or modified sequence
cggtgatttttttcccacctagtctcacagaaagttctccgctcccagacatgggtccctcggcttcctgcctcggaagcgcagcagcaggcatcgtgggaaggtgaagagcttccctaaggatgacccgtccaagccggtccacctcacagccttcctgggatacaaggctggcatgactcacatcgtgcgggaagtcgacaggccgggatccaaggtgaacaagaaggaggtggtggaggctgtgaccattgtagagacaccacccatggtggttgtgggcattgtgggctacgtggaaacccctcgaggcctccggaccttcaagactgtctttgctgagcacatcagtgatgaatgcaagaggcgtttctataagaattggcataaatctaagaagaaggcctttaccaagtactgcaagaaatggcaggatgaggatggcaagaagcagctggagaaggacttcagcagcatgaagaagtactgccaagtcatccgtgtcattgcccacacccagatgcgcctgcttcctctgcgccagaagaaggcccacctgatggagatccaggtgaacggaggcactgtggccgagaagctggactgggcccgcgagaggcttgagcagcaggtacctgtgaaccaagtgtttgggcaggatgagatgatcgacgtcatcggggtgaccaagggcaaaggctacaaaggggtcaccagtcgttggcacaccaagaagctgccccgcaagacccaccgaggcctgcgcaaggtggcctgtattggggcatggcatcctgctcgtgtagccttctctgtggcacgcgctgggcagaaaggctaccatcaccgcactgagatcaacaagaagatttataagattggccagggctaccttatcaaggacggcaagctgatcaagaacaatgcctccactgactatgacctatctgacaagagcatcaaccctctgggtggctttgtccactatggtgaagtgaccaatgactttgtcatgctgaaaggctgtgtggtgggaaccaagaagcgggtgctcaccctccgcaagtccttgctggtgcagacgaagcggcgggctctggagaagattgaccttaagttcattgacaccacctccaagtttggccatggccgcttccagaccatggaggagaagaaagcattcatgggaccactgaagaaagaccgaattgcaaaggaagaaggagcttaatgccaggaacagattttgcagttggtggggtctcaataaaagttattttccactgaca

SEQ ID NO: 17707 - DNA, 1056 bp, Artificial Sequence
  derived and/or modified sequence
atgacccacatcgtgagagaggtggacagacccggcagcaaggtgaacaagaaggaggtggtggaggccgtgaccatcgtggagaccccccccatggtggtggtgggcatcgtgggctacgtggagacccccagaggcctgagaaccttcaagaccgtgttcgccgagcacatcagcgacgagtgcaagagaagattctacaagaactggcacaagagcaagaagaaggccttcaccaagtactgcaagaagtggcaggacgaggacggcaagaagcagctggagaaggacttcagcagcatgaagaagtactgccaggtgatcagagtgatcgcccacacccagatgagactgctgcccctgagacagaagaaggcccacctgatggagatccaggtgaacggcggcaccgtggccgagaagctggactgggccagagagagactggagcagcaggtgcccgtgaaccaggtgttcggccaggacgagatgatcgacgtgatcggcgtgaccaagggcaagggctacaagggcgtgaccagcagatggcacaccaagaagctgcccagaaagacccacagaggcctgagaaaggtggcctgcatcggcgcctggcaccccgccagagtggccttcagcgtggccagagccggccagaagggctaccaccacagaaccgagatcaacaagaagatctacaagatcggccagggctacctgatcaaggacggcaagctgatcaagaacaacgccagcaccgactacgacctgagcgacaagagcatcaaccccctgggcggcttcgtgcactacggcgaggtgaccaacgacttcgtgatgctgaagggctgcgtggtgggcaccaagaagagagtgctgaccctgagaaagagcctgctggtgcagaccaagagaagagccctggagaagatcgacctgaagttcatcgacaccaccagcaagttcggccacggcagattccagaccatggaggagaagaaggccttcatgggccccctgaagaaggacagaatcgccaaggaggagggcgcctag

SEQ ID NO: 17708 - protein, 427 aa, Artificial Sequence [sequence omitted]

SEQ ID NO: 17709 - protein, 406 aa, Artificial Sequence
  derived and/or modified sequence
MACARPLISVYSEKGESSGKNVTLPAVFKAPIRPDIVNFVHTNLRKNNRQPYAVSELAGHQTSAESWGTGRAVARIPRVRGGGTHRSGQGAFGNMCRGGRMFAPTKTWRRWHRRVNTTQKRYAICSALAASALPALVMSKGHRIEEVPELPLVVEDKVEGYKKTKEAVLLLKKLKAWNDIKKVYASQRMRAGKGKMRNRRRIQRRGPCIIYNEDNGIIKAFRNIPGITLLNVSKLNILKLAPGGHVGRFCIWTESAFRKLDELYGTWRKAASLKSNYNLPMHKMINTDLSRILKSPEIQRALRAPRKKIHRRVLKKNPLKNLRIMLKLNPYAKTMRRNTILRQARNHKLRVDKAAAAAAALQAKSDEKAAVAGKKPVVGKKGKKAAVGEKKPAEKKPTTEEKKPAA

SEQ ID NO: 17710 - protein, 151 aa, Artificial Sequence
  derived and/or modified sequence
MACARPLISVYSEKGESSGKNVTLPAVFKAPIRPDIVNFVHTNLRKNNRQPYAVSELAGHQTSAESWGTGRAVARIPRVRGGGTHRSGQGAFGNMCRGGRMFAPTKTWRRWHRRVNTTQKLENHVEAKPICKDHAPEHHSSPGQESQAPGG

SEQ ID NO: 17711 - DNA, 1284 bp, Artificial Sequence
  derived and/or modified sequence
atggcctgtgcaagacccttgatcagtgtgtacagtgaaaaaggcgagtctagcgggaagaatgttacgctccccgcggtctttaaagcgcccataagacctgacattgttaatttcgttcatactaatcttcggaagaataacaggcagccgtatgccgtcagcgagctggcgggtcatcagaccagcgccgagtcatggggtacaggccgggccgttgcacgtattcctagggtgagaggtggggggactcatcgctccggacaaggggctttcggtaacatgtgtcgggggggccgtatgtttgctcctacaaaaacctggaggcgctggcaccggcgagtaaacacaacccaaaagcggtatgccatctgttccgcacttgcagcgtctgcactccccgcccttgtgatgagcaaaggacaccggatcgaggaggtgccagagctgccgctggtagttgaggataaagtcgaagggtacaaaaagaccaaagaggccgttctgttactgaagaaactgaaggcttggaacgatatcaaaaaggtgtacgcttcccagcggatgcgcgcggggaagggcaagatgcgcaatagaaggaggattcaacgccgcggaccttgtattatatataatgaagacaacggaattattaaggcatttcggaacatcccgggcataactctcctcaacgtgagtaagttgaatatccttaagctggctcccggaggacacgtcggccgcttttgtatctggacagaaagcgcctttagaaagctagatgagctgtatggaacttggaggaaggcagccagcctgaagtccaactataacttacccatgcacaagatgattaacacagacctctccaggatccttaagtcccccgaaatccagcgggccctgcgggcccctcgcaagaaaatccacaggagagtgctgaaaaagaaccccctcaaaaacctgagaattatgctaaagcttaacccatatgccaaaaccatgcgcaggaatacaatcctgcggcaagcgcgcaatcataagctcagagtggacaaagcagccgctgctgctgctgctcttcaagcgaaatcagacgagaaggccgcggtggctggaaaaaagcccgtggttggtaagaaaggcaaaaaggctgcagtgggcgtcaaaaaacagaagaaacccttagtcggcaaaaaggcagccgctaccaaaaaacctgcacctgagaaaaagcctgctgaaaagaaaccgactacagaagagaaaaagcccgcggcttag

SEQ ID NO: 17712 - DNA, 1221 bp, Artificial Sequence
  derived and/or modified sequence
atggcctgcgcccggccgttaatatctgtgtactcggagaaaggggagagcagcgggaaaaatgtaacgttgccagccgtcttcaaggctcccatccggcctgatatagtgaattttgtccatacgaacctacgtaagaataaccgccaaccttatgcggtcagcgagcttgccggccaccagacatccgcggagagctggggtactggtagagctgtggccaggatcccgagagtgcgcggtggcgggacacataggtcaggacagggagcatttgggaatatgtgtagaggcggtcgcatgttcgcacctaccaagacctggcgacggtggcataggcgcgtaaacactacacagaagcggtacgcaatctgttctgcgctggccgcgtctgccttgccggcgctggtcatgtcaaaggggcacaggatcgaggaggtgcccgagctgcctctcgtcgtggaagataaggtggaaggctataagaagacaaaggaggcagtgctgctgctaaaaaagttaaaggcttggaatgacatcaagaaagtatatgcttcccagaggatgcgcgctggcaagggaaaaatgagaaatcgcagacgtatccagagaagaggtccatgtatcatatataatgaagataacggtatcatcaaggcctttcggaacatccctgggattacactattgaatgtctccaaactgaacattttgaagctcgctcctggaggccacgttggacggttctgcatttggactgagtctgcatttaggaagttggatgagctgtacggaacctggagaaaggcagcatccctgaagagcaactacaacctgcccatgcacaagatgattaacaccgatttgagccgcattcttaagagtcctgaaatacagcgggcactgagagcacctaggaagaaaatccacagaagggttctcaagaaaaaccctttgaagaacctccgcatcatgctcaagctgaatccctacgctaaaactatgcgacgtaacactatactccggcaagcccggaaccacaaactgagagtggacaaggcggccgctgccgccgccgctctacaggctaagagtgatgaaaaggctgctgtagcaggaaaaaagcccgtcgtaggcaagaaaggtaagaaagctgctgttggcgagaaaaagcctgcagagaaaaaaccaaccaccgaagagaagaagcctgcagcttag

SEQ ID NO: 17713 - DNA, 456 bp, Artificial Sequence
  derived and/or modified sequence
atggcttgtgcccggcctttgatctctgtctactctgagaaaggagagagcagcggcaaaaatgtgacattaccagctgtgttcaaggcccccatccggcccgatatcgtgaatttcgtgcacaccaacctgaggaagaacaaccgacaaccctatgctgtgtctgaacttgctggccaccagaccagtgctgagagctggggcacaggccgtgcggtcgcacggattcctagagtgagaggtggcggtactcaccggtctggccagggcgcttttgggaatatgtgtagaggaggcagaatgttcgctcccacgaaaacttggagaaggtggcaccgcagggtgaatacaacccaaaagcttgagaaccacgtggaggccaagccaatttgcaaagaccatgcgcctgagcaccattcttccccagggcaagaatcacaggctccaggagggtag

SEQ ID NO: 17714 - DNA, 1284 bp, Artificial Sequence
  derived and/or modified sequence
atggcctgtgcccggcccctcatctctgtgtacagcgagaagggggagagcagcggcaagaatgtgaccctgcctgctgtgttcaaggcccccatccggccagacatcgtgaactttgtgcacaccaacctgaggaagaacaaccggcagccctatgctgtgtctgagctggccggccaccagaccagcgctgagagctggggcaccggccgggctgtggcccgcatcccccgggtgcggggcggcggcacccacaggagcggccagggcgccttcggcaacatgtgccggggcggccgcatgtttgcccccaccaagacctggaggcgctggcacagaagagtgaacaccacccagaagagatatgccatctgcagcgccctggccgccagcgccctgcctgccctggtgatgagcaagggccaccgcatcgaggaggtgcctgagctgcccctggtggtggaggacaaggtggagggctacaagaagaccaaggaggccgtgctgctgctgaagaagctgaaggcctggaatgacatcaagaaggtgtatgccagccagaggatgagagctgggaagggcaagatgaggaacagaagacgcatccagaggcggggcccctgcatcatctacaatgaagataatggcatcatcaaggccttcaggaacatccctggcatcaccctgctgaatgtgtccaagctgaacatcctgaagctggcccctgggggccacgtgggccgcttctgcatctggacagaaagtgccttcaggaagctggatgagctgtatggcacctggaggaaggccgccagcctgaagagcaactacaacctgcccatgcacaagatgatcaacacagacctgagccgcatcctgaagagccctgagatccagagggccctgcgggcccccaggaagaagatccacagaagagtgctgaagaagaaccccctgaagaacctgcgcatcatgctgaagctgaacccctatgccaagaccatgagaagaaacaccatcctgcggcaggccaggaaccacaagctgcgggtggacaaggctgctgctgctgctgctgccctgcaggccaagagtgatgagaaggctgctgtggccggcaagaagcctgtggtgggcaagaagggcaagaaggctgctgtgggcgtgaagaagcagaagaagcccctggtgggcaagaaggccgccgccaccaagaagccagcccctgagaagaagccagctgagaagaagcccaccacagaggagaagaagccagctgcctag

SEQ ID NO: 17715 - DNA, 1221 bp, Artificial Sequence
  derived and/or modified sequence
atggcctgtgcccggcccctcatctctgtgtacagcgagaagggggagagcagcggcaagaatgtgaccctgcctgctgtgttcaaggcccccatccggccagacatcgtgaactttgtgcacaccaacctgaggaagaacaaccggcagccctatgctgtgtctgagctggccggccaccagaccagcgctgagagctggggcaccggccgggctgtggcccgcatcccccgggtgcggggcggcggcacccacaggagcggccagggcgccttcggcaacatgtgccggggcggccgcatgtttgcccccaccaagacctggaggcgctggcacagaagagtgaacaccacccagaagagatatgccatctgcagcgccctggccgccagcgccctgcctgccctggtgatgagcaagggccaccgcatcgaggaggtgcctgagctgcccctggtggtggaggacaaggtggagggctacaagaagaccaaggaggccgtgctgctgctgaagaagctgaaggcctggaatgacatcaagaaggtgtatgccagccagaggatgagagctgggaagggcaagatgaggaacagaagacgcatccagaggcggggcccctgcatcatctacaatgaagataatggcatcatcaaggccttcaggaacatccctggcatcaccctgctgaatgtgtccaagctgaacatcctgaagctggcccctgggggccacgtgggccgcttctgcatctggacagaaagtgccttcaggaagctggatgagctgtatggcacctggaggaaggccgccagcctgaagagcaactacaacctgcccatgcacaagatgatcaacacagacctgagccgcatcctgaagagccctgagatccagagggccctgcgggcccccaggaagaagatccacagaagagtgctgaagaagaaccccctgaagaacctgcgcatcatgctgaagctgaacccctatgccaagaccatgagaagaaacaccatcctgcggcaggccaggaaccacaagctgcgggtggacaaggctgctgctgctgctgctgccctgcaggccaagagtgatgagaaggctgctgtggccggcaagaagcctgtggtgggcaagaagggcaagaaggctgctgtgggggagaagaagccagctgagaagaagcccaccacagaggagaagaagccagctgcctag

SEQ ID NO: 17716 - DNA, 456 bp, Artificial Sequence
  derived and/or modified sequence
atggcctgtgcccggcccctcatctctgtgtacagcgagaagggggagagcagcggcaagaatgtgaccctgcctgctgtgttcaaggcccccatccggccagacatcgtgaactttgtgcacaccaacctgaggaagaacaaccggcagccctatgctgtgtctgagctggccggccaccagaccagcgctgagagctggggcaccggccgggctgtggcccgcatcccccgggtgcggggcggcggcacccacaggagcggccagggcgccttcggcaacatgtgccggggcggccgcatgtttgcccccaccaagacctggaggcgctggcacagaagagtgaacaccacccagaagctggagaaccacgtggaggccaagcccatctgcaaggaccacgcccctgagcaccacagcagccctggccaggagagccaggcccctgggggctag

SEQ ID NO: 17717 - DNA, 1284 bp, Artificial Sequence
  derived and/or modified sequence
atggcctgcgcccggcccctgatcagcgtgtacagcgagaagggcgaatcgtccgggaaaaatgtcaccctgccagcagtattcaaggcccctatacgccctgacattgtgaacttcgtgcataccaatctgaggaagaataatcggcagccgtacgctgtttctgagctggcaggccaccagactagcgctgaaagttggggcaccggccgagctgtggccaggatacctcgcgtcagaggcggaggtacgcaccgcagcggacagggggcattcgggaacatgtgtcgcgggggaagaatgtttgcccccacaaagacctggagacgttggcaccgccgcgtcaatacaacacagaagagatatgctatttgtagtgcactggcagcttctgcccttccagccctagtcatgagcaaagggcataggatcgaggaggtgcccgagctccccctggtcgttgaggataaggtagaagggtataagaaaacgaaggaggcggtgcttcttctgaagaaattaaaagcatggaatgacatcaagaaagtctatgcctcacagcggatgcgggcagggaaggggaaaatgagaaaccgcaggcgcatccagaggaggggcccatgcatcatctataatgaggataacggaataatcaaggcgttccgcaatatcccggggatcaccctcctcaacgtgagcaaattaaatattctaaagctggctccaggggggcacgttggacgcttttgcatttggacagagagcgcctttagaaaacttgatgaactgtatggaacttggcgcaaagcggcctctttgaaatccaactataacttaccaatgcacaagatgataaacaccgacctctcccgaatccttaagtcacccgagatccagcgggcactgcgggcccccaggaagaaaattcaccgtcgagtgctgaaaaaaaaccctctcaaaaatttgaggattatgctaaaactgaatccttacgctaaaacaatgaggcgcaacaccatcctgcggcaggctagaaatcacaagcttagagtcgacaaagccgccgccgcggccgccgccctccaggccaaatccgacgaaaaggcggccgtggccgggaaaaagcccgttgtcggaaagaaaggaaagaaagcagcagttggcgtcaagaagcagaaaaaaccgctggtggggaagaaggcggctgccactaaaaagcctgcccctgagaaaaagcctgctgaaaagaagcctacaaccgaggagaagaagcccgccgcctag

SEQ ID NO: 17718 - DNA, 1221 bp, Artificial Sequence
  derived and/or modified sequence
atggcctgcgcccggcccctgatcagcgtgtacagcgagaagggcgagtcaagtggcaagaacgtgacactgccagccgtgtttaaggctcccattcgccctgatattgtgaattttgttcatactaacctaaggaagaataatcgccagccttatgctgtgagcgaactcgctgggcatcagacctctgctgagtcttggggtactggacgggccgtggccaggattccccgggttcgcggagggggcacccacaggagcgggcaaggggcctttggcaacatgtgcagagggggccgcatgtttgccccaaccaaaacttggaggcggtggcaccggagagtgaacaccacgcagaaacgatacgccatctgttcggctctggcggcatccgctctccctgctctcgtgatgtcaaagggacaccgaatagaggaggtaccagagctcccactggtggtcgaggacaaggtggaaggatataagaagactaaagaggcagtgctgctcctcaagaagctcaaagcatggaacgatatcaagaaagtgtatgcctcccagcgcatgcgggccggcaaggggaaaatgagaaatcgccgacgcatccagcgccggggcccctgcattatctataacgaggacaacggaataataaaagcattccgaaacatccccggaattaccctcctgaacgtgagtaaacttaacatactgaaattggcccctggcggacacgtgggccgcttttgtatttggacagagagcgctttccgaaagttagacgagctctatggcacgtggcgcaaggccgcaagcctgaaaagtaattacaaccttcctatgcacaagatgattaacaccgacctgtctcggatcctgaagtctcccgagatccaaagggccctgcgggctccccgaaaaaaaattcatcggcgagttcttaaaaagaaccctttaaaaaatttgcgaatcatgctgaagctgaatccatacgcgaagaccatgcggcgcaatactatcctgcgtcaggctcgcaaccacaaactgcgggtggacaaagcagcagcagccgccgccgcgctgcaagcaaagagcgacgaaaaggcagcagtggccgggaagaaacccgtagttgggaagaaggggaagaaggccgccgtcggtgagaagaagcctgcggaaaaaaaacctacaaccgaggagaaaaagcctgccgcctag

SEQ ID NO: 17719 - DNA, 456 bp, Artificial Sequence
  derived and/or modified sequence
atggcctgcgcccggcccctgatcagcgtgtacagcgagaagggcgagtcttccgggaagaatgtcactctcccagcagtattcaaggccccgatccgtccagatattgtgaattttgtgcatactaacctcaggaaaaacaacaggcaaccatatgccgtgtctgagcttgctggtcaccaaacaagcgccgagtcttgggggacaggcagggcagtggcaaggattccaagagttcgcggaggggggacacatcggagcggacagggcgcattcgggaatatgtgtagagggggtcgcatgtttgccccaaccaaaacttggaggaggtggcaccgccgagtgaacaccacacagaaactagagaatcatgtagaggccaaacctatatgcaaggatcacgcccctgaacatcatagtagccctggacaggaatcccaagcacccggtggctag

SEQ ID NO: 17720 - DNA, 1284 bp, Artificial Sequence
  derived and/or modified sequence
atggcttgtgcacgccctcttatttccgtctacagtgaaaagggagagagtagcggtaagaacgtcacactgcccgctgtcttcaaggcccctattaggcccgatatcgttaacttcgtacacactaaccttcggaaaaacaacaggcagccatatgctgttagtgagctggctggccatcagaccagcgccgagtcctggggtacaggtagagctgttgcacgtatccctagagttagaggagggggaacccatagatctggccagggcgcattcggcaacatgtgccgcggtggacgcatgttcgcacctacaaagacttggagacggtggcatcgcagagtgaacaccacccaaaagcgttacgccatctgtagtgcattagctgcttccgctctacctgccctcgtgatgagcaaaggtcacaggattgaggaagtccccgagcttccgctcgtagttgaggacaaggtggaaggttacaagaaaacaaaagaggccgttctgctgctgaaaaagttaaaggcttggaacgacatcaaaaaagtctatgccagccagcgcatgcgagctggcaagggcaaaatgcgcaaccgcaggaggattcaaagaaggggaccctgtattatttacaacgaggacaatgggatcatcaaggcattcaggaacatcccgggtataaccctccttaatgttagtaagctaaatatcctgaagctggccccaggaggccacgtgggacgattctgcatttggactgagtccgcattccgcaaactggacgaattgtatggaacatggcgtaaggccgctagtctgaagtcaaattataacctgcccatgcacaaaatgatcaataccgatttaagccgtatcctgaagtcacccgagatccagcgcgctctgagagcccctcgcaagaaaatccaccggagggtcctgaaaaagaacccactaaagaacctgcggattatgttgaagcttaacccctacgcgaaaacgatgcgcaggaataccattctgaggcaagcccgtaaccataaactgagagtggataaggccgctgcagctgccgcagccctgcaggccaagagcgacgagaaagcagcagtcgccggaaagaagcctgtagttggaaagaaggggaagaaagccgctgtgggtgtcaagaaacaaaaaaagccactcgtcggtaagaaggctgccgcaactaaaaagcccgcacccgagaagaagcctgctgagaaaaagcccaccactgaagagaagaagccagcagcatag

SEQ ID NO: 17721 - DNA, 1221 bp, Artificial Sequence
  derived and/or modified sequence
atggcctgcgccagaccattgatcagcgtgtacagcgaaaagggggaaagttctggcaagaacgtcactttgccagccgtgtttaaggccccaataaggcctgacatagtgaacttcgtccataccaatttacgtaagaacaaccgtcagccctatgcagtgagcgaactagccggacaccaaacatctgcagaatcctggggaacagggcgtgccgttgcccgtatcccccgtgtgaggggaggaggcacccatcggtctggccagggagccttcgggaacatgtgccgcggaggccgaatgttcgcacccactaaaacatggcggagatggcacagacgtgtgaacacaactcagaagcgttacgctatctgttccgctctggctgcctccgctctgccagcactggttatgtcgaagggacaccggatcgaggaggttcctgagctgccactggtcgtggaggacaaagtggaaggctacaaaaagaccaaggaggccgtgctgctgctaaagaagctaaaagcttggaacgatattaaaaaagtatacgcgagccaacggatgcgcgcaggcaaggggaaaatgcggaaccggagacggatccagagacggggtccctgcataatttataatgaggacaacggcatcatcaaggcattccgcaatattcccggaattaccttgttgaatgtgagtaaactgaacattctgaagctggccccaggcggacacgtggggcgtttttgtatctggaccgagagtgcatttaggaaactggatgagttgtacggtacgtggaggaaggctgcctcactgaagagtaactacaacttacccatgcacaagatgataaacacagacctgtcgcgcatactgaaatccccggaaatccagcgcgcattgcgcgctccacgcaaaaaaatccacagaagagtgttaaagaagaaccctctgaagaacctccggattatgctgaaactcaatccgtatgcgaagaccatgaggcggaatacaatccttaggcaggccaggaaccataagctccgggtcgacaaagccgctgcggctgcagccgctctgcaagctaaaagtgacgaaaaagccgctgtggccggaaagaagccggttgtaggtaagaagggcaagaaagccgctgtcggagagaagaagcccgctgagaagaaacctacaactgaagagaaaaagccagcggcatag

SEQ ID NO: 17722 - DNA, 456 bp, Artificial Sequence
  derived and/or modified sequence
atggcctgtgccagacccttaattagcgtgtactcggaaaagggcgagagctccggaaagaacgtcacccttcccgctgtcttcaaagccccaatacgtcccgacatcgtcaacttcgtgcatactaacctcaggaagaataatcgccagccctacgctgtgagtgaactggcgggacaccagaccagcgcagagtcctggggaactggcagggcagtggctagaattccccgagttcgcggaggcggaacccatcgcagcggccaaggcgcatttgggaatatgtgcagaggcggtaggatgttcgcccctactaaaacctggaggagatggcaccgtcgtgttaatactactcaaaagctggagaatcatgtggaggccaaacccatttgcaaagatcacgcacccgagcaccactcaagcccgggacaggaaagccaagcccctggcggttag

SEQ ID NO: 17723 - DNA, 2321 bp, Artificial Sequence
  derived and/or modified sequence
ggaaggtgacatatacagcgggagtggtaagcacttccttttcctgtggcagcagccgggctgagaggagcgtggctgtctcctctctccgccatggcgtgtgctcgcccactgatatcggtgtactccgaaaagggggagtcatctggcaaaaatgtcactttgcctgctgtattcaaggctcctattcgaccagatattgtgaactttgttcacaccaacttgcgcaaaaacaacagacagccctatgctgtcagtgaattagcaggtcatcagactagtgctgagtcttggggtactggcagagctgtggctcgaattcccagagttcgaggtggtgggactcaccgctctggccagggtgcttttggaaacatgtgtcgtggaggccgaatgtttgcaccaaccaaaacctggcgccgttggcatcgtagagtgaacacaacccaaaaacgatacgccatctgttctgccctggctgcctcagccctaccagcactggtcatgtctaaaggtcatcgtattgaggaagttcctgaacttcctttggtagttgaagataaagttgaaggctacaagaagaccaaggaagctgttttgctccttaagaaacttaaagcctggaatgatatcaaaaaggtctatgcctctcagcgaatgagagctggcaaaggcaaaatgagaaaccgtcgccgtatccagcgcaggggcccgtgcatcatctataatgaggataatggtatcatcaaggccttcagaaacatccctggaattactctgcttaatgtaagcaagctgaacattttgaagcttgctcctggtgggcatgtgggacgtttctgcatttggactgaaagtgctttccggaagttagatgaattgtacggcacttggcgtaaagccgcttccctcaagagtaactacaatcttcccatgcacaagatgattaatacagatcttagcagaatcttgaaaagcccagagatccaaagagcccttcgagcaccacgcaagaagatccatcgcagagtcctaaagaagaacccactgaaaaacttgagaatcatgttgaagctaaacccatatgcaaagaccatgcgccggaacaccattcttcgccaggccaggaatcacaagctccgggtggataaggcagctgctgcagcagcggcactacaagccaaatcagatgagaaggcggcggttgcaggcaagaagcctgtggtaggtaagaaaggaaagaaggctgctgttggtgttaagaagcagaagaagcctctggtgggaaaaaaggcagcagctaccaagaaaccagcccctgaaaagaagcctgcagagaagaaacctactacagaggagaagaagcctgctgcataaactcttaaatttgattattccataaaggtcaaatcattttggacagcttcttttgaataaagacctgattatacaggcagtgagaaacatgacttggtgtgctctgtaaagcttggttagaatttttttaaagtgacattttgttggccataatttagactgttacattttatatagtgtggtataaaatggggcatggatttatactaagtccatggagttcagtggaaggggaatgatttaaaaaaagttgtggttttctaaataatgtggcttgaaaaataggtgtaacaggacttggtcagaaacgcagaggctgttcaagtttagctccccaccagatggaaaataggttaaattctgtaaagatttaactttaaccacaagagggcacaactggagagcacaatttttttggtactgcagtaaaattgattacctcttgagaagtgttctttttaaccagctataacaatagagttgagtattttcacccatggtttgaaaaagtgccagaaggccacactggcccacatctgtaatcccaacactttgggaccctaaggtgggcagagcacttgagccaatgagttcaagaccagcctggtcaacatgatgaaatctcgtctctactgaaaatataaaaaatagccagtcatggtgcatgcctgtaaccccagctacttggaggctgaggcaagagaatcacttgaacctgggaggtggaggttgcaatgagccaagattgtaccattgccctccagcctgggcgtcagagcaagactctctgaaaagtaccagaagcatttttcaggactgcctgtgtgtcttggtgattatgttaaccaactgtgttcaaaagaagtacccatgaaatgcctccagatataagggtgtttttttttacccataaagctaaactgcaaatattaccctagaattaa

SEQ ID NO: 17724 - DNA, 1277 bp, Artificial Sequence
  derived and/or modified sequence
cttttcctgtggcagcagccgggctgagaggagcgtggctgtctcctctctccgccatggcgtgtgctcgcccactgatatcggtgtactccgaaaagggggagtcatctggcaaaaatgtcactttgcctgctgtattcaaggctcctattcgaccagatattgtgaactttgttcacaccaacttgcgcaaaaacaacagacagccctatgctgtcagtgaattagcaggtcatcagactagtgctgagtcttggggtactggcagagctgtggctcgaattcccagagttcgaggtggtgggactcaccgctctggccagggtgcttttggaaacatgtgtcgtggaggccgaatgtttgcaccaaccaaaacctggcgccgttggcatcgtagagtgaacacaacccaaaaacgatacgccatctgttctgccctggctgcctcagccctaccagcactggtcatgtctaaaggtcatcgtattgaggaagttcctgaacttcctttggtagttgaagataaagttgaaggctacaagaagaccaaggaagctgttttgctccttaagaaacttaaagcctggaatgatatcaaaaaggtctatgcctctcagcgaatgagagctggcaaaggcaaaatgagaaaccgtcgccgtatccagcgcaggggcccgtgcatcatctataatgaggataatggtatcatcaaggccttcagaaacatccctggaattactctgcttaatgtaagcaagctgaacattttgaagcttgctcctggtgggcatgtgggacgtttctgcatttggactgaaagtgctttccggaagttagatgaattgtacggcacttggcgtaaagccgcttccctcaagagtaactacaatcttcccatgcacaagatgattaatacagatcttagcagaatcttgaaaagcccagagatccaaagagcccttcgagcaccacgcaagaagatccatcgcagagtcctaaagaagaacccactgaaaaacttgagaatcatgttgaagctaaacccatatgcaaagaccatgcgccggaacaccattcttcgccaggccaggaatcacaagctccgggtggataaggcagctgctgcagcagcggcactacaagccaaatcagatgagaaggcggcggttgcaggcaagaagcctgtggtaggtaagaaaggaaagaaggctgctgttggtgaaaagaagcctgcagagaagaaacctactacagaggagaagaagcctgctgcataa

SEQ ID NO: 17725 - DNA, 820 bp, Artificial Sequence
  derived and/or modified sequence
cttttcctgtggcagcagccgggctgagaggagcgtggctgtctcctctctccgccatggcgtgtgctcgcccactgatatcggtgtactccgaaaagggggagtcatctggcaaaaatgtcactttgcctgctgtattcaaggctcctattcgaccagatattgtgaactttgttcacaccaacttgcgcaaaaacaacagacagccctatgctgtcagtgaattagcaggtcatcagactagtgctgagtcttggggtactggcagagctgtggctcgaattcccagagttcgaggtggtgggactcaccgctctggccagggtgcttttggaaacatgtgtcgtggaggccgaatgtttgcaccaaccaaaacctggcgccgttggcatcgtagagtgaacacaacccaaaaacttgagaatcatgttgaagctaaacccatatgcaaagaccatgcgccggaacaccattcttcgccaggccaggaatcacaagctccgggtggataaggcagctgctgcagcagcggcactacaagccaaatcagatgagaaggcggcggttgcaggcaagaagcctgtggtaggtaagaaaggaaagaaggctgctgttggtgttaagaagcagaagaagcctctggtgggaaaaaaggcagcagctaccaagaaaccagcccctgaaaagaagcctgcagagaagaaacctactacagaggagaagaagcctgctgcataaactcttaaatttgattattccataaaggtcaaatcattttggacagcttcttttgaataaagacctgattatacaggcagtg

SEQ ID NO: 17726 - DNA, 1284 bp, Artificial Sequence
  derived and/or modified sequence
atggcctgcgccagacccctgatcagcgtgtacagcgagaagggcgagagcagcggcaagaacgtgaccctgcccgccgtgttcaaggcccccatcagacccgacatcgtgaacttcgtgcacaccaacctgagaaagaacaacagacagccctacgccgtgagcgagctggccggccaccagaccagcgccgagagctggggcaccggcagagccgtggccagaatccccagagtgagaggcggcggcacccacagaagcggccagggcgccttcggcaacatgtgcagaggcggcagaatgttcgcccccaccaagacctggagaagatggcacagaagagtgaacaccacccagaagagatacgccatctgcagcgccctggccgccagcgccctgcccgccctggtgatgagcaagggccacagaatcgaggaggtgcccgagctgcccctggtggtggaggacaaggtggagggctacaagaagaccaaggaggccgtgctgctgctgaagaagctgaaggcctggaacgacatcaagaaggtgtacgccagccagagaatgagagccggcaagggcaagatgagaaacagaagaagaatccagagaagaggcccctgcatcatctacaacgaggacaacggcatcatcaaggccttcagaaacatccccggcatcaccctgctgaacgtgagcaagctgaacatcctgaagctggcccccggcggccacgtgggcagattctgcatctggaccgagagcgccttcagaaagctggacgagctgtacggcacctggagaaaggccgccagcctgaagagcaactacaacctgcccatgcacaagatgatcaacaccgacctgagcagaatcctgaagagccccgagatccagagagccctgagagcccccagaaagaagatccacagaagagtgctgaagaagaaccccctgaagaacctgagaatcatgctgaagctgaacccctacgccaagaccatgagaagaaacaccatcctgagacaggccagaaaccacaagctgagagtggacaaggccgccgccgccgccgccgccctgcaggccaagagcgacgagaaggccgccgtggccggcaagaagcccgtggtgggcaagaagggcaagaaggccgccgtgggcgtgaagaagcagaagaagcccctggtgggcaagaaggccgccgccaccaagaagcccgcccccgagaagaagcccgccgagaagaagcccaccaccgaggagaagaagcccgccgcctag

SEQ ID NO: 17727 - DNA, 1221 bp, Artificial Sequence
  derived and/or modified sequence
atggcctgcgccagacccctgatcagcgtgtacagcgagaagggcgagagcagcggcaagaacgtgaccctgcccgccgtgttcaaggcccccatcagacccgacatcgtgaacttcgtgcacaccaacctgagaaagaacaacagacagccctacgccgtgagcgagctggccggccaccagaccagcgccgagagctggggcaccggcagagccgtggccagaatccccagagtgagaggcggcggcacccacagaagcggccagggcgccttcggcaacatgtgcagaggcggcagaatgttcgcccccaccaagacctggagaagatggcacagaagagtgaacaccacccagaagagatacgccatctgcagcgccctggccgccagcgccctgcccgccctggtgatgagcaagggccacagaatcgaggaggtgcccgagctgcccctggtggtggaggacaaggtggagggctacaagaagaccaaggaggccgtgctgctgctgaagaagctgaaggcctggaacgacatcaagaaggtgtacgccagccagagaatgagagccggcaagggcaagatgagaaacagaagaagaatccagagaagaggcccctgcatcatctacaacgaggacaacggcatcatcaaggccttcagaaacatccccggcatcaccctgctgaacgtgagcaagctgaacatcctgaagctggcccccggcggccacgtgggcagattctgcatctggaccgagagcgccttcagaaagctggacgagctgtacggcacctggagaaaggccgccagcctgaagagcaactacaacctgcccatgcacaagatgatcaacaccgacctgagcagaatcctgaagagccccgagatccagagagccctgagagcccccagaaagaagatccacagaagagtgctgaagaagaaccccctgaagaacctgagaatcatgctgaagctgaacccctacgccaagaccatgagaagaaacaccatcctgagacaggccagaaaccacaagctgagagtggacaaggccgccgccgccgccgccgccctgcaggccaagagcgacgagaaggccgccgtggccggcaagaagcccgtggtgggcaagaagggcaagaaggccgccgtgggcgagaagaagcccgccgagaagaagcccaccaccgaggagaagaagcccgccgcctag

SEQ ID NO: 17728 - DNA, 456 bp, Artificial Sequence
  derived and/or modified sequence
atggcctgcgccagacccctgatcagcgtgtacagcgagaagggcgagagcagcggcaagaacgtgaccctgcccgccgtgttcaaggcccccatcagacccgacatcgtgaacttcgtgcacaccaacctgagaaagaacaacagacagccctacgccgtgagcgagctggccggccaccagaccagcgccgagagctggggcaccggcagagccgtggccagaatccccagagtgagaggcggcggcacccacagaagcggccagggcgccttcggcaacatgtgcagaggcggcagaatgttcgcccccaccaagacctggagaagatggcacagaagagtgaacaccacccagaagctggagaaccacgtggaggccaagcccatctgcaaggaccacgcccccgagcaccacagcagccccggccaggagagccaggcccccggcggctag

SEQ ID NO: 17729 - protein, 248 aa, Artificial Sequence
  derived and/or modified sequence
MEGVEEKKKEVPAVPETLKKKRRNFAELKIKRLRKKFAQKMLRKARRKLIYEKAKHYHKEYRQMYRTEIRMARMARKAGNFYVPAEPKLAFVIRIRGINGVSPKVRKVLQLLRLRQIFNGTFVKLNKASINMLRIVEPYIAWGYPNLKSVNELIYKRGYGKINKKRIALTDNALIARSLGKYGIICMEDLIHEIYTVGKRFKEANNFLWPFKLSSPRGGMKKKTTHFVEGGDAGNREDQINRLIRRMN

SEQ ID NO: 17730 - DNA, 747 bp, Artificial Sequence
  derived and/or modified sequence
atggagggcgttgaggaaaagaagaaagaggttcccgccgttcccgaaacacttaaaaagaaacgcaggaattttgccgagctcaaaatcaagcgcctgaggaaaaaattcgcgcagaagatgttacgcaaagcgcgtagaaagctgatctacgagaaggccaagcactaccacaaggagtatagacagatgtataggacagaaatccggatggccagaatggctagaaaggctgggaatttctatgtgcccgcggagccgaagctggccttcgttatccggatacggggaattaacggcgtttcgccaaaagtgaggaaagtcctccagctgcttcggctgagacagattttcaacggcacgttcgttaaactcaacaaggcgagtattaatatgctgaggattgttgagccctacatcgcttggggctaccccaacctgaaatcggtcaacgagctgatctacaaacgcggctacgggaaaataaacaaaaaacgaattgcgctaacagacaatgctctgatcgcaaggtcactgggaaagtatggcattatctgcatggaagatttgatacatgagatttacaccgtggggaaaagatttaaggaagcgaataacttcttatggccattcaaactgtcttcccccagagggggtatgaaaaaaaaaaccacccactttgtggaaggcggggatgctggaaacagagaggatcaaatcaacagactgattcgaaggatgaattag

SEQ ID NO: 17731 - DNA, 747 bp, Artificial Sequence
  derived and/or modified sequence
atggagggcgtggaggagaagaagaaggaggtgcctgctgtgcctgagaccctgaagaagaagagaagaaactttgctgagctgaagatcaagaggctgaggaagaagtttgcccagaagatgctgaggaaggcccggaggaagctgatctatgagaaggccaagcactaccacaaggagtaccggcagatgtacagaacagagatccgcatggccaggatggccaggaaggccggcaacttctacgtgcctgctgagcccaagctggcctttgtgatccgcatccggggcatcaatggagtgagccccaaggtgaggaaggtgctgcagctgctgcggctgcggcagatcttcaacggcacctttgtgaagctgaacaaggccagcatcaacatgctgagaattgtggagccctacatcgcctggggctaccccaacctgaagtctgtgaatgaactcatctacaagaggggctacggcaagatcaacaagaagagaattgccctgacagacaatgccctgattgcccggagcctgggcaagtatggcatcatctgcatggaggacctgatccacgagatctacacagtgggcaagcgcttcaaggaggccaacaacttcctgtggcccttcaagctgagcagcccccggggcggcatgaagaagaagaccacccactttgtggagggcggagatgctggcaaccgggaggaccagatcaacagactcatccggaggatgaactag

SEQ ID NO: 17732 - DNA, 747 bp, Artificial Sequence
  derived and/or modified sequence
atggagggcgtggaggagaagaagaaggaggtgcccgccgtgcccgaaaccctgaagaaaaaacgccgaaactttgccgagttgaaaattaaacgcctcagaaagaaatttgctcagaagatgttgcgtaaggctcggcgtaagctgatttacgagaaagcgaagcattaccacaaagagtatagacagatgtatcgcacggagatacgtatggcgcggatggcccggaaagccggcaatttctatgttcccgccgaacccaaattggctttcgtcatcaggatacggggcattaatggggtatccccgaaggtcaggaaggtccttcagctgctaagactgcgccagatcttcaatggtacattcgtgaaactgaataaagcatcaattaacatgctgaggattgtggaaccttatattgcttggggctaccctaacctcaagagtgtcaatgagttaatttataaaagagggtatggaaaaatcaacaaaaagagaatagctctcactgataatgcgctcattgcaaggtccctcggcaagtatggcatcatttgcatggaggatctgattcacgaaatttatacggtggggaagcggttcaaagaagctaacaatttcttatggccttttaagctgagcagccctcggggagggatgaagaagaagaccacccatttcgtcgagggcggagatgcaggcaacagagaagatcagatcaaccgcctgatccggcggatgaactag

SEQ ID NO: 17733 - DNA, 747 bp, Artificial Sequence
  derived and/or modified sequence
atggagggggtggaggagaaaaagaaagaggtccccgcagtgccagagacgcttaaaaaaaagcggagaaattttgcagagctgaaaattaaacgcctgagaaagaagttcgctcagaagatgttgaggaaagcaagacgaaaactaatttatgagaaagctaaacactatcacaaggaataccggcagatgtacaggaccgagatcaggatggcccgtatggcaaggaaggctggaaacttctacgtgccagccgagcccaagcttgcttttgtgatcagaattcgaggcatcaacggggtgagcccaaaggttcggaaagtgctccagttacttcgactccggcagattttcaatggtacattcgtcaagctgaataaggcctcaataaatatgctgcggatcgtggagccgtacatcgcctggggctaccccaatttgaaaagcgttaacgagctaatctacaagcggggttatgggaagatcaacaagaaacgtatcgctctcacggacaatgctctcatcgcgagaagcctgggaaagtacgggatcatttgtatggaggatctgattcacgaaatctacaccgtaggcaagcgtttcaaggaagcaaataacttcctgtggcccttcaaactgtctagcccgagagggggaatgaaaaagaagaccacccatttcgtggaggggggagatgccggaaatcgggaggaccagatcaataggctgattcgcaggatgaactag

SEQ ID NO: 17734 - DNA, 1101 bp, Artificial Sequence
  derived and/or modified sequence
gcagcctggggattaggacccggagttgccaaggtgtcagcactctttgctcttgaattgattaaaaagtctaatcaaatgcatatattttcttcaaacaagttttacccgaaagtttgttgaaagaggctaaatcagggagttctttgcgtctgcaaggcggctttttagttctggattcttttccggcttattctaagacacctatgagtcgtggggcttctctcgcgaagtctttaagtggacagtacgcatgcgccaacttcctctttttccggctggaaccatggagggtgtagaagagaagaagaaggaggttcctgctgtgccagaaacccttaagaaaaagcgaaggaatttcgcagagctgaagatcaagcgcctgagaaagaagtttgcccaaaagatgcttcgaaaggcaaggaggaagcttatctatgaaaaagcaaagcactatcacaaggaatataggcagatgtacagaactgaaattcgaatggcgaggatggcaagaaaagctggcaacttctatgtacctgcagaacccaaattggcgtttgtcatcagaatcagaggtatcaatggagtgagcccaaaggttcgaaaggtgttgcagcttcttcgccttcgtcaaatcttcaatggaacctttgtgaagctcaacaaggcttcgattaacatgctgaggattgtagagccatatattgcatgggggtaccccaatctgaagtcagtaaatgaactaatctacaagcgtggttatggcaaaatcaataagaagcgaattgctttgacagataacgctttgattgctcgatctcttggtaaatacggcatcatctgcatggaggatttgattcatgagatctatactgttggaaaacgcttcaaagaggcaaataacttcctgtggcccttcaaattgtcttctccacgaggtggaatgaagaaaaagaccacccattttgtagaaggtggagatgctggcaacagggaggaccagatcaacaggcttattagaagaatgaactaaggtgtctaccatgattatttttctaagctggttggttaataaacagtacctgctctcaaattgaaata

SEQ ID NO: 17735 - DNA, 747 bp, Artificial Sequence
  derived and/or modified sequence
atggagggcgtggaggagaagaagaaggaggtgcccgccgtgcccgagaccctgaagaagaagagaagaaacttcgccgagctgaagatcaagagactgagaaagaagttcgcccagaagatgctgagaaaggccagaagaaagctgatctacgagaaggccaagcactaccacaaggagtacagacagatgtacagaaccgagatcagaatggccagaatggccagaaaggccggcaacttctacgtgcccgccgagcccaagctggccttcgtgatcagaatcagaggcatcaacggcgtgagccccaaggtgagaaaggtgctgcagctgctgagactgagacagatcttcaacggcaccttcgtgaagctgaacaaggccagcatcaacatgctgagaatcgtggagccctacatcgcctggggctaccccaacctgaagagcgtgaacgagctgatctacaagagaggctacggcaagatcaacaagaagagaatcgccctgaccgacaacgccctgatcgccagaagcctgggcaagtacggcatcatctgcatggaggacctgatccacgagatctacaccgtgggcaagagattcaaggaggccaacaacttcctgtggcccttcaagctgagcagccccagaggcggcatgaagaagaagaccacccacttcgtggagggcggcgacgccggcaacagagaggaccagatcaacagactgatcagaagaatgaactag

SEQ ID NO: 17736 - protein, 151 aa, Artificial Sequence
  derived and/or modified sequence
MAPLYQAAGKGDVPTKRPPVLRAGVNTVTTLVENKKAQLVVIAHDVDPIELVVFLPALCRKMGVPYCIIKGKARLGRLVHRKTCTTVAFTQVNSEDKGALAKLVEAIRTNYNDRYDEIRRHWGGNVLGPKSVARIAKLEKAKAKELATKLG

SEQ ID NO: 17737 - protein, 266 aa, Artificial Sequence [sequence omitted]

SEQ ID NO: 17738 - protein, 191 aa, Artificial Sequence
  derived and/or modified sequence
MLVRLNVRCSCRGVVLGGCRKLLASLVQPKGKKAKGKKVAPAPAVVKKQEAKKVVNPLFEKRPKNFGIGQDIQPKRDLTRFVKWPRYIRLQRQRAILYKRLKVPPAINQFTQALDRQTATQLLKLAHKYRPETKQEKKQRLLARAEKKAAGKGDVPTKRPPVLRAGVNTVTTLVENKKAQLVVIAHDVDPI

SEQ ID NO: 17739 - DNA, 456 bp, Artificial Sequence
  derived and/or modified sequence
atggccccactgtatcaagcggcaggcaaaggggatgtaccaaccaagaggccgcctgttctaagagctggggttaacaccgtcacaaccctagtggagaataagaaagcccagttggtggtaatagcccacgatgttgaccctatcgagcttgtggttttcttgcccgccttatgcagaaagatgggtgtgccatactgcattatcaaaggcaaagcacgcctgggcagactggtgcacaggaaaacatgtaccacagtggcgttcactcaggtcaatagtgaggataagggggccctggccaagcttgtagaggcaattcggacgaattacaatgacagatatgacgagataaggcggcattggggcgggaatgtattaggacccaagtccgtggcccggattgcgaagctggaaaaggctaaggccaaagagttggccactaaattgggttag

SEQ ID NO: 17740 - DNA, 801 bp, Artificial Sequence
  derived and/or modified sequence
atgcccaaaggaaagaaggctaaaggcaaaaaggttgccccagctccagcagtggtgaaaaagcaggaagccaaaaaggttgtgaatcccctcttcgagaaacgccctaaaaatttcggaatcggacaggacatacaacccaaaagggacctgactcgcttcgttaagtggccccggtacattcgactgcagagacagcgcgcaattttatataaacggctgaaggtgccacctgctataaaccaattcacacaggctctggaccggcagaccgccactcaactactgaaattggctcacaaatacaggccagagacgaaacaggagaagaaacagaggttgctcgcccgcgccgaaaagaaagcggccggtaagggcgacgtgcctactaagcggccacccgtcctgcgggccggcgtgaataccgtgactactctcgttgagaacaagaaagctcagttggtcgttattgcgcatgatgtcgatcccattgagttggtggtcttccttcccgcactttgcagaaaaatgggtgttccttattgtattattaagggcaaggcacggctgggcaggttggtacatcgtaaaacatgcacaacagtggcttttacacaagttaatagcgaggataagggagcgctggccaagttagtggaagccatccggacgaactacaatgaccggtacgacgagatccggcgtcactggggaggcaatgtactggggccgaagagcgtcgcccgtattgccaagctggaaaaagccaaagcaaaggagctggcaaccaagctgggctag

SEQ ID NO: 17741 - DNA, 576 bp, Artificial Sequence
  derived and/or modified sequence
atgcttgtgcggctcaacgtacgctgcagttgtagaggcgtggtgctgggcgggtgtcggaaactgctggcctccctggttcagcccaagggaaaaaaggcaaaaggcaagaaggtcgcacccgccccagcagttgtcaagaagcaagaagcaaaaaaagtcgtcaatcccctgtttgagaagcggcccaaaaatttcggtatcggtcaggatatccagccgaagcgagatctgacacggttcgtcaagtggccccgatacatccgactgcagcggcagcgggctatcctctataagagacttaaggtgccgcctgctatcaatcaattcacacaggccctcgaccgacagaccgctacgcaactgcttaagctggctcacaaatatcgcccagagactaaacaagagaaaaaacaaagacttttagctagggccgagaagaaggcagcaggaaagggcgacgttcccactaaacggcctcctgtgctgagggccggagtaaatacagtaacaaccctggtggagaataagaaagcccaactggtcgtcatagcccacgacgtcgaccctatatag

SEQ ID NO: 17742 - DNA, 456 bp, Artificial Sequence
  derived and/or modified sequence
atggcccccctgtaccaggccgccgggaaaggagatgtgcccaccaagaggcctcctgtgctgcgggccggcgtgaacacagtgaccaccctggtggagaacaagaaggcccagctggtggtgattgcccatgatgtggaccccatcgagctggtggtgttcctgcctgccctgtgcaggaagatgggcgtgccctactgcatcatcaagggcaaggcccggctgggccgcctggtgcacaggaagacctgcaccaccgtggccttcacccaggtgaacagtgaagataaaggagccctggccaagctggtggaggccatccgcaccaactacaatgacagatatgatgagatcagaagacactggggcggcaatgtgctgggccccaagtctgtggccagaattgccaagctggagaaggccaaggccaaggagctggccaccaagctgggctag

SEQ ID NO: 17743 - DNA, 801 bp, Artificial Sequence
  derived and/or modified sequence
atgcccaagggcaagaaggccaagggcaagaaggtggccccagccccagctgtggtgaagaagcaggaggccaagaaggtggtgaaccccctgtttgagaagaggcccaagaactttggaattggccaggacatccagcccaagagggacctgaccaggtttgtgaagtggccccgctacatccggctgcagaggcagagggccatcctgtacaagaggctgaaggtgcccccagccatcaaccagttcacccaggccctggaccggcagacagccacccagctgctgaagctggcccacaagtacagacctgagaccaagcaggagaagaagcagaggctgctggcccgggcagagaagaaggctgctggaaaaggagatgtgcccaccaagaggcctcctgtgctgcgggccggcgtgaacacagtgaccaccctggtggagaacaagaaggcccagctggtggtgattgcccatgatgtggaccccatcgagctggtggtgttcctgcctgccctgtgcaggaagatgggcgtgccctactgcatcatcaagggcaaggcccggctgggccgcctggtgcacaggaagacctgcaccaccgtggccttcacccaggtgaacagcgaggacaagggggccctggccaagctggtggaggccatccgcaccaactacaatgacagatatgatgagatccgccgccactggggcggcaatgtgctgggccccaagtctgtggcccgcatcgccaagctggagaaggccaaggccaaggagctggccaccaagctgggctag

SEQ ID NO: 17744 - DNA, 576 bp, Artificial Sequence
  derived and/or modified sequence
atgctggtgcggctgaatgtgcgctgcagctgccggggcgtggtgctgggcggctgcaggaagctgctggccagcctggtgcagcccaagggcaagaaggccaagggcaagaaggtggccccagccccagctgtggtgaagaagcaggaggccaagaaggtggtgaaccccctgtttgagaagaggcccaagaactttggcatcggccaggacatccagcccaagagggacctgaccaggtttgtgaagtggccccgctacatccggctgcagaggcagagggccatcctgtacaagaggctgaaggtgcccccagccatcaaccagttcacccaggccctggaccggcagacagccacccagctgctgaagctggcccacaagtacagacctgagaccaagcaggagaagaagcagaggctgctggcccgggcagagaagaaggccgccgggaaaggagatgtgcccaccaagaggcctcctgtgctgcgggccggcgtgaacacagtgaccaccctggtggagaacaagaaggcccagctggtggtgattgcccatgatgtggaccccatctag

SEQ ID NO: 17745 - DNA, 456 bp, Artificial Sequence
  derived and/or modified sequence
atggcccccctgtaccaggccgccggcaagggcgacgtgcccaccaaaagacctccggtgcttagagcaggcgtcaacacagttacaaccctggtggagaacaaaaaagcccaattggtcgtgattgcgcacgatgtggatcccattgagctggtcgtattcctgcccgctctgtgccgaaaaatgggcgtaccctactgcataatcaaaggaaaggccaggctcggacgcctcgttcacagaaaaacgtgcaccactgttgccttcacccaggtcaacagtgaagacaagggcgctttggccaaactcgtagaagccatcaggaccaactacaatgaccgctacgacgaaattcgtaggcactggggcggcaatgtgctcgggcccaaatctgtggcccgaatcgcaaagcttgagaaagcaaaagctaaagagctagctactaagttggggtag

SEQ ID NO: 17746 - DNA, 801 bp, Artificial Sequence
  derived and/or modified sequence
atgcccaagggcaagaaggccaagggcaagaaggtggcccccgcccccgctgtggttaaaaaacaggaggccaagaaagtggtgaacccgctgttcgagaaaagacccaaaaatttcggtattggtcaggacatacagccaaagcgggacctgacccgttttgttaaatggccacggtatatccgcctgcagaggcagcgggctattctgtacaaacgtctaaaagtgccccctgctatcaaccaatttactcaggccctggatcgccagaccgcaacgcagctgctcaagctcgctcacaagtatcggcccgagactaagcaggaaaagaaacaacggttactggcccgcgccgaaaaaaaagccgctggcaagggagacgtgcccaccaagcgcccacctgttctgcgggcgggggtaaataccgttaccacacttgtcgaaaataagaaagcgcagttggtggtgattgcgcatgacgtagaccccattgagcttgtcgtctttttgcccgcattatgcaggaagatgggggtcccgtactgtatcatcaagggaaaggcccgcctggggagattggttcacagaaaaacatgtacaactgttgcatttacccaagtgaactctgaggataagggtgctctggctaagctcgtagaggcgatcagaaccaactacaatgacagatacgatgagattcgccgacactggggtggaaatgtcctcggtcccaagtccgtggccaggatagccaagcttgagaaagcaaaggccaaagaattagctacgaagctgggatag

SEQ ID NO: 17747 - DNA, 576 bp, Artificial Sequence
  derived and/or modified sequence
atgctggtgcggctgaacgtgcggtgcagctgccggggcgtggtgctgggcggctgtcgaaagctgttggcctccctggtgcagcctaaaggcaagaaagcaaaagggaagaaggtggctcccgcacccgcggtggtgaagaagcaggaggccaagaaggtggttaatccgctcttcgagaagcggccaaaaaattttggcatcggacaggacatccagccaaaacgagatttaacgaggtttgtgaagtggcctcggtacatccgcctccaaagacaaagggcaatcctttataaaagattaaaagtgcctcccgcaatcaaccaatttacacaagctcttgacagacagaccgctactcaactgctgaagttagcgcacaaataccggcccgaaaccaagcaagaaaagaaacaaaggttactggccagggcagaaaagaaggcggctggtaaaggcgatgtcccaactaaacgtccacctgtcttaagggctggcgtcaatactgtgactactttagtcgagaacaagaaagcccagctggttgtgattgctcatgacgtggatccaatatag

SEQ ID NO: 17748 - DNA, 456 bp, Artificial Sequence
  derived and/or modified sequence
atggcacctctgtaccaggccgcaggaaaaggtgatgttcccacaaagaggccacctgtgcttcgtgcaggcgtcaatactgtgactactctggtggaaaacaaaaaagctcagctcgtggtgatcgctcacgacgttgaccccattgagcttgtggtctttttgccagcgctgtgcagaaaaatgggtgtaccctattgcataatcaaggggaaggccagattagggaggctcgttcatcgaaagacatgcacgaccgtcgcgtttacacaggtgaattcggaggacaagggcgcactagcaaaactagtagaggctattagaacgaattataatgaccgctacgatgaaatccggcgtcactggggcggtaatgtgctggggccaaaatcggtcgctcgcattgccaagttagagaaagcaaaagccaaggagttagcgacgaaattggggtag

SEQ ID NO: 17749 - DNA, 801 bp, Artificial Sequence
  derived and/or modified sequence
atgcccaagggaaaaaaggctaaagggaaaaaggtggcgccagctcccgctgttgttaagaaacaggaagcgaagaaggtggtcaaccccctgtttgaaaagcgcccaaaaaatttcggcataggtcaggacatacaacccaagcgggatttgacaagattcgtgaaatggccaaggtatattagactacagagacagcgggcaattctgtataaacgcctgaaggtcccacctgccatcaaccagtttacccaggctctagacagacagacggccactcagctgctcaaactggctcacaaataccggcctgaaactaagcaagagaagaagcaaagattgttggcccgagccgaaaaaaaggccgcaggaaaaggggatgtgcccactaagagacccccagttctccgcgctggagtcaacacagtcaccaccctggtcgagaacaaaaaagcacagctagtcgtgatcgctcatgacgtggaccctattgaactagtggtgttcctgccagctttgtgcaggaagatgggagttccttattgtatcattaaaggtaaagcccgattggggaggctggttcatcgcaagacttgcacaaccgtggcgttcacgcaggtcaactccgaagacaaaggggctctggctaagctggtggaggcaattcggactaactacaacgaccgttatgatgaaattagacggcactggggtggcaacgttctcggacctaagtctgtggctcggatcgctaagctggagaaagccaaagccaaagagctcgcgacaaagctgggttag

SEQ ID NO: 17750 - DNA, 576 bp, Artificial Sequence
  derived and/or modified sequence
atgctcgtgcgcctgaacgtgcgatgttcatgccgtggcgtggtgctgggcggatgtcggaaactactagccagccttgttcagcccaaaggcaagaaagccaagggcaagaaggtggcgcctgcccctgctgtcgtcaagaaacaggaggcaaagaaggtcgttaatccgctgttcgaaaagagaccaaagaacttcggtattggtcaagatatccagcccaaaagggatctcaccagattcgtcaagtggccgagatatattagattgcagcggcagcgggcaatcttgtacaaacgacttaaggtaccgcctgcaattaaccaattcacacaagccctagatcgtcaaacagccacccaactgttgaagctcgcgcacaaatacaggcctgagaccaaacaggaaaagaagcaacgactcttggcgcgtgccgaaaaaaaggcggctggtaaaggcgacgtgcctactaaacgccctcctgtcctgcgcgcaggggttaacaccgtgacgactctggtagagaataaaaaggcccagctagtagtgatcgcgcatgatgtggaccctatctag

SEQ ID NO: 17751 - DNA, 680 bp, Artificial Sequence
  derived and/or modified sequence
ccgaaaggaaagaaggccaagggaaagaaggtggctccggccccagctgtcgtgaagaagcaggaggctaagaaagtggtgaatcccctgtttgagaaaaggcctaagaattttggcattggacaggacatccagcccaaaagagacctcacccgctttgtgaaatggccccgctatatcaggctgctggcaaaggggacgtcccaacgaagagaccacctgtccttcgagcaggagttaacaccgtcaccaccttggtggagaacaagaaagctcagctggtggtgattgcacacgacgtggatcccatcgagctggttgtcttcttgcctgccctgtgtcgtaaaatgggggtcccttactgcattatcaagggaaaggcaagactgggacgtctagtccacaggaagacctgcaccactgtcgccttcacacaggtgaactcggaagacaaaggcgctttggctaagctggtggaagctatcaggaccaattacaatgacagatacgatgagatccgccgtcactggggtggcaatgtcctgggtcctaagtctgtggctcgtatcgccaagctcgaaaaggcaaaggctaaagaacttgccactaaactgggttaaatgtacactgttgagttttctgtacataaaaataattgaaataatacaaattttccttca

SEQ ID NO: 17752 - DNA, 891 bp, Artificial Sequence
  derived and/or modified sequence
tttcctttctctctcctcccgccgcccaagatgccgaaaggaaagaaggccaagggaaagaaggtggctccggccccagctgtcgtgaagaagcaggaggctaagaaagtggtgaatcccctgtttgagaaaaggcctaagaattttggcattggacaggacatccagcccaaaagagacctcacccgctttgtgaaatggccccgctatatcaggttgcagcggcagagagccatcctctataagcggctgaaagtgcctcctgcgattaaccagttcacccaggccctggaccgccaaacagctactcagctgcttaagctggcccacaagtacagaccagagacaaagcaagagaagaagcagagactgttggcccgggccgagaagaaggctgctggcaaaggggacgtcccaacgaagagaccacctgtccttcgagcaggagttaacaccgtcaccaccttggtggagaacaagaaagctcagctggtggtgattgcacacgacgtggatcccatcgagctggttgtcttcttgcctgccctgtgtcgtaaaatgggggtcccttactgcattatcaagggaaaggcaagactgggacgtctagtccacaggaagacctgcaccactgtcgccttcacacaggtgaactcggaagacaaaggcgctttggctaagctggtggaagctatcaggaccaattacaatgacagatacgatgagatccgccgtcactggggtggcaatgtcctgggtcctaagtctgtggctcgtatcgccaagctcgaaaaggcaaaggctaaagaacttgccactaaactgggttaaatgtacactgttgagttttctgtacataaaaataattgaaataatacaaattttccttca

SEQ ID NO: 17753 - DNA, 1057 bp, Artificial Sequence
  derived and/or modified sequence
tgagctgtagttccgtggcactatagccaggttccggctgtatccgctgccatcctcctccaggcgcggcctcggagggcctcctgctcctcctggcgctaggagagccccactcggtgtggcacggagacaccgaggtggattagagccccacttggtgtggcacggagacattgagatggactagagccccgggcggccgagagcggaatgcgttgttcccggtgtcgcagggctgggtgtcgcaggcctggagcaccgcagtgcggggctcggagccctagcgtctctcgggcttgctgggggccgctccagaggccttgtgagcgacgagttctgagcccgcccctgttgcttctagagcctgtggggccgcgactcagaggagtcatgagtccggggtgtctcctgggtgggcgacgcgaagagagcgtggtctcgggcttagccttgctctggccactcggggttcccggggctgcatgcttgtgcggctgaatgtgagatgctcctgtcgaggggtggtgctggggggttgcagaaagctgctcgccagcttagttcagccgaaaggaaagaaggccaagggaaagaaggtggctccggccccagctgtcgtgaagaagcaggaggctaagaaagtggtgaatcccctgtttgagaaaaggcctaagaattttggcattggacaggacatccagcccaaaagagacctcacccgctttgtgaaatggccccgctatatcaggttgcagcggcagagagccatcctctataagcggctgaaagtgcctcctgcgattaaccagttcacccaggccctggaccgccaaacagctactcagctgcttaagctggcccacaagtacagaccagagacaaagcaagagaagaagcagagactgttggcccgggccgagaagaaggctgctggcaaaggggacgtcccaacgaagagaccacctgtccttcgagcaggagttaacaccgtcaccaccttggtggagaacaagaaagctcagctggtggtgattgcacacgacgtggatcccatcga

SEQ ID NO: 17754 - DNA, 456 bp, Artificial Sequence
  derived and/or modified sequence
atggcccccctgtaccaggccgccggcaagggcgacgtgcccaccaagagaccccccgtgctgagagccggcgtgaacaccgtgaccaccctggtggagaacaagaaggcccagctggtggtgatcgcccacgacgtggaccccatcgagctggtggtgttcctgcccgccctgtgcagaaagatgggcgtgccctactgcatcatcaagggcaaggccagactgggcagactggtgcacagaaagacctgcaccaccgtggccttcacccaggtgaacagcgaggacaagggcgccctggccaagctggtggaggccatcagaaccaactacaacgacagatacgacgagatcagaagacactggggcggcaacgtgctgggccccaagagcgtggccagaatcgccaagctggagaaggccaaggccaaggagctggccaccaagctgggctag

SEQ ID NO: 17755 - DNA, 801 bp, Artificial Sequence
  derived and/or modified sequence
atgcccaagggcaagaaggccaagggcaagaaggtggcccccgcccccgccgtggtgaagaagcaggaggccaagaaggtggtgaaccccctgttcgagaagagacccaagaacttcggcatcggccaggacatccagcccaagagagacctgaccagattcgtgaagtggcccagatacatcagactgcagagacagagagccatcctgtacaagagactgaaggtgccccccgccatcaaccagttcacccaggccctggacagacagaccgccacccagctgctgaagctggcccacaagtacagacccgagaccaagcaggagaagaagcagagactgctggccagagccgagaagaaggccgccggcaagggcgacgtgcccaccaagagaccccccgtgctgagagccggcgtgaacaccgtgaccaccctggtggagaacaagaaggcccagctggtggtgatcgcccacgacgtggaccccatcgagctggtggtgttcctgcccgccctgtgcagaaagatgggcgtgccctactgcatcatcaagggcaaggccagactgggcagactggtgcacagaaagacctgcaccaccgtggccttcacccaggtgaacagcgaggacaagggcgccctggccaagctggtggaggccatcagaaccaactacaacgacagatacgacgagatcagaagacactggggcggcaacgtgctgggccccaagagcgtggccagaatcgccaagctggagaaggccaaggccaaggagctggccaccaagctgggctag

SEQ ID NO: 17756 - DNA, 576 bp, Artificial Sequence
  derived and/or modified sequence
atgctggtgagactgaacgtgagatgcagctgcagaggcgtggtgctgggcggctgcagaaagctgctggccagcctggtgcagcccaagggcaagaaggccaagggcaagaaggtggcccccgcccccgccgtggtgaagaagcaggaggccaagaaggtggtgaaccccctgttcgagaagagacccaagaacttcggcatcggccaggacatccagcccaagagagacctgaccagattcgtgaagtggcccagatacatcagactgcagagacagagagccatcctgtacaagagactgaaggtgccccccgccatcaaccagttcacccaggccctggacagacagaccgccacccagctgctgaagctggcccacaagtacagacccgagaccaagcaggagaagaagcagagactgctggccagagccgagaagaaggccgccggcaagggcgacgtgcccaccaagagaccccccgtgctgagagccggcgtgaacaccgtgaccaccctggtggagaacaagaaggcccagctggtggtgatcgcccacgacgtggaccccatctag

SEQ ID NO: 17757 - protein, 165 aa, Artificial Sequence [sequence omitted]

SEQ ID NO: 17758 - protein, 132 aa, Artificial Sequence
  derived and/or modified sequence
MPPKFDPNEIKVVYLRCTGGEVGATSALAPKIGPLGLIEVVPSASALIIKALKEPPRDRKKQKNIKHSGNITFDEIVNIARQMRHRSLARELSGTIKEILGTAQSVGCNVDGRHPHDIIDDINSGAVECPAS

SEQ ID NO: 17759 - DNA, 498 bp, Artificial Sequence
  derived and/or modified sequence
atgccccctaaattcgatcccaatgaaatcaaagtggtctatctgcggtgtaccgggggggaagtgggggctacatccgccctggccccaaagataggacctctagggctgagccctaagaaggttggggatgatatcgcaaaggctaccggcgattggaagggtttgaggattaccgtgaagctaaccatacagaacaggcaagcccaaatcgaagtcgttccctcagcttctgcactgatcatcaaggccctgaaggaaccaccgcgcgaccgcaagaagcaaaagaacatcaagcattcaggcaatatcacattcgatgagattgttaacatagccagacaaatgaggcatcgctccctggcacgagagctatctggtacaatcaaggagatcctcggcaccgcccagtccgtgggttgcaatgtcgacgggagacaccctcacgacataatcgacgacatcaattcaggagccgtcgaatgccccgcctcttag

SEQ ID NO: 17760 - DNA, 399 bp, Artificial Sequence
  derived and/or modified sequence
atgcccccaaagtttgaccctaatgaaataaaagttgtgtatctacggtgtaccggcggtgaagtcggagctacctccgccctcgctcccaagatagggccccttgggttgatagaagttgtgccgagcgcatcagccctgatcattaaagcacttaaagaaccacctagggatcggaaaaagcaaaagaatattaagcattctgggaacatcacattcgacgagatcgtcaacattgccagacaaatgaggcatagatctctggcaagggagctgtctgggacaatcaaggagatcctggggaccgctcaaagcgtagggtgtaacgttgatggtagacatccgcatgatattatagatgacatcaactctggggctgtggaatgccccgcatcatag

SEQ ID NO: 17761 - DNA, 498 bp, Artificial Sequence
  derived and/or modified sequence
atgccacccaagtttgaccccaatgagatcaaggtggtgtacctgcgctgcaccggcggggaggtgggcgccaccagcgccctggcccccaagattggccccctgggcctgagccccaagaaggtgggagatgacatcgccaaggccaccggggactggaagggcctgcgcatcaccgtgaagctgaccatccagaaccggcaggcccagatcgaggtggtgcccagcgccagcgccctgatcatcaaggccctgaaggagcccccccgggacaggaagaagcagaagaacatcaagcacagcggcaacatcacctttgatgaaattgtgaacatcgcccggcagatgaggcacaggagcctggcccgggagctgagcggcaccatcaaggagatcctgggcacagcccagagcgtgggctgcaatgtggatggccgccacccccatgacatcattgatgacatcaacagcggggctgtggagtgcccagccagctag

SEQ ID NO: 17762 - DNA, 399 bp, Artificial Sequence
  derived and/or modified sequence
atgccacccaagtttgaccccaatgagatcaaggtggtgtacctgcgctgcaccggcggggaggtgggcgccaccagcgccctggcccccaagattggccccctgggcctcatcgaggtggtgcccagcgccagcgccctgatcatcaaggccctgaaggagcccccccgggacaggaagaagcagaagaacatcaagcacagcggcaacatcacctttgatgagatcgtgaacatcgcccggcagatgaggcacaggagcctggcccgggagctgagcggcaccatcaaggagatcctgggcacagcccagagcgtgggctgcaatgtggatggccgccacccccatgacatcattgatgacatcaacagcggggctgtggagtgcccagccagctag

SEQ ID NO: 17763 - DNA, 498 bp, Artificial Sequence
  derived and/or modified sequence
atgccccccaagttcgaccccaacgagatcaaggtggtgtacctgagatgcacgggtggggaagtaggtgcgacatcagctctcgctcccaagattggaccccttggtctcagcccaaagaaggtcggcgacgatatcgctaaagccaccggcgactggaagggtctgcgaatcactgtgaaattaaccattcagaaccggcaagcacagatcgaggtggtaccaagtgccagcgcgttaataatcaaagctctgaaggaacccccccgggaccgcaagaaacaaaaaaatatcaagcattctggaaacatcacatttgatgagatcgtcaatatcgcgagacagatgcgccaccgatctcttgccagggagctgtccggtacaataaaagagattctaggtacagctcagtctgttgggtgtaacgtggatggtaggcaccctcacgatataatagacgacataaatagcggggctgtggagtgtccagcctcttag

SEQ ID NO: 17764 - DNA, 399 bp, Artificial Sequence
  derived and/or modified sequence
atgccccccaagttcgaccccaacgagatcaaggtggtgtacctgaggtgcaccggcggggaagtcggggcgacatcagctttggccccaaaaattggacccctcggcctgattgaggtggtccccagcgccagcgctctgattatcaaggctttgaaagagcctcctcgcgacaggaagaaacagaaaaatattaagcactccggaaatatcacatttgacgagattgtcaacatcgccagacaaatgagacaccgcagccttgcacgggaattgtctggtaccatcaaagagatcctgggcaccgcccagtcggtcggctgcaacgtcgatggccgccatccccacgatatcatcgacgacatcaattccggagctgtggagtgccccgcctcatag

SEQ ID NO: 17765 - DNA, 498 bp, Artificial Sequence
  derived and/or modified sequence
atgccacctaagttcgatcccaatgagattaaggtcgtgtatctgagatgtacggggggagaagttggagccactagtgcattagcgccaaaaattgggccactcgggctgtctcctaaaaaagtgggtgacgatattgctaaagcaactggggactggaaaggactgcgaatcactgtgaaactgactattcagaatcggcaggcccagattgaagtcgtaccatcggcaagtgccttaattatcaaggcactgaaagaaccacccagggataggaaaaagcagaaaaatattaagcacagcggaaatatcaccttcgacgagatcgttaatatagcaagacagatgaggcaccgcagcctggccagggaacttagcggcactataaaagaaattttgggtaccgcacagtccgtggggtgtaacgtggacggtcgacatccccatgacatcatagatgatattaattcaggcgcagtagaatgccccgcaagttag

SEQ ID NO: 17766 - DNA, 399 bp, Artificial Sequence
  derived and/or modified sequence
atgccacctaagttcgaccctaatgaaatcaaagtggtctatttacgctgtaccggaggcgaagtcggggcaaccagcgcactcgctccaaagattggaccactaggcctcatcgaggtcgtgccgtcggcctctgctcttattattaaagcattaaaagagcctcccagagacaggaaaaaacagaaaaatatcaaacactccgggaatattacctttgatgaaatagtgaacatcgctcgtcaaatgcgccaccgaagcctggcgagggaattaagcggcactataaaggagatccttggaacagctcagagtgtaggatgtaacgttgacggcagacacccccacgacattattgatgacattaactccggcgcagtagaatgtccagcaagttag

SEQ ID NO: 17767 - DNA, 633 bp, Artificial Sequence
  derived and/or modified sequence
ctctcggctttcggctcggaggaggccaaggtgcaacttccttcggtcgtcccgaatccgggttcatccgacaccagccgcctccaccatgccgccgaagttcgaccccaacgagatcaaagtcgtatacctgaggtgcaccggaggtgaagtcggtgccacttctgccctggcccccaagatcggccccctgggtctgtctccaaaaaaagttggtgatgacattgccaaggcaacgggtgactggaagggcctgaggattacagtgaaactgaccattcagaacagacaggcccagattgaggtggtgccttctgcctctgccctgatcatcaaagccctcaaggaaccaccaagagacagaaagaaacagaaaaacattaaacacagtgggaatatcacttttgatgagattgtcaacattgctcgacagatgcggcaccgatccttagccagagaactctctggaaccattaaagagatcctggggactgcccagtcagtgggctgtaatgttgatggccgccatcctcatgacatcatcgatgacatcaacagtggtgctgtggaatgcccagccagttaagcacaaaggaaaacatttcaataaaggatcatttgacaactggtgga

SEQ ID NO: 17768 - DNA, 499 bp, Artificial Sequence
  derived and/or modified sequence
gcaacttccttcggtcgtcccgaatccgggttcatccgacaccagccgcctccaccatgccgccgaagttcgaccccaacgagatcaaagtcgtatacctgaggtgcaccggaggtgaagtcggtgccacttctgccctggcccccaagatcggccccctgggtctgattgaggtggtgccttctgcctctgccctgatcatcaaagccctcaaggaaccaccaagagacagaaagaaacagaaaaacattaaacacagtgggaatatcacttttgatgagattgtcaacattgctcgacagatgcggcaccgatccttagccagagaactctctggaaccattaaagagatcctggggactgcccagtcagtgggctgtaatgttgatggccgccatcctcatgacatcatcgatgacatcaacagtggtgctgtggaatgcccagccagttaagcacaaaggaaaacatttcaataaaggatcatttgacaactggt

SEQ ID NO: 17769 - DNA, 498 bp, Artificial Sequence
  derived and/or modified sequence
atgccccccaagttcgaccccaacgagatcaaggtggtgtacctgagatgcaccggcggcgaggtgggcgccaccagcgccctggcccccaagatcggccccctgggcctgagccccaagaaggtgggcgacgacatcgccaaggccaccggcgactggaagggcctgagaatcaccgtgaagctgaccatccagaacagacaggcccagatcgaggtggtgcccagcgccagcgccctgatcatcaaggccctgaaggagccccccagagacagaaagaagcagaagaacatcaagcacagcggcaacatcaccttcgacgagatcgtgaacatcgccagacagatgagacacagaagcctggccagagagctgagcggcaccatcaaggagatcctgggcaccgcccagagcgtgggctgcaacgtggacggcagacacccccacgacatcatcgacgacatcaacagcggcgccgtggagtgccccgccagctag

SEQ ID NO: 17770 - DNA, 399 bp, Artificial Sequence
  derived and/or modified sequence
atgccccccaagttcgaccccaacgagatcaaggtggtgtacctgagatgcaccggcggcgaggtgggcgccaccagcgccctggcccccaagatcggccccctgggcctgatcgaggtggtgcccagcgccagcgccctgatcatcaaggccctgaaggagccccccagagacagaaagaagcagaagaacatcaagcacagcggcaacatcaccttcgacgagatcgtgaacatcgccagacagatgagacacagaagcctggccagagagctgagcggcaccatcaaggagatcctgggcaccgcccagagcgtgggctgcaacgtggacggcagacacccccacgacatcatcgacgacatcaacagcggcgccgtggagtgccccgccagctag

SEQ ID NO: 17771 - protein, 91 aa, Artificial Sequence
  derived and/or modified sequence
MAGSRRECRRGGSSGAKFRISLGLPVGAVINCADNTGAKNLYIISVKGIKGRLNRLPAAGVGDMVMATVKKGKPELRKKVHPAVVIRQRKS

SEQ ID NO: 17772 - protein, 140 aa, Artificial Sequence [sequence omitted]

SEQ ID NO: 17773 - protein, 114 aa, Artificial Sequence
  derived and/or modified sequence
MSKRGRGGSSGAKFRISLGLPVGAVINCADNTGAKNLYIISVKGIKGRLNRLPAAGVGDMVMATVKKGKPELRKKVLLCHTGWSAVTPLKLTVTLNCWTWNPPAVAFKGLQLQV

SEQ ID NO: 17774 - DNA, 276 bp, Artificial Sequence
  derived and/or modified sequence
atggccggttcccggagggagtgtaggcggggaggatcatctggggccaagttcaggatttcgttaggtctgcctgtcggtgcggttattaactgtgcggataatactggagcgaagaacctgtacataatctctgttaaaggcatcaaaggtagactcaaccgactcccggctgccggagtgggcgatatggtgatggcaaccgttaaaaagggaaaacccgagttaagaaaaaaggtacatcctgccgtggtcatcagacagagaaaaagctag

SEQ ID NO: 17775 - DNA, 423 bp, Artificial Sequence
  derived and/or modified sequence
atgtcgaaacgcggcagaggaggatcatccggggccaagttccgcattagtctcggactgccggtgggcgcggtgattaactgtgccgataataccggggcaaaaaacctgtacattatctccgtcaaaggcattaagggccgcttgaaccgccttcccgccgccggggtcggcgacatggtgatggctaccgtgaagaaaggcaaacctgagcttcggaaaaaggtccatccagccgtggtgattcgccagcggaaaagctatcggcgtaaggacggtgtttttctgtactttgaggacaatgcaggggtaatcgtcaataacaaaggagagatgaaggggtccgccattacaggcccggttgccaaggaatgcgctgatctgtggccaagaattgcttccaacgcaggctccatagcttag

SEQ ID NO: 17776 - DNA, 345 bp, Artificial Sequence
  derived and/or modified sequence
atgtctaaaagaggcagagggggaagtagcggagctaagtttcgcatatctctgggcctcccagtgggcgcagtaatcaattgtgctgataatacaggcgcaaaaaacctttatatcatttctgttaagggcatcaaaggcaggctcaatcgtctcccagccgctggggtaggggatatggtgatggccactgtgaagaaggggaagccagaacttcgcaagaaggtcctgctgtgccatacaggatggagcgctgttactcctcttaaacttacagtgacattaaattgttggacgtggaacccacctgcagtggctttcaaagggctccagctccaggtgtag

SEQ ID NO: 17777 - DNA, 423 bp, Artificial Sequence
  derived and/or modified sequence
atgtcaaagagggggcggggcggaagctccggggcaaagtttcgcatttcactgggcctgccagtgggagctgtcatcaattgcgctgataacacaggggctaaaaacctctacatcatttctgtgaaaggtatcaaaggtcgtctgaatcgcttgcctgccgctggggtgggtgatatggtcatggctaccgtgaaaaaaggcaaacccgaactgcgcaaaaaagtccacccagccgttgtgatccgccagagaaagtcttatcgacgcaaggatggcgtctttctttattttgaagataatgccggagtcatagtgaataataagggtgaaatgaagggaagcgcaatcactgggcctgtcgctaaagagtgcgccgacttgtggcctcgaattgcctcaaacgcaggaagcatcgcatag

SEQ ID NO: 17778 - DNA, 276 bp, Artificial Sequence
  derived and/or modified sequence
atggccggcagcagaagagaatgtagaagaggaggcagcagcggggccaagttccgcatcagcctgggcctgcctgtgggcgccgtcatcaactgtgccgacaacacaggagccaagaacctgtacatcatctctgtgaagggcatcaagggccgcctgaaccggctgcctgctgctggggtgggggacatggtgatggccaccgtgaagaagggcaagccagagctgaggaagaaggtgcaccctgctgtggtgatccggcagaggaagagctag

SEQ ID NO: 17779 - DNA, 423 bp, Artificial Sequence
  derived and/or modified sequence
atgagcaagaggggccggggcggcagcagcggggccaagttccgcatcagcctgggcctgcctgtgggcgccgtcatcaactgtgccgacaacacaggagccaagaacctgtacatcatctctgtgaagggcatcaagggccgcctgaaccggctgcctgctgctggggtgggggacatggtgatggccaccgtgaagaagggcaagccagagctgaggaagaaggtgcaccctgctgtggtgatccggcagaggaagagctacagaaggaaggatggagtcttcctgtactttgaagataatgctggggtgattgtgaacaacaagggggagatgaagggcagcgccatcaccggccctgtggccaaggaatgtgccgacctgtggccccgcatcgccagcaatgccggcagcatcgcctag

SEQ ID NO: 17780 - DNA, 345 bp, Artificial Sequence
  derived and/or modified sequence
atgagcaagaggggccggggcggcagcagcggggccaagttccgcatcagcctgggcctgcctgtgggcgccgtcatcaactgtgccgacaacacaggagccaagaacctgtacatcatctctgtgaagggcatcaagggccgcctgaaccggctgcctgctgctggggtgggggacatggtgatggccaccgtgaagaagggcaagccagagctgaggaagaaggtgctgctgtgccacacaggctggagcgctgtgacccccctgaagctgactgtgaccctgaactgctggacctggaaccccccagctgtggccttcaagggcctgcagctgcaggtgtag

SEQ ID NO: 17781 - DNA, 276 bp, Artificial Sequence
  derived and/or modified sequence
atggccggcagccggcgggagtgccggcggggcggcagcagcggcgccaagtttaggatctctcttgggctgccagtgggagccgtgatcaactgcgctgacaacaccggcgcgaagaacctctatataatctcggtgaaaggtattaaaggtcgcctgaacaggctcccggctgccggggtgggggacatggtgatggccaccgtgaaaaaaggtaaaccagaactcagaaaaaaagtccaccccgccgtcgtgatcagacaaaggaaaagctag

SEQ ID NO: 17782 - DNA, 423 bp, Artificial Sequence
  derived and/or modified sequence
atgagcaagcggggccggggcggcagcagcggcgccaagttccggataagcttgggactcccggtgggggccgttatcaactgcgcagataatactggcgccaagaatctgtatattattagtgttaaaggtatcaaaggaaggctgaataggctgcctgctgccggggtcggagacatggtcatggctacagtgaagaagggcaagccagagttgcgaaagaaagtccacccggcagtagtgataagacagcggaagtcctacaggcgcaaggacggggtgtttctgtatttcgaagacaatgccggggtgatcgtcaacaacaagggtgagatgaaagggagcgccatcaccggccccgtggcaaaagaatgcgccgatctgtggccccggattgcgagcaacgctggctcaatcgcctag

SEQ ID NO: 17783 - DNA, 345 bp, Artificial Sequence
  derived and/or modified sequence
atgagcaagcggggccggggcggcagcagcggcgccaagttccggattagcctgggcctgcctgtgggggccgtcattaactgcgcagacaatactggcgcgaagaatctgtacatcatcagcgtgaagggcatcaagggccggttgaataggctaccagccgccggcgtgggggacatggtaatggcaactgtgaagaaagggaagcccgagctccggaagaaggttttgttgtgccatacagggtggtcggcagtgactccactgaagctcaccgtgactttgaactgctggacttggaatcctccagcagtcgcgtttaaaggactgcagttacaggtgtag

SEQ ID NO: 17784 - DNA, 423 bp, Artificial Sequence
  derived and/or modified sequence
atgagcaagcggggccggggcggcagcagcggcgccaagttccggatcagcctgggactgcctgttggggctgtgattaactgtgcagataataccggagccaagaatttgtatatcatcagtgtgaaggggatcaaaggtaggttaaatcggctcccagcggccggggtgggcgatatggtaatggctacagtgaagaaaggcaaaccagagttacggaaaaaagtgcatcctgctgtggttatcaggcagagaaagtcataccgtcgcaaagacggcgttttcttgtactttgaagacaacgctggtgtcatcgtaaataataaaggggagatgaaaggcagtgcaattacaggacccgtcgctaaggaatgtgcggacctgtggcctcgcatcgcctcaaacgctgggtccatagcgtag

SEQ ID NO: 17785 - DNA, 276 bp, Artificial Sequence
  derived and/or modified sequence
atggccggttctaggcgcgaatgccgaaggggcggaagctccggtgccaaatttagaatttcactggggttgccggtcggcgcagtgatcaactgtgccgacaatactggggcaaaaaatctgtatatcatatcagtgaagggtatcaagggtagactgaatcggctcccagccgcaggtgttggcgatatggtaatggccaccgtaaaaaagggaaaacccgaattacgtaagaaggtgcaccccgctgtcgtcattcgtcagcgaaaaagttag

SEQ ID NO: 17786 - DNA, 423 bp, Artificial Sequence
  derived and/or modified sequence
atgtctaaaagggggaggggcggatcctccggagctaagtttcgcatatctctaggccttcctgtgggagccgtgattaattgtgctgacaacacgggagccaaaaatttgtacatcataagtgtgaaggggataaagggtagactcaaccgcctacctgccgctggagtgggtgacatggtgatggccacagtgaaaaaaggcaagccagagctcaggaagaaggtccacccagccgttgtgatccggcagcggaagtcctatcggcgtaaggatggcgtcttcttatactttgaggataatgcgggagtaattgtcaataacaagggagaaatgaagggaagcgctatcacaggcccagtagcaaaggagtgtgccgacctctggccccgtattgccagtaacgcagggtccattgcctag

SEQ ID NO: 17787 - DNA, 345 bp, Artificial Sequence
  derived and/or modified sequence
atgtccaagcgcggacgtggtggaagttccggagccaaattccggattagcctggggttacccgtgggtgcagtcataaactgtgctgacaacaccggagctaaaaacctctacattatctcagtgaagggtattaaagggagactcaatagactgcccgctgcgggagtcggggacatggttatggccacagtcaaaaaagggaagccagaactgcgaaaaaaagtgctactctgccacactggctggtcagctgttacccccctgaaacttactgtcaccctcaactgctggacctggaacccaccagccgtcgcctttaaaggcctccagctgcaggtgtag

SEQ ID NO: 17788 - DNA, 423 bp, Artificial Sequence
  derived and/or modified sequence
atgtcaaagcggggtcgagggggatcttcaggggctaagttcaggatctcacttggattaccagtgggtgcagtgatcaactgtgcggacaacacaggtgcaaagaacctgtacatcatctccgtgaagggcatcaaaggtaggctcaatcgtctccctgccgcaggagttggtgacatggttatggccacggtgaagaaaggtaagccggagttgaggaagaaggtccaccccgcagtggtcattcgacagaggaaatcgtaccgccgaaaggacggggtgttcttgtacttcgaggataatgccggtgtaattgtcaacaacaagggagagatgaaaggcagcgccatcacgggcccagttgctaaagagtgtgccgacctgtggcctaggatcgcatcaaatgcaggttcgatcgcctag

SEQ ID NO: 17789 - DNA, 392 bp, Artificial Sequence
  derived and/or modified sequence
gtggccctaggcagctggggcgctttgctctccttcaggccggagagagagagccaggccaccgcgagagcactgccagggccctcgaaagtggcagtggggtgctggagagttgagatggcaggatcccgacgtgaatgtagacgtggtgggtcctctggtgcgaaattccggatttccttgggtcttccggtaggagctgtaatcaattgtgctgacaacacaggagccaaaaacctgtatatcatctccgtgaaggggatcaagggacggctgaacagacttcccgctgctggtgtgggtgacatggtgatggccacagtcaagaaaggcaaaccagagctcagaaaaaaggtacatccagcagtggtcattcgacaacgaaagtcata

SEQ ID NO: 17790 - DNA, 625 bp, Artificial Sequence
  derived and/or modified sequence
ccggcgttcaagatgtcgaagcgaggacgtggtgggtcctctggtgcgaaattccggatttccttgggtcttccggtaggagctgtaatcaattgtgctgacaacacaggagccaaaaacctgtatatcatctccgtgaaggggatcaagggacggctgaacagacttcccgctgctggtgtgggtgacatggtgatggccacagtcaagaaaggcaaaccagagctcagaaaaaaggtacatccagcagtggtcattcgacaacgaaagtcataccgtagaaaagatggcgtgtttctttattttgaagataatgcaggagtcatagtgaacaataaaggcgagatgaaaggttctgccattacaggaccagtagcaaaggagtgtgcagacttgtggccccggattgcatccaatgctggcagcattgcatgattctccagtatatttgctggagtgcagtaacaccactgaagctcactgtaactttgaactgctggacttggaatcctcctgctgtggccttcaaagggctgcaattacaagtgtgagccactgcatcccacctcacattttattctttggagattttttttgacttggattaaaaaactttatatttaca

SEQ ID NO: 17791 - DNA, 444 bp, Artificial Sequence
  derived and/or modified sequence
ttttttcttttttccggcgttcaagatgtcgaagcgaggacgtggtgggtcctctggtgcgaaattccggatttccttgggtcttccggtaggagctgtaatcaattgtgctgacaacacaggagccaaaaacctgtatatcatctccgtgaaggggatcaagggacggctgaacagacttcccgctgctggtgtgggtgacatggtgatggccacagtcaagaaaggcaaaccagagctcagaaaaaaggtcttgctctgtcacacaggctggagtgcagtaacaccactgaagctcactgtaactttgaactgctggacttggaatcctcctgctgtggccttcaaagggctgcaattacaagtgtgagccactgcatcccacctcacattttattctttggagattttttttgacttggattaaaaaactttatatttaca

SEQ ID NO: 17792 - DNA, 2791 bp, Artificial Sequence
  derived and/or modified sequence
gtttttgctccggccacgtgaggagggtgggcggggcgttaaagttcatatcccagtgtcctttgaatcgacttccttttttcttttttccggcgttcaagatgtcgaagcgaggacgtggtgggtcctctggtgcgaaattccggatttccttgggtcttccggtaggagctgtaatcaattgtgctgacaacacaggagccaaaaacctgtatatcatctccgtgaaggggatcaagggacggctgaacagacttcccgctgctggtgtgggtgacatggtgatggccacagtcaagaaaggcaaaccagagctcagaaaaaaggtacatccagcagtggtcattcgacaacgaaagtcataccgtagaaaagatggcgtgtttctttattttgaagataatgcaggagtcatagtgaacaataaaggcgagatgaaaggttctgccattacaggaccagtagcaaaggagtgtgcagacttgtggccccggattgcatccaatgctggcagcattgcatgattctccagtatatttgtaaaaaataaaaaaaaaaactaaacccattaaaaagtatttgtttgcagtgcttgtctccctgttcacttccagggttcaagcgattctcctgcctcagcctcctaagtagctgggattacaggcacctgccgtcatgcctggctagtttttgtatttttggtggagacagggtttcaccatgtttgccaaacgactcaaactcctgatctcaagtgatctgcccacccaggcctctacagtgtttttgacataccctgaccatcacttttctgaaatggaaactctgggcattttttttttaaagcaatccttgcttttttgtgagtttgcagactttcagcatcttccaattgctgtatttacaattttggcctcaaaaagtattatttgggttttgagtcccaaaaataatagtagatactgctcaatgactggctatacatggtagcttctcctggagtgaggaaggcattcaaatggctgggcgcggtagctggcacctgtaatcccaacactttcggaggccaaggcaggcagatcatgaggtcaggagttcaagaccaggctgaccaacgtggtgaaacctcctcttttctaaaaatacaaaaattagctgggcgtggtggcgcaccgcctgtaatctcagctactgagagaatcgcttgaacctgggaggtggagtttgcagcgagtcgagattgcaccattgtactccatccagcctgggcaacggagcaagattccgttcccgcccccgccccaaaaaaaggcattgaagttaagatagactatatagttagatcctggacacacacatggattttgaggaatgatgtgagtttgtttatgtatgtacattttagcagttaacagatttggagtaaattgaatatttataaaacaacagtaattgccatgtaggtttactgtcatagtggaagatgattaagttgatggtacctacaggtattttgctatgaaaatgttttgacaaacaggatgatcgtgtaatttatgttccaagctctagtttgagaatggaagaatgtggtaaatttttgccaactgaacaggcataaagcgctgataataagggacttggccttaaggtaggaggttgttagcatttctttctaaacgtgtaagagtttatttaggtgacacccagcgttttggaaaaatgggtgtttgtttagaacaataatttggagggaagtggactaaacagggtttttagattaaggtttgtgtttatgtatctgtatctgcaaatactcagccataaatgtttctacctgtaagttgggtataatacaagctccacttggtatcaaaaaggactacccttagtgtcttccatgactagttatggaatgtaccagacctagagaggagttgttctaacctggagcttttgaaaatgtttccggtccataccctagaccaattaagtcagactgcagaataggactcagacatcagaattgtgaagctcccaggagatgtcaaggtatacccaagactgagaaccagtaccctgtctagactgaaccaggcttggttttagaagtattaaatctcgcctgggtacggtggctcacacctataatcccagcactttgggaggctgaggtgggtggatcatctgaggtcaggagagtgagaccagcctgtccaacatgttgaaaccccatctctactatacaaaattagccaggcatggtggtgcatgctgtaatcccagctacttgggaggctgaggcaggagaattgcttgaaccccggagatggaggttgcagtgagctgaggtcgcacgattgtgctccagcctgggcaaccagtgaaactctggggggaaagaaaaaaaatgtattaaatctctagttttagagagttacaccataacatccctgagtatggtcaatttcaagtcagctttagtgtgacaagcccctaggcccaccatttatgtctttatatattatggcaatatatgatccttatatattaaccactaatcgctgctgtttttgaatgttatcttttctgaggcagtcttgctctgtcacacaggctggagtgcagtaacaccactgaagctcactgtaactttgaactgctggacttggaatcctcctgctgtggccttcaaagggctgcaattacaagtgtgagccactgcatcccacctcacattttattctttggagattttttttgacttggattaaaaaactttatatttaca

SEQ ID NO: 17793 - DNA, 276 bp, Artificial Sequence
  derived and/or modified sequence
atggccggcagcagaagagagtgcagaagaggcggcagcagcggcgccaagttcagaatcagcctgggcctgcccgtgggcgccgtgatcaactgcgccgacaacaccggcgccaagaacctgtacatcatcagcgtgaagggcatcaagggcagactgaacagactgcccgccgccggcgtgggcgacatggtgatggccaccgtgaagaagggcaagcccgagctgagaaagaaggtgcaccccgccgtggtgatcagacagagaaagagctag

SEQ ID NO: 17794 - DNA, 423 bp, Artificial Sequence
  derived and/or modified sequence
atgagcaagagaggcagaggcggcagcagcggcgccaagttcagaatcagcctgggcctgcccgtgggcgccgtgatcaactgcgccgacaacaccggcgccaagaacctgtacatcatcagcgtgaagggcatcaagggcagactgaacagactgcccgccgccggcgtgggcgacatggtgatggccaccgtgaagaagggcaagcccgagctgagaaagaaggtgcaccccgccgtggtgatcagacagagaaagagctacagaagaaaggacggcgtgttcctgtacttcgaggacaacgccggcgtgatcgtgaacaacaagggcgagatgaagggcagcgccatcaccggccccgtggccaaggagtgcgccgacctgtggcccagaatcgccagcaacgccggcagcatcgcctag

SEQ ID NO: 17795 - DNA, 345 bp, Artificial Sequence
  derived and/or modified sequence
atgagcaagagaggcagaggcggcagcagcggcgccaagttcagaatcagcctgggcctgcccgtgggcgccgtgatcaactgcgccgacaacaccggcgccaagaacctgtacatcatcagcgtgaagggcatcaagggcagactgaacagactgcccgccgccggcgtgggcgacatggtgatggccaccgtgaagaagggcaagcccgagctgagaaagaaggtgctgctgtgccacaccggctggagcgccgtgacccccctgaagctgaccgtgaccctgaactgctggacctggaacccccccgccgtggccttcaagggcctgcagctgcaggtgtag

SEQ ID NO: 17796 - protein, 190 aa, Artificial Sequence
  derived and/or modified sequence
  misc_feature (1)..(1): Xaa can be any naturally occurring amino acid
XPQGVDIRHNKDRKVRRKEPKSQDIYLRLLVKLYRFLARRTNSTFNQVVLKRLFMSRTNRPPLSLSRMIRKMKLPGRENKTAVVVGTITDDVRVQEVPKLKVCALRVTSRARSRILRAGGKILTFDQLALDSPKGCGTVLLSGPRKGREVYRHFGKAPGTPHSHTKPYVRSKGRKFERARGRRASRGYKN

SEQ ID NO: 17797 - protein, 135 aa, Artificial Sequence
  derived and/or modified sequence
MGVDIRHNKDRKVRRKEPKSQDIYLRLLVKLYRFLARRTNSTFNQVVLKRLFMSRTNRPPLSLSRMIRKMKLPGRENKTAVVVGTITDDVRVQEVPKLKVSWRGLGRPIRPLLYCAVLCCAVLCCLVHPQSCHRW

SEQ ID NO: 17798 - protein, 188 aa, Artificial Sequence [sequence omitted]

SEQ ID NO: 17799 - DNA, 573 bp, Artificial Sequence
  derived and/or modified sequence
tgacctcagggggttgatatccggcacaacaaagacaggaaggtacggagaaaagagcctaagagtcaggatatttacctgcgcttgctggtgaaattatacaggttccttgccaggcggaccaattccacgtttaatcaggtggtgctgaaacgcttgttcatgtcaaggacaaacagaccccctctgtccctttctcgaatgattcgtaaaatgaagttacctggtagagaaaacaaaaccgccgtggtcgttggtactattacagatgacgtaagagtgcaggaggttccgaagttgaaggtttgcgctttaagagtcacgtctcgggcccgttccagaatcctaagggctggggggaagattctcacatttgaccagcttgcacttgactccccaaaaggatgcgggacggtcctcctttctggccctaggaagggaagagaggtgtaccgacatttcggcaaggcaccagggacaccacattctcatacgaagccctatgtgaggagtaaaggccgtaaattcgaaagagccagaggcaggagggctagcaggggctacaaaaattag

SEQ ID NO: 17800 - DNA, 408 bp, Artificial Sequence
  derived and/or modified sequence
atgggggtggacattagacataataaggacaggaaggtcaggagaaaggaacctaaaagtcaggatatataccttaggctcctggttaagttgtacaggtttctggctagaaggactaatagcactttcaaccaagtggtgctaaagcggctctttatgtcccggactaatcgaccgcccctgagcctaagcagaatgatccgcaaaatgaaacttccaggaagggagaataagaccgccgttgttgttggcactattactgatgacgtgcgtgtgcaggaagtcccgaagttaaaggtgtcatggcgcgggctggggagacccatccgccccctgttatactgtgctgtgctatgctgtgccgtgctctgctgtctagtgcatccccagagctgtcatcggtggtag

SEQ ID NO: 17801 - DNA, 567 bp, Artificial Sequence
  derived and/or modified sequence
atgggagtggacatccgacacaacaaggaccgaaaggtgagaagaaaagagccgaaaagccaggacatttacctcagacttcttgtgaagctgtaccgttttttggcgcggcggacgaatagcacattcaaccaggtagtgttgaaaagactcttcatgagcagaaccaaccgcccacctctctcactgagccgtatgatccgcaagatgaagctccctggcagggagaataagactgctgtcgttgtcggaactatcaccgatgatgttcgggtccaggaggtgcctaagctgaaggtctgcgccctgcgggtgacctcacgcgcccgatcccgcatcctgcgggcaggcgggaaaatccttacctttgatcagctggccttggactctccaaagggatgcggaacagtgctgttatcaggtccacgcaaagggcgcgaggtgtataggcactttgggaaggcccctggcacaccacactcacatactaaaccttacgtgaggagcaaaggtaggaagtttgaacgagcacggggtaggcgggcctcccgcgggtacaaaaactag

SEQ ID NO: 17802 - DNA, 573 bp, Artificial Sequence
  derived and/or modified sequence
tgaccccagggcgtggacatccgccacaacaaggacaggaaggtgcggaggaaggagcccaagagccaggacatctacctgcggctgctggtgaagctgtaccgcttcctggcccggaggaccaacagcaccttcaaccaggtggtgctgaagaggctcttcatgagcaggaccaacagaccacccctgagcctgagcaggatgatcaggaagatgaagctgcccggccgggagaacaagacagctgtggtggtgggcaccatcacagatgatgtgcgggtgcaggaggtgcccaagctgaaggtgtgtgccctgcgggtgaccagccgggcccggagccgcatcctgcgggccggcggcaagatcctgacctttgaccagctggccctggacagccccaagggctgcggcaccgtgctgctgagcggccccaggaagggccgggaggtgtaccgccactttgggaaggcccctggcaccccccacagccacaccaagccctacgtgcgcagcaagggcaggaagtttgagcgggcccggggccggcgggccagccggggctacaagaactag

SEQ ID NO: 17803 - DNA, 408 bp, Artificial Sequence
  derived and/or modified sequence
atgggcgtggacatccgccacaacaaggacaggaaggtgcggaggaaggagcccaagagccaggacatctacctgcggctgctggtgaagctgtaccgcttcctggcccggaggaccaacagcaccttcaaccaggtggtgctgaagaggctcttcatgagcaggaccaacagaccacccctgagcctgagcaggatgatcaggaagatgaagctgcccggccgggagaacaagacagctgtggtggtgggcaccatcacagatgatgtgcgggtgcaggaggtgcccaagctgaaggtgtcctggaggggcctgggccggcccatccggcccctgctgtactgtgctgtgctgtgctgtgctgtgctgtgctgcctggtgcacccccagagctgccaccgctggtag

SEQ ID NO: 17804 - DNA, 567 bp, Artificial Sequence
  derived and/or modified sequence
atgggcgtggacatccgccacaacaaggacaggaaggtgcggaggaaggagcccaagagccaggacatctacctgcggctgctggtgaagctgtaccgcttcctggcccggaggaccaacagcaccttcaaccaggtggtgctgaagaggctcttcatgagcaggaccaacagaccacccctgagcctgagcaggatgatcaggaagatgaagctgcccggccgggagaacaagacagctgtggtggtgggcaccatcacagatgatgtgcgggtgcaggaggtgcccaagctgaaggtgtgtgccctgcgggtgaccagccgggcccggagccgcatcctgcgggccggcggcaagatcctgacctttgaccagctggccctggacagccccaagggctgcggcaccgtgctgctgagcggccccaggaagggccgggaggtgtaccgccactttgggaaggcccctggcaccccccacagccacaccaagccctacgtgcgcagcaagggcaggaagtttgagcgggcccggggccggcgggccagccggggctacaagaactag

SEQ ID NO: 17805 - DNA, 573 bp, Artificial Sequence
  derived and/or modified sequence
tgaccccagggcgtggacatccggcacaacaaggaccggaaggtgaggaggaaggagcctaagtctcaggacatttacctgcgcctgctcgtaaagctctatcgcttcctggcccgccgcacgaatagcactttcaatcaggtcgtgttgaagcgtctgttcatgtctcgcactaaccgcccaccgctttctctgtcacggatgattcgcaagatgaagctgccgggccgggagaataagacggccgttgtggttggaaccatcacggacgacgtgcgcgtccaagaagtgccaaagctgaaggtctgtgcattgagagtgacaagtcgtgcaagatccagaatcctccgggctggtggaaaaatcttaacgttcgatcagctggctcttgattctccgaaagggtgcggcacggttcttctgtcaggcccccgtaaaggccgggaggtgtaccgacactttggcaaggcacccggcacaccgcattctcacacgaagccctatgttagaagcaagggccggaagttcgaacgggcaagaggcaggcgcgcttctagagggtacaaaaactag

SEQ ID NO: 17806 - DNA, 408 bp, Artificial Sequence
  derived and/or modified sequence
atgggcgtggacatccggcacaacaaggaccggaaggtgcggcggaaagaacctaagtctcaggatatttacctacgactgcttgttaagctctacagatttttggcacggcgaacgaactccacattcaatcaggtagtgctgaagcgtttatttatgtccagaacaaatagaccccccctgtcactgtcaagaatgattcgcaaaatgaaacttccagggcgggaaaataagactgctgtcgttgtcggaaccattactgacgatgtgcgcgtgcaggaggtgcctaagttgaaagtgtcatggcgaggtctgggccgtcctatcagacccctgctgtactgtgcggtgttgtgctgtgcagtcctgtgctgtctcgtgcatcctcaatcatgccaccgctggtag

SEQ ID NO: 17807 - DNA, 567 bp, Artificial Sequence
  derived and/or modified sequence
atgggcgtggacatccggcacaacaaggaccggaaggtgcggcggaaagagccaaaatcccaggacatctacttaaggttgctggtgaaattgtatagattcctggctcgaaggaccaatagcacttttaaccaggtcgtgttgaagagactctttatgtcccgaaccaaccgcccacccttgtctctgtcaaggatgattcgaaagatgaaactgcccggcagagagaataaaacggcagttgttgtaggaaccatcactgatgacgtgcgtgtgcaggaagtgccaaagctcaaagtatgcgccctgagagttacgtccagggccaggtccaggattctgcgtgctgggggtaagattctcacttttgatcagctggctctggacagccctaaaggctgtgggacagtccttttgtcaggaccccgcaaaggcagagaagtatatagacacttcggaaaagctcccggaacaccacatagccatacaaaaccctatgtaagatctaaaggtagaaaattcgagcgcgctaggggccgcagggccagcagagggtacaagaattag

SEQ ID NO: 17808 - DNA, 573 bp, Artificial Sequence
  derived and/or modified sequence
tgaccccagggagtcgatattaggcacaataaagatcgcaaagtcagaaggaaggaaccaaaatcccaggatatctacctgcgactactggtgaagctgtaccgcttcttagcacgaagaaccaacagcacctttaaccaggtggtcttgaagcgattgtttatgtctcggaccaaccgtcccccactcagtttgagccgcatgatccgaaaaatgaagctacctgggagggagaacaaaaccgctgtcgtggtgggtactataaccgatgatgttcgagtccaggaggtcccgaaattgaaagtgtgcgctctgcgagtgaccagtcgagctaggtcccggattctccgcgcagggggaaagattcttacctttgaccagctcgctctagactctccaaaaggatgcggaactgtgttactgtcaggaccccgaaagggacgcgaagtttacaggcattttggcaaagcgcctggtaccccgcacagccacacaaaaccttacgtgaggagcaagggcaggaagttcgaaagggctcgcggtcgtcgggcttctaggggatacaagaactag

SEQ ID NO: 17809 - DNA, 408 bp, Artificial Sequence
  derived and/or modified sequence
atgggtgtcgatatcagacacaataaggaccgcaaggtgcgccgaaaggagcctaaatcccaagacatctaccttcgtttactggtgaagctgtatcgctttttagctagacgcacaaattcaacgtttaaccaagttgtgctgaagagactctttatgtctaggactaacaggcccccactgtcactctcaagaatgatacgtaaaatgaaactccctggtcgggagaataagactgccgtggtggtaggcacaattaccgatgacgttagggtgcaagaggtcccgaagttgaaggtgagctggcgaggtcttggcaggcccatcaggcccctcctgtattgtgccgtgctgtgttgtgctgtgttgtgttgtttggtgcacccgcagagttgccataggtggtag

SEQ ID NO: 17810 - DNA, 567 bp, Artificial Sequence
  derived and/or modified sequence
atgggcgtggatataagacacaacaaagaccggaaggtgaggcggaaggagcctaaatcccaggatatctacttgcggttgctggtgaaactctacaggttcttggcaaggagaactaattctactttcaaccaggtggtgctgaaacggttatttatgagcaggaccaacaggcccccactctctttgtccaggatgatcagaaagatgaaactccctgggagagagaacaagacagccgtcgtggttggaactatcactgatgacgtgcgtgtgcaggaggtgcccaaactgaaggtgtgtgcgctgagagttactagtcgcgcacgcagccgcatacttcgcgcaggagggaagatcctcaccttcgatcaactcgcccttgactctccaaagggttgtggaacagtgctgctgtctggccctagaaaaggacgtgaggtgtaccggcactttgggaaagcccctgggacgccccacagtcacacgaaaccctatgtcaggtcaaaaggaaggaagttcgaacgcgcacggggtagaagagcaagccgagggtacaaaaactag

SEQ ID NO: 17811 - DNA, 573 bp, Artificial Sequence
  derived and/or modified sequence
tgaccacagggtgtcgatattcggcacaacaaggatcggaaagtaagaagaaaggaaccaaaatcccaggacatttatttgcgtctcctggtcaagctgtacagattcctggcccgcagaacaaatagtacttttaatcaagtagtgcttaagagattattcatgtccagaacaaaccgtcccccactgtcgctgtccagaatgatacgtaagatgaagttgccaggaagggagaataagactgcggtcgttgtcggtacgatcacagatgatgtccgtgtccaggaagtcccaaagctcaaggtttgtgcattgagagtcaccagccgggcccgcagcagaatcctacgggctgggggcaaaatcctaaccttcgaccagctcgcactcgactcccctaaaggctgtggaacagtcttgctgtccggcccccgcaaaggaagggaggtctacagacacttcggaaaggctcctgggaccccacattcccacactaaaccatacgtgcggtctaaaggacggaagtttgagagggcgagaggacgccgagcttcccgcggatacaagaactag

SEQ ID NO: 17812 - DNA, 573 bp, Artificial Sequence
  derived and/or modified sequence
taaccacaaggtgttgacattagacataacaaggatagaaaggttcgccgaaaagaaccaaaatcgcaggacatctatttgcgtctattagtgaaattataccgatttttggccagaagaacgaattcgaccttcaatcaggtagtgctgaagcgcttgtttatgtccagaactaatcggccccccttgtccctttcacgtatgatacgcaagatgaagctccctggcagagagaataaaaccgctgtcgtcgtaggcaccattacagatgacgtacgggtccaggaggtccccaaactgaaagtctgcgcactccgggtcacctcgcgagcaagaagtaggatcctaagggcaggcggcaagattctcaccttcgatcaattagctctggatagccctaaaggctgtggtactgtgttgttaagtggcccccgcaaaggacgcgaggtatatagacatttcggcaaggcgccgggtaccccacattcccacaccaagccttacgttcgcagtaaggggaggaaatttgagcgagctagaggcagacgtgcttcccggggctacaagaactag

SEQ ID NO: 17813 - DNA, 612 bp, Artificial Sequence
  derived and/or modified sequence
cccacagggagtggacatccgccataacaaggaccgaaaggttcggcgcaaggagcccaagagccaggatatctacctgaggctgttggtcaagttatacaggtttctggccagaagaaccaactccacattcaaccaggttgtgttgaagaggttgtttatgagtcgcaccaaccggccgcctctgtccctttcccggatgatccggaagatgaagcttcctggccgggaaaacaagacggccgtggttgtggggaccataactgatgatgtgcgggttcaggaggtacccaaactgaaggtatgtgcactgcgcgtgaccagccgggcccgcagccgcatcctcagggcagggggcaagatcctcactttcgaccagctggccctggactcccctaagggctgtggcactgtcctgctctccggtcctcgcaagggccgagaggtgtaccggcatttcggcaaggccccaggaaccccgcacagccacaccaaaccctacgtccgctccaagggccggaagttcgagcgtgccagaggccgacgggccagccgaggctacaaaaactaaccctggatcctactctcttattaaaaagatttttgctgaca

SEQ ID NO: 17814 - DNA, 441 bp, Artificial Sequence
  derived and/or modified sequence
ctttccggacctggccgagcaggaggcgccatcatgggagtggacatccgccataacaaggaccgaaaggttcggcgcaaggagcccaagagccaggatatctacctgaggctgttggtcaagttatacaggtttctggccagaagaaccaactccacattcaaccaggttgtgttgaagaggttgtttatgagtcgcaccaaccggccgcctctgtccctttcccggatgatccggaagatgaagcttcctggccgggaaaacaagacggccgtggttgtggggaccataactgatgatgtgcgggttcaggaggtacccaaactgaaggtgagctggcgggggctgggcagacccatcagacccttgctgtactgtgctgtgctgtgctgtgctgtgctgtgctgtctggtccatcctcagtcttgccaccgctggtga

SEQ ID NO: 17815 - DNA, 1004 bp, Artificial Sequence
  derived and/or modified sequence
actgggcccgccgggtcctccgggagccactgagaggccgtcggcgtcgggccagagcgtcaccgcgcgacgcatcgtgctagctacacgcatctcgctcccagatccctttcttccggaaagctatcgagaacacggcctgggtagggccagagaggcccccgacgtgctggcccttccctcttggacgttgcgcttgttcctgcgctctatgctctctgccgttatcgcccggctagtcagtcgtccaactcaccacagagaagtccggatcgtggtagagcgccgcgtcgcacccatgtgacgtcacggcggcgccactcgcttgaggctttccccgcccaccccagcccgttctctctttccggacctggccgagcaggaggcgccatcatgggagtggacatccgccataacaaggaccgaaaggttcggcgcaaggagcccaagagccaggatatctacctgaggctgttggtcaagttatacaggtttctggccagaagaaccaactccacattcaaccaggttgtgttgaagaggttgtttatgagtcgcaccaaccggccgcctctgtccctttcccggatgatccggaagatgaagcttcctggccgggaaaacaagacggccgtggttgtggggaccataactgatgatgtgcgggttcaggaggtacccaaactgaaggtatgtgcactgcgcgtgaccagccgggcccgcagccgcatcctcagggcagggggcaagatcctcactttcgaccagctggccctggactcccctaagggctgtggcactgtcctgctctccggtcctcgcaagggccgagaggtgtaccggcatttcggcaaggccccaggaaccccgcacagccacaccaaaccctacgtccgctccaagggccggaagttcgagcgtgccagaggccgacgggccagccgaggctacaaaaactaaccctggatcctactctcttattaaaaagatttttgctgacagtg

SEQ ID NO: 17816 - DNA, 573 bp, Artificial Sequence
  derived and/or modified sequence
tgaccccagggcgtggacatcagacacaacaaggacagaaaggtgagaagaaaggagcccaagagccaggacatctacctgagactgctggtgaagctgtacagattcctggccagaagaaccaacagcaccttcaaccaggtggtgctgaagagactgttcatgagcagaaccaacagaccccccctgagcctgagcagaatgatcagaaagatgaagctgcccggcagagagaacaagaccgccgtggtggtgggcaccatcaccgacgacgtgagagtgcaggaggtgcccaagctgaaggtgtgcgccctgagagtgaccagcagagccagaagcagaatcctgagagccggcggcaagatcctgaccttcgaccagctggccctggacagccccaagggctgcggcaccgtgctgctgagcggccccagaaagggcagagaggtgtacagacacttcggcaaggcccccggcaccccccacagccacaccaagccctacgtgagaagcaagggcagaaagttcgagagagccagaggcagaagagccagcagaggctacaagaactag

SEQ ID NO: 17817 - DNA, 408 bp, Artificial Sequence
  derived and/or modified sequence
atgggcgtggacatcagacacaacaaggacagaaaggtgagaagaaaggagcccaagagccaggacatctacctgagactgctggtgaagctgtacagattcctggccagaagaaccaacagcaccttcaaccaggtggtgctgaagagactgttcatgagcagaaccaacagaccccccctgagcctgagcagaatgatcagaaagatgaagctgcccggcagagagaacaagaccgccgtggtggtgggcaccatcaccgacgacgtgagagtgcaggaggtgcccaagctgaaggtgagctggagaggcctgggcagacccatcagacccctgctgtactgcgccgtgctgtgctgcgccgtgctgtgctgcctggtgcacccccagagctgccacagatggtag

SEQ ID NO: 17818 - DNA, 567 bp, Artificial Sequence
  derived and/or modified sequence
atgggcgtggacatcagacacaacaaggacagaaaggtgagaagaaaggagcccaagagccaggacatctacctgagactgctggtgaagctgtacagattcctggccagaagaaccaacagcaccttcaaccaggtggtgctgaagagactgttcatgagcagaaccaacagaccccccctgagcctgagcagaatgatcagaaagatgaagctgcccggcagagagaacaagaccgccgtggtggtgggcaccatcaccgacgacgtgagagtgcaggaggtgcccaagctgaaggtgtgcgccctgagagtgaccagcagagccagaagcagaatcctgagagccggcggcaagatcctgaccttcgaccagctggccctggacagccccaagggctgcggcaccgtgctgctgagcggccccagaaagggcagagaggtgtacagacacttcggcaaggcccccggcaccccccacagccacaccaagccctacgtgagaagcaagggcagaaagttcgagagagccagaggcagaagagccagcagaggctacaagaactag

SEQ ID NO: 17819 - protein, 196 aa, Artificial Sequence [sequence omitted]

SEQ ID NO: 17820 - DNA, 591 bp, Artificial Sequence
  derived and/or modified sequence
atgtccatgctcaggttgcaaaaacgcctggcttctagcgtgcttaggtgcggcaagaaaaaggtttggctcgatcctaacgaaacaaatgaaattgcaaacgcaaattcccgccagcagattcgcaagcttatcaaagatgggctcataattcggaagcctgtgactgtgcacagtcgcgctcgctgcaggaaaaatacactggcacgtaggaagggaaggcacatgggaataggtaagagaaagggtactgccaatgcccgaatgcctgagaaagtcacttggatgcgtagaatgcgcattctgagacggcttctgcgtagatacagggagtcaaagaaaatcgaccgccacatgtaccattctctgtatttgaaagtgaaagggaacgtttttaaaaacaaacgcatcctcatggagcatatacacaagcttaaagctgacaaagctcgaaaaaaactcttggcagaccaagctgaggctagacggtccaagacaaaggaggctcgcaaaaggagagaggagcggctgcaagctaaaaaggaagagatcataaaaaccctgagcaaggaggaggaaactaagaaatag

SEQ ID NO: 17821 - DNA, 591 bp, Artificial Sequence
  derived and/or modified sequence
atgtccatgctgcggctgcagaagaggctggccagctctgtgctgcgctgtgggaagaagaaggtgtggctggaccccaatgagaccaatgagatcgccaatgccaacagccggcagcagatcaggaagctgatcaaggatggcctcatcatcaggaagcctgtgacagtgcacagccgggcccgctgcaggaagaacaccctggcccggaggaagggccgccacatgggcatcggcaagaggaagggcacagccaatgccaggatgcctgagaaggtgacctggatgaggaggatgaggatcctgcggcggctgctgcggcgctaccgggagagcaagaagattgacagacacatgtaccacagcctgtacctgaaggtgaagggaaatgtgttcaagaacaagaggatcctgatggagcacatccacaagctgaaggctgacaaggccaggaagaagctgctggccgaccaggccgaggcccggcgcagcaagaccaaggaggccaggaagaggcgggaggagcggctgcaggccaagaaggaggagatcatcaagaccctgagcaaggaggaggagaccaagaagtag

SEQ ID NO: 17822 - DNA, 591 bp, Artificial Sequence
  derived and/or modified sequence
atgagcatgctgcggctgcagaagcggctggccagcagcgtgctgagatgcggcaaaaagaaggtgtggctggatccgaatgagactaacgagattgccaacgcgaatagccggcagcagatccgtaaactgatcaaggacggcctgattatcagaaagcccgtgaccgttcacagccgggcccgctgtcgcaaaaacacactcgcacgccgcaagggccgtcatatgggtattggaaagaggaaaggaaccgcaaatgcccgcatgccagaaaaggtgacctggatgcgcagaatgcggatacttaggcgtctcttacggaggtacagggagtcaaaaaaaattgaccggcatatgtaccactccctgtatctcaaggtgaaggggaacgtttttaaaaacaaaaggatccttatggaacatatccataagctcaaggcagacaaggcacgtaagaaactgttggccgaccaggctgaggccaggcggtcaaagactaaagaggcgcggaagaggagggaggagagactccaggcaaagaaagaggaaataatcaaaacactcagcaaggaagaggagacaaaaaaatag

SEQ ID NO: 17823 - DNA, 591 bp, Artificial Sequence
  derived and/or modified sequence
atgtcgatgctgcgcctccagaagagactcgcctcgtccgttcttcggtgtggcaagaagaaggtttggttggatcctaatgagacaaacgagattgctaacgccaacagccgccagcaaattcgtaaactcattaaggacggactgatcatccgtaagcctgtgacagtccactctagggctaggtgccgcaagaacaccctggccagacgcaaaggaagacatatggggattgggaagaggaaaggaaccgcaaacgcacgcatgccagagaaggttacctggatgagaaggatgcggatactgcggaggcttttaagaaggtatagggagtcaaaaaaaatcgaccggcacatgtaccatagcctgtatctcaaggtgaaaggtaacgtgttcaaaaataagcggatcttgatggagcatattcacaaactaaaggcagataaggctaggaagaaactgctcgccgatcaggcggaagctaggcggagcaaaactaaagaagcaaggaaaagacgcgaggagagattgcaggctaagaaggaggaaatcatcaagaccttgagcaaggaggaggagactaaaaagtag

SEQ ID NO: 17824 - DNA, 732 bp, Artificial Sequence
  derived and/or modified sequence
gcagataatgggaggagccgggcccgagcgagctctttcctttcgctgctgcggccgcagccatgagtatgctcaggcttcagaagaggctcgcctctagtgtcctccgctgtggcaagaagaaggtctggttagaccccaatgagaccaatgaaatcgccaatgccaactcccgtcagcagatccggaagctcatcaaagatgggctgatcatccgcaagcctgtgacggtccattcccgggctcgatgccggaaaaacaccttggcccgccggaagggcaggcacatgggcataggtaagcggaagggtacagccaatgcccgaatgccagagaaggtcacatggatgaggagaatgaggattttgcgccggctgctcagaagataccgtgaatctaagaagatcgatcgccacatgtatcacagcctgtacctgaaggtgaaggggaatgtgttcaaaaacaagcggattctcatggaacacatccacaagctgaaggcagacaaggcccgcaagaagctcctggctgaccaggctgaggcccgcaggtctaagaccaaggaagcacgcaagcgccgtgaagagcgcctccaggccaagaaggaggagatcatcaagactttatccaaggaggaagagaccaagaaataaaacctcccactttgtctgtacatactggcctctgtgattacatagatcagccattaaaataaaacaagccttaatctgc

SEQ ID NO: 17825 - DNA, 591 bp, Artificial Sequence
  derived and/or modified sequence
atgagcatgctgagactgcagaagagactggccagcagcgtgctgagatgcggcaagaagaaggtgtggctggaccccaacgagaccaacgagatcgccaacgccaacagcagacagcagatcagaaagctgatcaaggacggcctgatcatcagaaagcccgtgaccgtgcacagcagagccagatgcagaaagaacaccctggccagaagaaagggcagacacatgggcatcggcaagagaaagggcaccgccaacgccagaatgcccgagaaggtgacctggatgagaagaatgagaatcctgagaagactgctgagaagatacagagagagcaagaagatcgacagacacatgtaccacagcctgtacctgaaggtgaagggcaacgtgttcaagaacaagagaatcctgatggagcacatccacaagctgaaggccgacaaggccagaaagaagctgctggccgaccaggccgaggccagaagaagcaagaccaaggaggccagaaagagaagagaggagagactgcaggccaagaaggaggagatcatcaagaccctgagcaaggaggaggagaccaagaagtag

SEQ ID NO: 17826 - protein, 160 aa, Artificial Sequence [sequence omitted]

SEQ ID NO: 17827 - DNA, 483 bp, Artificial Sequence
  derived and/or modified sequence
atgacaaatacgaagggaaaacgacggggaactagatatatgtttagtcgcccttttaggaagcatggggtggtaccactggctacgtacatgaggatctataaaaagggggacattgtggacattaaaggcatggggactgtgcagaagggaatgccgcacaagtgctaccacgggaagactggaagggtttacaatgttacacaacacgctgtcggaatagtagtgaataagcaagtgaaaggcaaaattctcgctaagagaataaatgtgaggatcgaacacattaaacactctaaatctagggattccttcctgaagcgggtcaaagaaaatgatcagaaaaaaaaagaagcgaaagaaaagggcacatgggtccagctaaaacggcagccagctcccccccgggaggcccactttgtgagaaccaatggcaaggagccggaacttctcgaacccattccatacgaattcatggcatag

SEQ ID NO: 17828 - DNA, 483 bp, Artificial Sequence
  derived and/or modified sequence
atgaccaacactaagggcaagcgtcgcgggacgcgctatatgttctctcgaccattccgcaagcacggcgtggtgcctctggcgacatatatgagaatatataagaagggggatatcgtagatatcaaaggaatgggaacggtgcagaagggtatgccccataagtgttaccatggcaaaaccgggcgagtatacaatgtgactcagcacgcggtgggcatcgtcgtgaacaagcaggtcaagggtaagattttggcaaagcgaattaacgtcaggattgagcatatcaagcacagcaagtccagagatagttttctgaaaagagttaaggaaaatgaccaaaagaaaaaggaggccaaagaaaaaggcacctgggtgcaactcaaacgccagccggctcctccacgagaagcccacttcgtcagaacaaatggcaaagaacccgagttgctggagccaataccatacgaattcatggcatag

SEQ ID NO: 17829 - DNA, 483 bp, Artificial Sequence
  derived and/or modified sequence
atgacaaacacgaagggcaagagaagaggaaccagatacatgttctcaagaccctttagaaaacacggtgtggttccacttgcaacttacatgagaatctataagaagggcgatatcgtggatatcaaggggatgggcactgttcaaaaaggcatgccccataaatgttaccacggtaagacagggagagtctacaacgttactcagcacgctgttggcattgtggtgaataaacaggtgaagggaaaaattctcgcgaagcggattaatgttcgcatcgagcatatcaaacattcaaaatctagggacagcttcctaaaacgtgtgaaggagaacgatcaaaaaaaaaaagaggctaaagagaaggggacatgggtccagctaaagcggcagccagcccccccaagggaggctcatttcgtgcgtaccaatggcaaagaaccagagctactagagccgatcccctacgaattcatggcctag

SEQ ID NO: 17830 - DNA, 483 bp, Artificial Sequence
  derived and/or modified sequence
atgaccaacactaagggcaagcggagaggtaccagatatatgttctcaaggccgtttagaaagcatggggtcgttcccttagcaacctatatgaggatatataagaagggagacattgtggatatcaagggtatgggcactgtccagaaggggatgccccacaagtgttatcacggcaaaaccgggcgggtgtacaatgtcacccagcacgccgttggcattgtggttaataaacaggtcaaagggaagatcctggctaaaagaattaacgttcgtatcgaacatattaagcattccaagtctagggacagctttctcaagagagtcaaagagaacgaccagaagaagaaggaagccaaggagaaaggtacttgggttcagctgaagaggcaacccgctcctcctagagaggcccatttcgtcagaacaaatggcaaggagcctgagctcctggagccgattccttacgagtttatggcctag

SEQ ID NO: 17831 - DNA, 483 bp, Artificial Sequence
  derived and/or modified sequence
atgaccaacaccaagggcaagaggcggggcacccgctacatgttcagccggcccttcaggaagcacggcgtggtgcccctggccacctacatgaggatctacaagaagggggacatcgtggacatcaagggcatgggcaccgtgcagaagggcatgccccacaagtgctaccacggcaagacaggccgggtgtacaacgtgacccagcacgctgtgggcatcgtggtgaacaagcaggtgaagggcaagatcctggccaagaggatcaacgtgagaattgagcacatcaagcacagcaagagccgggacagcttcctgaagagggtgaaggaaaatgaccagaagaagaaggaggccaaggagaagggcacctgggtgcagctgaagaggcagcctgccccaccccgggaggcccactttgtgaggaccaacgggaaggagcctgagctgctggagcccatcccctatgagttcatggcctag

SEQ ID NO: 17832 - DNA, 483 bp, Artificial Sequence
  derived and/or modified sequence
atgaccaacaccaagggcaagcggcggggcacccggtacatgttcagtcgcccttttaggaagcacggcgtggtaccactagccacttacatgcgtatctataaaaagggggatatagtagacataaagggaatgggcacggtgcagaaagggatgcctcataaatgttaccacgggaagacaggcagagtttataatgtgactcagcacgctgtggggatcgtggtgaacaagcaggtgaagggtaagattctggcaaagaggattaatgtcagaattgaacatattaaacatagtaagtcccgcgactcctttcttaagcgtgtcaaggagaacgatcagaagaaaaaagaagccaaagaaaaggggacttgggtccaactcaagagacagcctgccccaccccgagaggcgcacttcgtgagaactaacgggaaggagcctgagctgctggaaccaattccctatgagttcatggcatag

SEQ ID NO: 17833 - DNA, 483 bp, Artificial Sequence
  derived and/or modified sequence
atgaccaacaccaagggcaagcggcggggcacccggtacatgttcagtagacccttcaggaaacacggtgtcgtgcccctcgcaacctatatgcggatctataagaaaggcgacatcgtggatatcaagggaatgggtacagtgcagaagggaatgcctcacaaatgctaccacggaaagacaggtagagtgtataacgtgacccagcatgcagtagggattgtagtgaacaaacaggtaaagggaaagatccttgctaaaaggatcaatgtgcgcattgaacacatcaagcactccaaatctcgagatagcttcctcaaaagagtcaaggaaaatgaccagaagaagaaagaggccaaggaaaaaggcacgtgggtacagctaaaaaggcaacctgctcccccgagggaggctcatttcgtaaggactaacggcaaggagcctgagctcctggaacccatcccctatgagttcatggcgtag

SEQ ID NO: 17834 - DNA, 483 bp, Artificial Sequence
  derived and/or modified sequence
atgaccaacaccaagggcaagcggcggggcacccggtacatgttcagcagaccgttcaggaagcacggggtagtgccactcgctacatacatgcgcatctacaagaagggagacattgtcgatataaaggggatgggaactgtgcaaaaaggaatgccccacaagtgttaccacggaaaaacggggcgcgtttacaacgtgactcaacacgcagtcgggatcgttgtaaacaagcaggtgaaggggaaaatcctggccaagagaataaacgtacggatcgagcatataaagcactccaagagcagagactcttttctgaaaagagttaaagagaatgaccaaaagaagaaggaggcaaaggaaaaaggcacatgggttcagttaaaacgccagcccgcacctccgagggaggctcacttcgttaggaccaacgggaaggaaccggagcttcttgaaccaatcccctatgagtttatggcgtag

SEQ ID NO: 17835 - DNA, 483 bp, Artificial Sequence
  derived and/or modified sequence
atgaccaacaccaagggcaagcggcggggcacccggtacatgttctcaagaccttttagaaagcatggcgtggtcccactggcaacctatatgcgcatctacaagaaaggtgacattgtggacattaaaggcatgggcactgtccagaagggcatgcctcacaagtgctatcacggcaagacagggcgagtgtataacgtcacacagcacgccgtcggaatcgtggtgaacaagcaggtaaaaggtaagattctggcaaagcgaattaacgttagaatcgagcacatcaagcactccaaatcccgagacagcttcctgaaacgagtcaaggaaaatgaccagaagaagaaagaagccaaggaaaagggcacatgggtgcagctcaaaagacagccagccccacccagggaagcccactttgtcaggacaaatgggaaggagccagaactccttgaacccattccctatgaattcatggcctag

SEQ ID NO: 17836 - DNA, 483 bp, Artificial Sequence
  derived and/or modified sequence
atgaccaacacaaagggaaagcgtcgtggcactagatatatgttcagtcgaccattccgcaagcatggcgtagtgcccctcgctacctacatgcggatttataagaaaggggatatcgtggatatcaaaggtatgggcacggttcagaaggggatgccccacaagtgctatcacgggaaaacagggagagtgtacaacgtaactcaacacgcggtcggaattgtggtcaacaagcaggtgaaagggaaaattctcgccaaacgcattaacgtgcggattgaacacatcaagcacagcaagagccgggattcttttctgaagagagtgaaggaaaacgaccaaaaaaagaaagaggccaaggagaagggtacttgggtgcagctcaaacggcaacccgcacctccgagagaggcacattttgtccgcacaaatgggaaggagcccgagctcctggaacctatcccctatgagttcatggcctag

SEQ ID NO: 17837 - DNA, 483 bp, Artificial Sequence
  derived and/or modified sequence
atgacgaataccaagggtaagagacgaggcactcggtacatgttttcaagaccttttcgaaagcacggggtggttccacttgccacatacatgaggatatacaagaagggagatatagtcgatatcaagggaatgggcacagtccaaaaaggcatgccgcacaaatgctaccatggaaagactggaagggtgtataatgtcacgcagcatgccgtcggaatcgtcgtgaataagcaagtcaaaggcaagattctcgctaagcgtatcaatgttagaatcgagcatatcaaacactctaagtcacgggactccttcttaaagagggttaaggaaaatgaccaaaaaaagaaagaggctaaagaaaaaggcacctgggttcaattgaaaaggcagccagcgcctccacgcgaagctcacttcgtgaggacgaacggcaaggagcccgagcttctcgagcctatcccttatgaatttatggcctag

SEQ ID NO: 17838 - DNA, 483 bp, Artificial Sequence
  derived and/or modified sequence
atgactaacaccaaggggaagcgccgagggacacgctacatgttcagccggccatttagaaaacacggggtcgtccccctagctacatacatgaggatctacaaaaagggcgacatagttgacattaaggggatgggcactgttcagaagggcatgccccataagtgttaccatggaaaaactggtcgggtgtacaatgtgactcagcacgccgtcggcattgttgttaataagcaagtgaaaggcaagatcctagccaaaaggattaatgtgcgtatcgagcacattaaacacagcaaatcccgtgactcctttctgaagagggtcaaggaaaatgaccaaaaaaagaaggaggccaaggaaaaggggacttgggtccagttgaagcgtcagcccgcacctcccagagaggctcacttcgtaaggaccaacggtaaagagccagagctgctggaacctattccatatgagtttatggcatag

SEQ ID NO: 17839 - DNA, 483 bp, Artificial Sequence
  derived and/or modified sequence
atgacaaatacgaaaggtaagcggaggggcacgcgttacatgttttcaaggccttttagaaagcacggagtcgtgcccctggccacctacatgagaatctacaaaaagggagacatcgtcgatattaagggcatgggcactgtccagaaaggcatgccgcataagtgctaccacggtaaaactgggcgagtgtacaatgtcactcagcacgccgtaggaatcgttgtcaataaacaagtcaagggaaagatactcgccaaacgtattaacgtgcgcatagagcacattaaacactccaaatcacgtgactccttcctcaaaagagtgaaggagaacgatcagaagaaaaaagaggctaaagaaaagggcacctgggtccagctgaagagacagccagcacctccgcgagaggcccactttgtgagaactaatggcaaggaaccggagcttttggagcctattccttacgaattcatggcctag

SEQ ID NO: 17840 - DNA, 616 bp, Artificial Sequence
  derived and/or modified sequence
cttccaggtagggcctacgcgtggctcccgggcgctaggtgttcgacagacttgaaccgcgaccttgtggcctcagagtaattcgccaaaatgacgaacacaaagggaaagaggagaggcacccgatatatgttctctaggccttttagaaaacatggagttgttcctttggccacatatatgcgaatctataagaaaggtgatattgtagacatcaagggaatgggtactgttcaaaaaggaatgccccacaagtgttaccatggcaaaactggaagagtctacaatgttacccagcatgctgttggcattgttgtaaacaaacaagttaagggcaagattcttgccaagagaattaatgtgcgtattgagcacattaagcactctaagagccgagatagcttcctgaaacgtgtgaaggaaaatgatcagaaaaagaaagaagccaaagagaaaggtacctgggttcaactaaagcgccagcctgctccacccagagaagcacactttgtgagaaccaatgggaaggagcctgagctgctggaacctattccctatgaattcatggcataataggtgttaaaaaaaaaaataaaggacctctgggctacaaaaa

SEQ ID NO: 17841 - DNA, 815 bp, Artificial Sequence
  derived and/or modified sequence
gacgacggcgtcctcttgatcgcccttgaaggcccctttccgggctgtctgacacgatgcaagtgtcagcttgtgttggccggttgcctttctttcgcaagaggggaaaatatcctcacagactttctgtgttctcagagacgatcttcttccctagaaagaagtcgcttacggttggcgtttccctcaggcagcgccgtgggcagcccacaggcccttgtaaggcgcgcgccgcggccccgcctctttcctttcggccggaaccgccatcttccagtaattcgccaaaatgacgaacacaaagggaaagaggagaggcacccgatatatgttctctaggccttttagaaaacatggagttgttcctttggccacatatatgcgaatctataagaaaggtgatattgtagacatcaagggaatgggtactgttcaaaaaggaatgccccacaagtgttaccatggcaaaactggaagagtctacaatgttacccagcatgctgttggcattgttgtaaacaaacaagttaagggcaagattcttgccaagagaattaatgtgcgtattgagcacattaagcactctaagagccgagatagcttcctgaaacgtgtgaaggaaaatgatcagaaaaagaaagaagccaaagagaaaggtacctgggttcaactaaagcgccagcctgctccacccagagaagcacactttgtgagaaccaatgggaaggagcctgagctgctggaacctattccctatgaattcatggcataataggtgttaaaaaaaaaaataaaggacctctgggctacaaaaa

SEQ ID NO: 17842 - DNA, 806 bp, Artificial Sequence
  derived and/or modified sequence
caggtagggcctacgcgtggctcccgggcgctaggtgttcgacagacttgaaccgcgaccttgtggcctcagaggtcgttcattgggaccgtggggagactctctaacctgtttgaggtccattggcatgggcgggttaaaccatgttctgccagacggggagcagcgtgcgccgggtcgggtctgggccgtgggctgagaaccggactgcgatgttgcggccctgcggggggacatttgcgagaaagacgagactgagtcgcttgggtaattcgccaaaatgacgaacacaaagggaaagaggagaggcacccgatatatgttctctaggccttttagaaaacatggagttgttcctttggccacatatatgcgaatctataagaaaggtgatattgtagacatcaagggaatgggtactgttcaaaaaggaatgccccacaagtgttaccatggcaaaactggaagagtctacaatgttacccagcatgctgttggcattgttgtaaacaaacaagttaagggcaagattcttgccaagagaattaatgtgcgtattgagcacattaagcactctaagagccgagatagcttcctgaaacgtgtgaaggaaaatgatcagaaaaagaaagaagccaaagagaaaggtacctgggttcaactaaagcgccagcctgctccacccagagaagcacactttgtgagaaccaatgggaaggagcctgagctgctggaacctattccctatgaattcatggcataataggtgttaaaaaaaaaaataaaggacctctgggctacaaaaa

SEQ ID NO: 17843 - DNA, 641 bp, Artificial Sequence
  derived and/or modified sequence
gcgtggctcccgggcgctaggtgttcgacagacttgaaccgcgaccttgtggcctcagaggtcgttcattgggaccgtggggagactctctaacctgtttgagtaattcgccaaaatgacgaacacaaagggaaagaggagaggcacccgatatatgttctctaggccttttagaaaacatggagttgttcctttggccacatatatgcgaatctataagaaaggtgatattgtagacatcaagggaatgggtactgttcaaaaaggaatgccccacaagtgttaccatggcaaaactggaagagtctacaatgttacccagcatgctgttggcattgttgtaaacaaacaagttaagggcaagattcttgccaagagaattaatgtgcgtattgagcacattaagcactctaagagccgagatagcttcctgaaacgtgtgaaggaaaatgatcagaaaaagaaagaagccaaagagaaaggtacctgggttcaactaaagcgccagcctgctccacccagagaagcacactttgtgagaaccaatgggaaggagcctgagctgctggaacctattccctatgaattcatggcataataggtgttaaaaaaaaaaataaaggacctctgggctacaaaaa

SEQ ID NO: 17844 - DNA, 483 bp, Artificial Sequence
  derived and/or modified sequence
atgaccaacaccaagggcaagagaagaggcaccagatacatgttcagcagacccttcagaaagcacggcgtggtgcccctggccacctacatgagaatctacaagaagggcgacatcgtggacatcaagggcatgggcaccgtgcagaagggcatgccccacaagtgctaccacggcaagaccggcagagtgtacaacgtgacccagcacgccgtgggcatcgtggtgaacaagcaggtgaagggcaagatcctggccaagagaatcaacgtgagaatcgagcacatcaagcacagcaagagcagagacagcttcctgaagagagtgaaggagaacgaccagaagaagaaggaggccaaggagaagggcacctgggtgcagctgaagagacagcccgccccccccagagaggcccacttcgtgagaaccaacggcaaggagcccgagctgctggagcccatcccctacgagttcatggcctag

SEQ ID NO: 17845 - protein, 121 aa, Artificial Sequence [sequence omitted]

SEQ ID NO: 17846 - protein, 158 aa, Artificial Sequence
  derived and/or modified sequence
  misc_feature (1)..(1): Xaa can be any naturally occurring amino acid
XLVGAPCPRASPAPPKAEAKAKALKAKKAVLKGVHSHKKKKIRTSPTFRRPKTLRLRRQPKYPRKSAPRRNKLDHYAIIKFPLTTESAMKKIEDNNTLVFIVDVKANKHQIKQAVKKLYDIDVAKVNTLIRPDGEKKAYVRLAPDYDALDVANKIGII

SEQ ID NO: 17847 - protein, 158 aa, Artificial Sequence
  derived and/or modified sequence
MSPGLVVLRWAPAPPKAEAKAKALKAKKAVLKGVHSHKKKKIRTSPTFRRPKTLRLRRQPKYPRKSAPRRNKLDHYAIIKFPLTTESAMKKIEDNNTLVFIVDVKANKHQIKQAVKKLYDIDVAKVNTLIRPDGEKKAYVRLAPDYDALDVANKIGII

SEQ ID NO: 17848 - protein, 194 aa, Artificial Sequence
  derived and/or modified sequence
MHPLVGAPCPRACKELVPSALTIFLLVHVQPGYITRPSLRSVVLRWAPAPPKAEAKAKALKAKKAVLKGVHSHKKKKIRTSPTFRRPKTLRLRRQPKYPRKSAPRRNKLDHYAIIKFPLTTESAMKKIEDNNTLVFIVDVKANKHQIKQAVKKLYDIDVAKVNTLIRPDGEKKAYVRLAPDYDALDVANKIGII

SEQ ID NO: 17849 - protein, 156 aa, Artificial Sequence [sequence omitted]

SEQ ID NO: 17850 - DNA, 366 bp, Artificial Sequence
  derived and/or modified sequence
atgagcctgaccttcagaagacccaagaccctgagactgagaagacagcccagataccccagaaagagcacccccaccagaaacaagctgggccactacgccatcatcaagttccccctggccaccgagagcgccgtgaagaagatcgaggagaacaacaccctggtgttcaccgtggacgtgaaggccaacaagcaccagatcagacaggccgtgaagaaggtgtacgacagcgacgtggccaaggtgaccaccctgatctgccccgacaaggagaagaaggcctacgtgagactggcccccgactacgacgccttcgacgtggtgaccaagctgggcagccccaagctgagccccgccggctag

SEQ ID NO: 17851 - DNA, 366 bp, Artificial Sequence
  derived and/or modified sequence
atgtccctgacgtttcgtcgcccaaaaacactgcggctgcgcaggcagcctcgctatcccagaaaatccaccccaacgcgcaacaagctagggcattatgccataatcaagttccccctcgccacagagtctgctgtaaaaaagatcgaggagaataacactcttgtctttactgtggatgtaaaagctaataaacaccagatccgacaggccgtcaagaaggtgtatgacagcgatgtcgccaaagtgactacgcttatctgtccagacaaggaaaagaaagcatacgtacggctggctcctgattacgatgcattcgacgttgtgactaaactcggctcccctaagctttcgcctgccggctag

SEQ ID NO: 17852 - DNA, 366 bp, Artificial Sequence
  derived and/or modified sequence
atgagcctgaccttccggcggcccaagaccctgcggctgcggcggcagccccgctaccccaggaagagcacccccaccaggaacaagctgggccactacgccatcatcaagttccccctggccacagagagcgctgtgaagaagattgaggagaacaacaccctggtgttcaccgtggatgtgaaggccaacaagcaccagatccggcaggccgtgaagaaggtgtatgacagtgatgtggccaaggtgaccaccctcatctgcccagacaaggagaagaaggcctacgtgcggctggccccagactatgatgcctttgatgtggtgaccaagctgggcagccccaagctgagccctgctggatag

SEQ ID NO: 17853 - DNA, 366 bp, Artificial Sequence
  derived and/or modified sequence
atgagcctgaccttccggcggcccaagaccctgcggctgcggcggcaacctcgatatccgaggaagtccactccaacaagaaacaaactgggccactacgccatcatcaagttcccgttggcaacggagagcgcagtgaaaaagatagaggagaacaacacactggtctttacagtagacgttaaagcgaataaacaccagattaggcaggccgtcaagaaagtgtatgacagcgatgttgctaaggtgaccaccctgatctgtcccgataaggagaagaaggcatacgtaaggcttgccccagactatgatgcctttgatgttgtgacaaaacttgggtcccctaagttatccccagcgggttag

SEQ ID NO: 17854 - DNA, 366 bp, Artificial Sequence
  derived and/or modified sequence
atgagcctcacttttagacgcccaaaaactctgcgactgagacggcaaccacggtacccacgcaaaagtaccccgaccagaaataagctaggccactacgccatcatcaaattcccgttggcgacagagtctgccgtcaagaagatcgaggagaataacacactggtattcaccgttgacgtgaaagctaataagcatcagatcagacaagctgtcaaaaaggtgtatgactccgacgttgccaaagtgacgaccttgatatgcccagacaaggagaagaaagcttacgtccgactcgcacccgattatgatgccttcgatgttgtgacgaaactggggtccccaaaactctcccccgcaggctag

SEQ ID NO: 17855 - DNA, 2256 bp, Artificial Sequence
  derived and/or modified sequence
aatatctcgtcatggactgtgccccgctcgagcctctccacatgcagccggaaggaaagtggagggagctgctcctttccgtagccggggtgcccaccccaaccaggctgcctctgccacccaagacagaggttctctgataataatttgtggggcttgtttccagagaccacacctgaagctgccaactccccggagggaaggtcctgattaatggccgatgaatttctccttaaggccctgaaactgcctactcagaaccaagccagtttttcctgcctgtcctgtttgggcaggcagaggaggcagctagaaacccattatgcaggggatggggaccaaaccaatgcacaactcctacgtactgatggtggtcttacgtttccctaagtttctgccgactaaactgtgcacacgttctcaggacctcctgaagctgcgtcacaggcgctgatcaaagaacacaaccaagagtttggccttttcttcagcactgggaattgtgatccaaagcttttcctgatgaggtacaaagttggagaaacaaaacgcaaactaagcaacaatgaaacagaacagagtgaatctgctgtagctcaagagaggacgtagctgcccccaccccgcatccctgggctcgggtttgccttgctgacctctgctgccacctggtgccgcacagagaaactgaggagaaaccacatcagtctccttcagcctcagcttcacatctgtgggtcaagcaaccctttcagaagctgtataatgtgggaaagctttcctctcaggaaaatgcacacatccaactttgagaagatgcccttgggggtgcttcaaggatcctagataataaccccctttcccgaacatccaagaacctaagtttttttttttttttttgagaaagtctcgctctctctcccattctggagtgcagtggcgtgatcttggctcactgcaagctccacctcccaggttcaagccattctcctgcctcagcctcccaagtagctggggctacaggcacctgccaccacacccggctaatttttttgtatttttagtagagacggggtttcaccgtgttagccagaatcgtcttgatctcctgaccttgtgatccacccgcctcggcctcccaaagtgctgggattacaggtgtgagccaccacacctggtccaagaacccaacttttagatctagagtgatgtcagcatgacattgatttcctgaggcccaggggtgaaggagctgaggacagcagaggggtgaaggaagtcagctacagacagcagcagctgatgcacaggcctcccagcgcctgaagtcacccggaattgggaagtgctcagaagcttacaaagctgcctcgagatggcaccaaaagcgaaggaagctcctgctcctcctaaagccgaagccaaagcgaaggctttaaaggccaagaaggcagtgttgaaaggtgtccgcagccacacgcaaaaaagaagatccgcatgtcactcaccttcaggcggcccaagacactgcgactccggaggcagcccagatatcctcggaagagtacccccacgagaaacaagcttggccactatgctatcatcaagtttccgctggccactgagtcggccgtgaagaagatagaagaaaacaacacgcttgtgttcactgtggatgttaaagccaacaagcaccagatcagacaggctgtgaagaaggtctatgacagtgatgtggccaaggtcaccaccctgatttgtcctgataaagagaagaaggcatatgttcgacttgctcctgattatgatgctttcgatgttgtaacaaaattgggatcacctaaactgagtccagctggctaactctaaatatatgtgtatcttttcagcataaaaaaataatgtttttcataagaatgacaacttaattagaatcaaatctataagctttaagattttatgtttctagtaagtataatattagcttatttgactagaactcaagcagaataggaatttatgcttgttttatattcaataataattttgaagatacagttgttttattacaccaaaaatactatattaatcttatttaactaagttttatccaaatcatgttaacttaagaaacatttgatcagttcctatatttctaggagtttggtgaatatttatttataaatgcttatttttttccaagccaagttagaatagagcacttttagaggatttcataaatgaattttgcaatgc

SEQ ID NO: 17856 - DNA, 477 bp, Artificial Sequence
  derived and/or modified sequence
tgactggtcggtgcgccatgcccgagggcctcccccgccccacctaaggcagaagcgaaggccaaagcactgaaagcaaaaaaggctgtgttgaagggcgtgcactcacacaagaaaaagaagataaggaccagccctactttccggcgccccaagactctgagattgaggcggcagccgaagtaccccagaaaatctgctccccggcggaacaaactggaccattacgccattattaaattcccgttgactacagaatcggccatgaagaaaattgaagataataatacacttgtgttcattgtagatgtaaaggccaataagcatcagattaagcaagctgtgaagaagttatacgatatcgatgttgctaaggtgaacacactgatcagacccgatggagaaaagaaagcatatgtgcgcctcgctcccgattatgatgctttagacgtggctaataagattggaatcatctag

SEQ ID NO: 17857 - DNA, 477 bp, Artificial Sequence
  derived and/or modified sequence
atgagcccaggactggttgtgcttcgatgggctcctgctccgcccaaggccgaggctaaagccaaggcactaaaagccaaaaaggccgttctgaagggagtgcactcccacaagaaaaaaaagattcgtacttcacctacattcagacggccaaagaccctgcgtctccgacggcagcctaagtatccgcgaaagagcgccccgagacggaataaacttgatcactacgctataatcaagtttccgttaaccactgagtctgccatgaagaagattgaggataataacactctggtgttcatcgtcgacgtgaaagctaataaacaccagatcaaacaggccgttaagaagctctatgatatcgatgttgcaaaagtgaatactctgattagaccagatggagaaaagaaggcctatgttcgcctggctccagactacgacgccttggatgtagccaacaaaatcggtatcatctag

SEQ ID NO: 17858 - DNA, 585 bp, Artificial Sequence
  derived and/or modified sequence
atgcacccccttgttggggccccctgcccacgcgcctgtaaagaactggtgccctctgcgctaaccattttcctcctcgtgcacgttcagccaggctacattacacgaccctcactgcggtcagttgtgctgcggtgggctccggcccctcccaaggctgaggctaaggccaaagctcttaaagcgaagaaggcggtcctcaagggagtccattcccacaagaagaagaaaattcgtacttctcccacttttcggcggcctaaaacactccgattgcggcggcagcctaaatatcctagaaaatctgcccccagacgcaataagctcgatcattacgctatcatcaaatttccactaacgacagaatcagctatgaagaagatcgaagataataataccttggtttttatagtcgatgtcaaagcaaacaaacatcaaatcaagcaggcagtgaagaagctgtacgatatcgacgtggccaaggtaaatacattgattaggccagatggtgagaaaaaggcttacgtgcgccttgcaccagattacgacgccttagacgtggcaaacaaaatcggcatcatttag

SEQ ID NO: 17859 - DNA, 471 bp, Artificial Sequence
  derived and/or modified sequence
atggctcccaaagcaaagaaggaagcacctgcgcccccaaaagctgaagccaaggcaaaagccttgaaagcaaagaaggcagtgcttaaaggggtgcattcccataagaaaaagaaaattagaacgagtcctaccttccgccgacctaagacactacggctaagacgacagcctaaataccctagaaagtcagcccctagaaggaacaaactagaccactatgccatcattaaattcccgctgaccactgagtctgcaatgaaaaaaatcgaagacaataacacactggtctttatcgtggacgtgaaggcaaacaaacatcagatcaagcaggctgtaaaaaaattgtacgatatcgatgttgcaaaggtgaataccctgattcggccagatggggagaaaaaggcctacgtgcgcttggcacctgactacgacgcccttgatgtcgcaaacaagattgggatcatctag

SEQ ID NO: 17860 - DNA, 477 bp, Artificial Sequence
  derived and/or modified sequence
tgactggtgggcgccccctgcccccgggccagccctgccccacccaaggccgaggccaaggccaaggccctgaaggccaagaaggctgtgctgaagggcgtgcacagccacaagaagaagaagatccgcaccagccccaccttcagaagacccaagaccctgcggctgcggcggcagcccaagtaccccaggaagagcgcccccaggaggaacaagctggaccactacgccatcatcaagttccccctgaccacagaaagtgccatgaagaagattgaggacaacaacaccctggtgttcatcgtggatgtgaaggccaacaagcaccagatcaagcaggccgtgaagaagctgtatgacattgatgtggccaaggtgaacaccctcatccggccagatggagagaagaaggcctacgtgcggctggccccagactatgatgccctggatgtggccaacaagattggcatcatctag

SEQ ID NO: 17861 - DNA, 477 bp, Artificial Sequence
  derived and/or modified sequence
atgagccctggcctggtggtgctgcgctgggccccagccccacccaaggccgaggccaaggccaaggccctgaaggccaagaaggctgtgctgaagggcgtgcacagccacaagaagaagaagatccgcaccagccccaccttcagaagacccaagaccctgcggctgcggcggcagcccaagtaccccaggaagagcgcccccaggaggaacaagctggaccactacgccatcatcaagttccccctgaccacagaaagtgccatgaagaagattgaggacaacaacaccctggtgttcatcgtggatgtgaaggccaacaagcaccagatcaagcaggccgtgaagaagctgtatgacattgatgtggccaaggtgaacaccctcatccggccagatggagagaagaaggcctacgtgcggctggccccagactatgatgccctggatgtggccaacaagattggcatcatctag

SEQ ID NO: 17862 - DNA, 585 bp, Artificial Sequence
  derived and/or modified sequence
atgcaccccctggtgggcgccccctgcccccgggcctgcaaggagctggtgcccagcgccctgaccatcttcctgctggtgcacgtgcagcccggctacatcacccggcccagcctgcggtctgtggtgctgcgctgggccccagccccacccaaggccgaggccaaggccaaggccctgaaggccaagaaggctgtgctgaagggcgtgcacagccacaagaagaagaagatccgcaccagccccaccttcagaagacccaagaccctgcggctgcggcggcagcccaagtaccccaggaagagcgcccccaggaggaacaagctggaccactacgccatcatcaagttccccctgaccacagaaagtgccatgaagaagattgaggacaacaacaccctggtgttcatcgtggatgtgaaggccaacaagcaccagatcaagcaggccgtgaagaagctgtatgacattgatgtggccaaggtgaacaccctcatccggccagatggagagaagaaggcctacgtgcggctggccccagactatgatgccctggatgtggccaacaagattggcatcatctag

SEQ ID NO: 17863 - DNA, 471 bp, Artificial Sequence
  derived and/or modified sequence
atggcccccaaggccaagaaggaggccccagccccacccaaggccgaggccaaggccaaggccctgaaggccaagaaggctgtgctgaagggcgtgcacagccacaagaagaagaagatccgcaccagccccaccttcagaagacccaagaccctgcggctgcggcggcagcccaagtaccccaggaagagcgcccccaggaggaacaagctggaccactacgccatcatcaagttccccctgaccacagaaagtgccatgaagaagattgaggacaacaacaccctggtgttcatcgtggatgtgaaggccaacaagcaccagatcaagcaggccgtgaagaagctgtatgacattgatgtggccaaggtgaacaccctcatccggccagatggagagaagaaggcctacgtgcggctggccccagactatgatgccctggatgtggccaacaagattggcatcatctag

SEQ ID NO: 17864 - DNA, 477 bp, Artificial Sequence
  derived and/or modified sequence
tgactggtgggcgccccctgcccccgggccagccccgccccccccaaagcggaggccaaggccaaagcccttaaggctaagaaagccgtgctgaagggagtgcatagtcacaaaaaaaaaaagatccggactagcccaactttccgacgccctaagaccctacggctgaggcggcagcctaagtacccacgtaaaagcgcccctcgccgaaataagctggatcactacgctatcatcaaatttccgcttaccactgaatccgcaatgaagaagatcgaggataataacacactggtgtttattgtggacgtgaaagccaacaaacatcaaataaaacaggcagtgaagaagttatacgatatcgacgtggctaaggtgaatacgctgatacgccccgatggcgagaagaaggcgtacgttagactggccccagattatgatgccctggatgtggcaaacaagatcgggatcatttag

SEQ ID NO: 17865 - DNA, 477 bp, Artificial Sequence
  derived and/or modified sequence
atgagccccggcctggtggtgctgcggtgggcccccgccccccccaaggcagaagctaaagccaaggccctgaaggccaagaaggccgttctcaaaggtgtgcactcacacaagaagaagaaaattcgcactagccctaccttcaggcgacctaagaccttgcggctgaggaggcagccaaaatacccacggaagtcggcaccacggcggaacaaattggatcattacgccattatcaaattccccctgacgactgaatcggccatgaagaagatcgaggacaacaatactctggtttttattgtggacgtaaaggcaaacaaacaccagatcaagcaagctgtaaagaagctttacgatatcgacgtggccaaagtgaacacgctgatcagaccggatggcgaaaagaaagcttatgtgcgcctggcccctgactatgacgccctggacgttgctaacaagataggtattatttag

SEQ ID NO: 17866 - DNA, 585 bp, Artificial Sequence
  derived and/or modified sequence
atgcaccccctggtgggcgccccctgcccccgggcctgcaaggagcttgttcccagcgcgctgactattttccttctggtgcatgtacagcccgggtatattacgcgcccaagcctgcgctctgtcgtcctccggtgggcccccgccccaccgaaagccgaggccaaagccaaagcactcaaagcaaagaaagcggtgctgaagggagtgcattcacataaaaaaaaaaagattcgcacatcccccacattcaggcggcccaagactctgcgcctcaggcgccagcctaagtacccacggaagagcgctcccagacgcaataagctagatcattacgccatcataaaattccctctgactaccgaatccgctatgaagaagatagaagacaacaacacccttgtgttcattgtggacgtcaaagcaaataagcaccagataaagcaggccgtcaagaaattgtatgacatcgatgtcgccaaggttaatacactgatccgaccagacggggaaaagaaggcctacgtgagactggcccctgactacgacgcactcgatgtcgccaacaaaatcggcattatttag

SEQ ID NO: 17867 - DNA, 471 bp, Artificial Sequence
  derived and/or modified sequence
atggcccccaaggccaagaaggaggcccccgccccccccaaggccgaggcaaaagctaaagcactcaaggcaaaaaaggccgtgctaaaaggcgttcactctcacaaaaaaaaaaagattaggaccagccccacattccgccgccccaagactctgcgactgaggaggcagccaaaatacccccgcaagtcagcaccaagacggaacaagctggatcactacgccatcatcaaatttccgctaactactgagtcagccatgaaaaagatcgaggacaacaacaccttagtgtttattgtggacgtcaaggctaacaagcaccagatcaagcaggccgtcaagaaactgtacgatattgatgttgccaaagtcaataccctgattcgccctgatggagagaaaaaggcctacgttcgattggcaccggattacgatgcccttgacgtggcaaataagatcgggataatctag

SEQ ID NO: 17868 - DNA, 477 bp, Artificial Sequence
  derived and/or modified sequence
tagctagtcggagctccttgtcctagagcatctcctgccccacccaaggcggaagctaaggctaaggccctgaaggctaagaaggctgtgcttaagggggtgcacagccataagaagaagaagataaggacctcaccaactttcagacggccaaagactctgagattacgaagacagcccaaatatcccaggaagagcgcacctcgacgtaacaagctcgatcactatgccatcatcaaatttccgctgaccaccgagagcgctatgaaaaagatcgaggacaacaatacattggtgttcatcgtcgacgtgaaggcgaacaaacaccagatcaagcaagcggtgaagaagctgtatgatattgatgtggccaaggtgaatacccttatcaggcctgatggggaaaaaaaggcttatgtgcgccttgcaccagactatgacgctttagacgtagcaaataagatcgggatcatctag

SEQ ID NO: 17869 - DNA, 477 bp, Artificial Sequence
  derived and/or modified sequence
atgagccctgggttggtggtgcttagatgggcgccagccccaccgaaggccgaggccaaagcaaaagcgcttaaggcaaagaaggccgtattgaagggggtccatagccataagaagaaaaagatacgtactagtccaacattcaggcgccctaagacattacggctgcgcaggcagcccaagtaccctcggaaaagcgcccctcgcagaaacaaactcgaccactacgcaatcatcaagttcccgctgaccactgaaagcgcaatgaagaaaattgaggacaacaataccttggtcttcatcgtggatgtgaaggccaacaaacaccaaatcaagcaggccgtaaagaagttgtatgacatcgacgttgctaaggtgaacacactgattcgaccagacggggaaaaaaaggcctacgtgcggcttgcgcctgactacgacgctctggacgtggcgaataagatcggcatcatttag

SEQ ID NO: 17870 - DNA, 585 bp, Artificial Sequence
  derived and/or modified sequence
atgcaccccctggttggcgctccatgtccacgcgcatgcaaagaattagtgccgagtgccctgacaatctttctactcgtgcatgtgcagcccggatatataactcgaccttcccttagaagtgtggtgctaagatgggctccagcacctcccaaggcagaggcaaaggccaaggccctgaaagcaaagaaggccgttctcaagggtgtccacagtcacaagaaaaaaaaaattagaacaagtcctacctttagaaggcccaaaaccttaaggctcagacgtcagccaaagtatccgagaaagagcgcgccacgcagaaataagctggaccattatgccatcattaagttccctctgactaccgagagcgctatgaagaagattgaggataataatacattagtcttcatcgtggatgtgaaggctaataagcaccagattaaacaggccgttaaaaaattgtatgacattgatgtcgcaaaggtaaatactttaattcgacccgatggagagaaaaaagcttatgtgcgcctggcccctgactatgacgccctcgatgtagccaacaagatcgggatcatatag

SEQ ID NO: 17871 - DNA, 471 bp, Artificial Sequence
  derived and/or modified sequence
atggcaccaaaagccaagaaggaggccccagctcctccaaaggccgaggcaaaagccaaggccctgaaagctaaaaaagctgttctgaagggcgtgcacagccacaagaagaagaaaatccgtacctccccaacattccggaggcccaaaactttacgcttacgacgccagcccaagtacccaagaaagagtgccccaagacggaataaattggatcactacgccataatcaagtttccccttaccacggaatcagccatgaagaaaatcgaggataataatacactagtctttatcgtggacgtgaaggcaaacaagcatcagatcaagcaggctgtcaaaaaattgtatgacatcgatgtcgccaaagtcaatactctgattcggccagatggagaaaagaaagcttacgttcgtctggctcccgactacgatgctttagacgtggctaacaaaattggcatcatttag

SEQ ID NO: 17872 - DNA, 587 bp, Artificial Sequence
  derived and/or modified sequence
cactggttggagctccatgtccccgggcctctcctgcccctcctaaagctgaagccaaagcgaaggctttaaaggccaagaaggcagtgttgaaaggtgtccacagccacaaaaagaagaagatccgcacgtcacccaccttccggcggccgaagacactgcgactccggagacagcccaaatatcctcggaagagcgctcccaggagaaacaagcttgaccactatgctatcatcaagtttccgctgaccactgagtctgccatgaagaagatagaagacaacaacacacttgtgttcattgtggatgttaaagccaacaagcaccagattaaacaggctgtgaagaagctgtatgacattgatgtggccaaggtcaacaccctgattcggcctgatggagagaagaaggcatatgttcgactggctcctgattacgatgctttggatgttgccaacaaaattgggatcatctaaactgagtccagctgcctaattctgaatatatatatatatatatcttttcaccatatacatgcctgtctgtcaatttctggttgggctgggaggccacacacacacactgac

SEQ ID NO: 17873 - DNA, 580 bp, Artificial Sequence
  derived and/or modified sequence
ggccagacattcggttctgggaagctacatgcatccactggttggagctccatgtccccgggcctcgtggttttgcgatgggctcctgcccctcctaaagctgaagccaaagcgaaggctttaaaggccaagaaggcagtgttgaaaggtgtccacagccacaaaaagaagaagatccgcacgtcacccaccttccggcggccgaagacactgcgactccggagacagcccaaatatcctcggaagagcgctcccaggagaaacaagcttgaccactatgctatcatcaagtttccgctgaccactgagtctgccatgaagaagatagaagacaacaacacacttgtgttcattgtggatgttaaagccaacaagcaccagattaaacaggctgtgaagaagctgtatgacattgatgtggccaaggtcaacaccctgattcggcctgatggagagaagaaggcatatgttcgactggctcctgattacgatgctttggatgttgccaacaaaattgggatcatctaaactgagtccagctgcctaattctgaatatatatatatatatatcttttcacc

SEQ ID NO: 17874 - DNA, 683 bp, Artificial Sequence
  derived and/or modified sequence
aggcatcatccgccagggagggccagacattcggttctgggaagctacatgcatccactggttggagctccatgtccccgggcctgtaaggaattagtgccctcagctttaaccattttccttctggttcatgttcaaccgggctacattacccgcccctctctccgcagcgtggttttgcgatgggctcctgcccctcctaaagctgaagccaaagcgaaggctttaaaggccaagaaggcagtgttgaaaggtgtccacagccacaaaaagaagaagatccgcacgtcacccaccttccggcggccgaagacactgcgactccggagacagcccaaatatcctcggaagagcgctcccaggagaaacaagcttgaccactatgctatcatcaagtttccgctgaccactgagtctgccatgaagaagatagaagacaacaacacacttgtgttcattgtggatgttaaagccaacaagcaccagattaaacaggctgtgaagaagctgtatgacattgatgtggccaaggtcaacaccctgattcggcctgatggagagaagaaggcatatgttcgactggctcctgattacgatgctttggatgttgccaacaaaattgggatcatctaaactgagtccagctgcctaattctgaatatatatatatatatatcttttca

SEQ ID NO: 17875 - DNA, 1562 bp, Artificial Sequence
  derived and/or modified sequence
gttcgaccgagcaaatcctgctccagcactctagaacttagctgtatctaactcccgagtcaatccaaatgtgttctttcctcttggcagcgttcctgcctcctggcatggcaatcctcttccctgagactggcagttgctcaagataggaagctcccgggaccagacccgagcgccagccggctacgccgtccgctggcctgagcaaataaacgcgtgtcttcaaaaaactacaatccccatggtggcacgcgcctgtagtcccagctactctggtggctgaggcaggagaatggcgtaaacccgggaggcggagcttacagtgagccgagatcgcgccactgcactccagcctgggcgacagagcgctcaaaaaaaaaacaaaaaacaaaaaacaaaaaactacaacccccatgaagctttagtgcctttgaggggaggagtggcgcatgtttgttcacgcacgaaaaagaaattaaacctaactaccgttcccagagggcgccgctctgcaaattacccaatcagctctaagtacaaagcatcgcgagtctttagtgctctttggcgctataagcccgtgggaacgagcattggagacccttttcacaagatggcgccgaaagcgaagaaggaagctcctgcccctcctaaagctgaagccaaagcgaaggctttaaaggccaagaaggcagtgttgaaaggtgtccacagccacaaaaagaagaagatccgcacgtcacccaccttccggcggccgaagacactgcgactccggagacagcccaaatatcctcggaagagcgctcccaggagaaacaagcttgaccactatgctatcatcaagtttccgctgaccactgagtctgccatgaagaagatagaagacaacaacacacttgtgttcattgtggatgttaaagccaacaagcaccagattaaacaggctgtgaagaagctgtatgacattgatgtggccaaggtcaacaccctgattcggcctgatggagagaagaaggcatatgttcgactggctcctgattacgatgctttggatgttgccaacaaaattgggatcatctaaactgagtccagctgcctaattctgaatatatatatatatatatcttttcaccatatacatgcctgtctgtcaatttctggttgggctgggaggccacacacacacactgacatgacagggcttgggcaagactcctgttctacttatccttttgaaatacctcaccctgccactccaccatgtatgatcattccagagatctttgtgactagagttagtgtcctaggaaaaccagaactcagaacttgcctccatggttgagtaacaagctgtacaagaaccccttttatccctggaagaggctgtgtatgaaaccaatgcccagggtttgaagggtgttagcatccatttcaggggagtgtggattggctggctctctggtagcattttgtcctcacacacccatctactatgtccaaccggtctgtctgcttccctcaccccttgcccaataaaggacaaggacttcagaggagta

SEQ ID NO: 17876 - DNA, 477 bp, Artificial Sequence
  derived and/or modified sequence
tgactggtgggcgccccctgccccagagccagccccgccccccccaaggccgaggccaaggccaaggccctgaaggccaagaaggccgtgctgaagggcgtgcacagccacaagaagaagaagatcagaaccagccccaccttcagaagacccaagaccctgagactgagaagacagcccaagtaccccagaaagagcgcccccagaagaaacaagctggaccactacgccatcatcaagttccccctgaccaccgagagcgccatgaagaagatcgaggacaacaacaccctggtgttcatcgtggacgtgaaggccaacaagcaccagatcaagcaggccgtgaagaagctgtacgacatcgacgtggccaaggtgaacaccctgatcagacccgacggcgagaagaaggcctacgtgagactggcccccgactacgacgccctggacgtggccaacaagatcggcatcatctag

SEQ ID NO: 17877 - DNA, 477 bp, Artificial Sequence
  derived and/or modified sequence
atgagccccggcctggtggtgctgagatgggcccccgccccccccaaggccgaggccaaggccaaggccctgaaggccaagaaggccgtgctgaagggcgtgcacagccacaagaagaagaagatcagaaccagccccaccttcagaagacccaagaccctgagactgagaagacagcccaagtaccccagaaagagcgcccccagaagaaacaagctggaccactacgccatcatcaagttccccctgaccaccgagagcgccatgaagaagatcgaggacaacaacaccctggtgttcatcgtggacgtgaaggccaacaagcaccagatcaagcaggccgtgaagaagctgtacgacatcgacgtggccaaggtgaacaccctgatcagacccgacggcgagaagaaggcctacgtgagactggcccccgactacgacgccctggacgtggccaacaagatcggcatcatctag

SEQ ID NO: 17878 - DNA, 585 bp, Artificial Sequence
  derived and/or modified sequence
atgcaccccctggtgggcgccccctgccccagagcctgcaaggagctggtgcccagcgccctgaccatcttcctgctggtgcacgtgcagcccggctacatcaccagacccagcctgagaagcgtggtgctgagatgggcccccgccccccccaaggccgaggccaaggccaaggccctgaaggccaagaaggccgtgctgaagggcgtgcacagccacaagaagaagaagatcagaaccagccccaccttcagaagacccaagaccctgagactgagaagacagcccaagtaccccagaaagagcgcccccagaagaaacaagctggaccactacgccatcatcaagttccccctgaccaccgagagcgccatgaagaagatcgaggacaacaacaccctggtgttcatcgtggacgtgaaggccaacaagcaccagatcaagcaggccgtgaagaagctgtacgacatcgacgtggccaaggtgaacaccctgatcagacccgacggcgagaagaaggcctacgtgagactggcccccgactacgacgccctggacgtggccaacaagatcggcatcatctag

SEQ ID NO: 17879 - DNA, 471 bp, Artificial Sequence
  derived and/or modified sequence
atggcccccaaggccaagaaggaggcccccgccccccccaaggccgaggccaaggccaaggccctgaaggccaagaaggccgtgctgaagggcgtgcacagccacaagaagaagaagatcagaaccagccccaccttcagaagacccaagaccctgagactgagaagacagcccaagtaccccagaaagagcgcccccagaagaaacaagctggaccactacgccatcatcaagttccccctgaccaccgagagcgccatgaagaagatcgaggacaacaacaccctggtgttcatcgtggacgtgaaggccaacaagcaccagatcaagcaggccgtgaagaagctgtacgacatcgacgtggccaaggtgaacaccctgatcagacccgacggcgagaagaaggcctacgtgagactggcccccgactacgacgccctggacgtggccaacaagatcggcatcatctag

SEQ ID NO: 17880 - protein, 157 aa, Artificial Sequence [sequence omitted]

SEQ ID NO: 17881 - protein, 150 aa, Artificial Sequence
  derived and/or modified sequence
MKVELCSFSGYKIYPGHGRRYARTDGKVFQFLNAKCESAFLSKRNPRQINWTVLYRRKHKKGQSEEIQKKRTRRAVKFQRAITGASLADIMAKRNQKPEVRKAQREQAIRAAKEAKKAKQASKKTAMAAAKVIMGFLYFLEQYNRKIFFF

SEQ ID NO: 17882 - DNA, 474 bp, Artificial Sequence
  derived and/or modified sequence
atgaaagttgagttgtgctcctttagcggctacaagatttaccctgggcatggaagacgttacgcccgcaccgacgggaaagtctttcagttccttaacgccaagtgtgaatcagccttcttgagtaaacgaaaccctaggcagatcaactggacggtgctctaccgacggaaacacaagaagggacagagtgaagagatccagaagaagcgcacgcggagggccgtcaaatttcagcgagcaattaccggggcctctctggcagatatcatggctaaacgtaatcagaaaccagaagtccgcaaagcgcagcgggaacaggcgatcagggccgccaaggaagccaagaaagctaagcaagcctccaaaaagaccgccatggccgcagccaaggctcccaccaaggcagccccaaaacagaagatcgtcaagccagtgaaagtgtccgccccaagggttggcgggaagcgctag

SEQ ID NO: 17883 - DNA, 453 bp, Artificial Sequence
  derived and/or modified sequence
atgaaagtcgagctatgctcattctccgggtacaaaatctacccgggccacgggagaagatacgcacgaaccgacggcaaggtgttccaatttctcaatgcaaagtgcgaaagcgccttcctttctaagcgcaatccaagacagataaactggaccgtgctgtatcggagaaaacacaagaaagggcagtcggaggaaattcaaaaaaaaaggactcgccgcgccgtaaagtttcaacgtgccatcactggcgctagcctggccgatatcatggccaaacgaaaccagaagcccgaggtgcgcaaagcgcaacgcgagcaggctataagagctgcaaaggaagcgaaaaaggccaagcaggcctcgaagaaaaccgcaatggccgctgccaaggtcatcatgggctttctttattttttagagcagtacaataggaagatatttttcttttag

SEQ ID NO: 17884 - DNA, 474 bp, Artificial Sequence
  derived and/or modified sequence
atgaaggtggagctgtgcagcttcagcggctacaagatctacccaggccatggaagaagatatgccaggacagatggcaaggtgttccagttcctgaatgccaagtgtgagagcgccttcctgagcaagaggaacccccggcagatcaactggacagtgctgtacagaaggaagcacaagaagggccagagcgaggagatccagaagaagaggaccaggagagctgtgaagttccagagggccatcactggagccagcctggccgacatcatggccaagaggaaccagaagccagaggtgaggaaggcccagcgggagcaggccatccgggccgccaaggaggccaagaaggccaagcaggccagcaagaagacagccatggctgctgccaaggcccccaccaaggccgcccccaagcagaagatcgtgaagcctgtgaaggtgtctgccccccgggtgggcggcaagaggtag

SEQ ID NO: 17885 - DNA, 453 bp, Artificial Sequence
  derived and/or modified sequence
atgaaggtggagctgtgcagcttcagcggctacaagatctacccaggccatggaagaagatatgccaggacagatggcaaggtgttccagttcctgaatgccaagtgtgagagcgccttcctgagcaagaggaacccccggcagatcaactggacagtgctgtacagaaggaagcacaagaagggccagagcgaggagatccagaagaagaggaccaggagagctgtgaagttccagagggccatcactggagccagcctggccgacatcatggccaagaggaaccagaagccagaggtgaggaaggcccagcgggagcaggccatccgggccgccaaggaggccaagaaggccaagcaggccagcaagaagacagccatggctgctgccaaggtgatcatgggcttcctgtacttcctggagcagtacaacaggaagatcttcttcttctag

SEQ ID NO: 17886 - DNA, 474 bp, Artificial Sequence
  derived and/or modified sequence
atgaaggtggagctgtgcagcttcagcggctacaagatctaccccggccacggacgccgttacgcccgcactgacgggaaagtgttccagttcctgaacgccaagtgcgagtccgcgttcctttcgaagcgcaatccgagacaaatcaattggacggtactgtatagacgaaaacacaaaaaggggcagagcgaagaaatccagaagaagaggactcgccgcgcagttaagtttcagagagccatcactggcgcttccttggccgatatcatggccaaaaggaatcagaaaccagaagtgaggaaggcacaaagagagcaggctataagagctgctaaggaggctaagaaagccaagcaggcaagcaagaagaccgctatggcggcggcgaaggctcctactaaggccgctcccaagcagaaaatcgttaaacccgtcaaggtctcagcacctcgcgttggcgggaagaggtag

SEQ ID NO: 17887 - DNA, 453 bp, Artificial Sequence
  derived and/or modified sequence
atgaaggtggagctgtgcagcttcagcggctacaagatctaccccggtcacggtcggcgctacgctcggacagacgggaaggtcttccagttcctcaatgccaagtgcgaaagcgcgttcctgtccaagcggaacccccggcagatcaattggaccgtgctctaccgaaggaaacacaaaaaggggcagagcgaagagatccaaaagaagcggacacgcagggcagttaagtttcaaagagctatcacgggagcctctctcgcagacattatggccaagcgaaatcagaagcctgaggtgaggaaagcccagagggaacaggcaatccgggctgccaaggaggccaaaaaagctaagcaagcgtctaagaaaaccgcaatggcggcggccaaagtaataatgggtttcctgtacttcctcgaacagtataatagaaaaatcttttttttttag

SEQ ID NO: 17888 - DNA, 474 bp, Artificial Sequence
  derived and/or modified sequence
atgaaggtcgaactatgctcattttctggctacaaaatttaccccggacatgggagacgatatgctagaaccgatggcaaagtgtttcaatttcttaatgctaaatgtgagtccgcattcttgtccaagagaaatcccagacaaatcaactggacggtactctatcggcgtaagcacaagaaaggacagtctgaagagattcagaagaagcggacgagaagagccgttaagttccagcgtgctattacaggagcgagcctagcggatataatggccaagcggaaccagaaacccgaggtgcggaaggcacagagagagcaagcaatcagggccgctaaggaagccaagaaggccaaacaagccagcaagaagacggctatggcggctgccaaagctccaaccaaagcagcgccaaagcagaagatcgtcaaacccgtgaaggtaagtgcccctcgagttggaggcaagcggtag

SEQ ID NO: 17889 - DNA, 453 bp, Artificial Sequence
  derived and/or modified sequence
atgaaggtggaactgtgttcgttttccggatataagatttatcccggacatgggagacgctatgcccgaaccgacgggaaagtgtttcagttcttgaacgctaagtgcgagtccgcattcctaagtaaacggaacccaagacaaattaattggaccgtactgtacaggaggaagcacaaaaagggccaatcagaggaaatacagaaaaaacgtaccaggcgggcagtgaaatttcagagagccatcaccggggctagcctcgcggacattatggctaaacgcaaccaaaaacccgaggtgagaaaagcccagcgcgaacaagccatcagagctgcaaaggaggcaaaaaaagcaaaacaggcttcaaaaaagactgcaatggctgcggctaaagtaatcatgggctttctgtatttcctggaacagtacaacaggaaaatctttttcttctag

SEQ ID NO: 17890 - DNA, 623 bp, Artificial Sequence
  derived and/or modified sequence
ggggaggagatttccggcccccatccccgcagcgaccttataaggtctcttcccatgattctctctttcttttcgccatcttttgtctttccgtggagctgtcgccatgaaggtcgagctgtgcagttttagcgggtacaagatctaccccggacacgggaggcgctacgccaggaccgacgggaaggttttccagtttcttaatgcgaaatgcgagtcggctttcctttccaagaggaatcctcggcagataaactggactgtcctctacagaaggaagcacaaaaagggacagtcggaagaaattcaaaagaaaagaacccgccgagcagtcaaattccagagggccattactggtgcatctcttgctgatataatggccaagaggaatcagaaacctgaagttagaaaggctcaacgagaacaagctatcagggctgctaaggaagcaaaaaaggctaagcaagcatctaaaaagactgcaatggctgctgctaaggcacctacaaaggcagcacctaagcaaaagattgtgaagcctgtgaaagtttcagctccccgagttggtggaaaacgctaaactggcagattagatttttaaataaagattggattataactct

SEQ ID NO: 17891 - DNA, 799 bp, Artificial Sequence
  derived and/or modified sequence
tttccgtggagctgtcgccatgaaggtcgagctgtgcagttttagcgggtacaagatctaccccggacacgggaggcgctacgccaggaccgacgggaaggttttccagtttcttaatgcgaaatgcgagtcggctttcctttccaagaggaatcctcggcagataaactggactgtcctctacagaaggaagcacaaaaagggacagtcggaagaaattcaaaagaaaagaacccgccgagcagtcaaattccagagggccattactggtgcatctcttgctgatataatggccaagaggaatcagaaacctgaagttagaaaggctcaacgagaacaagctatcagggctgctaaggaagcaaaaaaggctaagcaagcatctaaaaagactgcaatggctgctgctaaggtaattatggggtttctttactttcttgaacaatacaacaggaaaattttctttttttgagacggagtcttgctctgttgcccaggatggggtgcagtggcgtgatctgatctcagctcactgcaacctctgcctcccgggttcaagtgatactcctgcctcagcctcccgagtagctgggagtacaggtgcgcgccatcacgcccggctgattttttgtttgtttgtttgtttgtttaagtagagacagggtttcaccatgtcggacaggctggtcttgaactcttgacctcaggtgatctgcccacctcagcctcccaaagtgctggggttacaagtgtgagccactgagcccggctggaaaatttattttcagtctaaattgtg

SEQ ID NO: 17892 - DNA, 474 bp, Artificial Sequence
  derived and/or modified sequence
atgaaggtggagctgtgcagcttcagcggctacaagatctaccccggccacggcagaagatacgccagaaccgacggcaaggtgttccagttcctgaacgccaagtgcgagagcgccttcctgagcaagagaaaccccagacagatcaactggaccgtgctgtacagaagaaagcacaagaagggccagagcgaggagatccagaagaagagaaccagaagagccgtgaagttccagagagccatcaccggcgccagcctggccgacatcatggccaagagaaaccagaagcccgaggtgagaaaggcccagagagagcaggccatcagagccgccaaggaggccaagaaggccaagcaggccagcaagaagaccgccatggccgccgccaaggcccccaccaaggccgcccccaagcagaagatcgtgaagcccgtgaaggtgagcgcccccagagtgggcggcaagagatag

SEQ ID NO: 17893 - DNA, 453 bp, Artificial Sequence
  derived and/or modified sequence
atgaaggtggagctgtgcagcttcagcggctacaagatctaccccggccacggcagaagatacgccagaaccgacggcaaggtgttccagttcctgaacgccaagtgcgagagcgccttcctgagcaagagaaaccccagacagatcaactggaccgtgctgtacagaagaaagcacaagaagggccagagcgaggagatccagaagaagagaaccagaagagccgtgaagttccagagagccatcaccggcgccagcctggccgacatcatggccaagagaaaccagaagcccgaggtgagaaaggcccagagagagcaggccatcagagccgccaaggaggccaagaaggccaagcaggccagcaagaagaccgccatggccgccgccaaggtgatcatgggcttcctgtacttcctggagcagtacaacagaaagatcttcttcttctag

SEQ ID NO: 17894 - protein, 115 aa, Artificial Sequence [sequence omitted]

SEQ ID NO: 17895 - protein, 114 aa, Artificial Sequence
  derived and/or modified sequence
MVAAKKTKKSLESINSRLQLVMKSGKYVLGYKQTLKMIRQGKAKLVILANNCPALRKSEIEYYAMLAKTGVHHYSGNNIELGTACGKYYRVCTLAIIDPGDSDIIRSMPEQTGE

SEQ ID NO: 17896 - DNA, 348 bp, Artificial Sequence
  derived and/or modified sequence
atggttgctgccaagaaaacaaaaaagtcattggagtccattaactcgcggctccagctcgtgatgaaaagtggaaagtacgtgctgggatacaagcagactttaaaaatgattcgacaaggcaaggcaaaattagtgattctcgcaaataactgtcccgctctgcggaagtcagagattgagtactacgccatgcttgctaaaaccggggtgcatcactattccggaaataacattgagttgggcaccgcatgtggaaaatattacagagtgtgcacgctggccatcatcgatcccggagattccgacatcatcagaagtatgccggagcaaactggagaaaagtag

SEQ ID NO: 17897 - DNA, 348 bp, Artificial Sequence
  derived and/or modified sequence
atggtggccgccaaaaagacgaaaaagtccctggagtccattaatagcaggctccagctggtgatgaaatcagggaagtacgttctgggctacaaacagacgttaaaaatgatccgccagggcaaagctaagctggtaattctggccaacaattgtcctgccctcagaaaaagcgaaatcgagtattatgcaatgttagctaagaccggcgtacatcactacagcggtaataacatagaactcggaaccgcctgcggaaagtattatcgagtctgtactctggcaattattgatccaggcgacagtgatatcatccgctccatgcccgaacagaccggcgaaaagtag

SEQ ID NO: 17898 - DNA, 345 bp, Artificial Sequence
  derived and/or modified sequence
atggtggctgcaaaaaaaacaaaaaagtctttagagagtatcaactctcgcctccaattggtgatgaagagcggtaagtacgtactggggtataagcaaaccctcaagatgattcggcagggaaaagcaaaactggtgattctggctaacaactgccctgctctgagaaaaagcgagatagaatattatgcaatgctggccaaaacgggcgtccaccattactcaggtaacaacatcgagctcggtacagcttgtggcaagtactaccgagtgtgcactcttgcgatcatcgaccccggggattctgacattatcagaagtatgcctgagcaaacgggtgaatag

SEQ ID NO: 17899 - DNA, 348 bp, Artificial Sequence
  derived and/or modified sequence
atggtggccgccaagaagaccaagaagagcctggagagcatcaacagccggctgcagctggtgatgaagagcggcaagtatgtgctgggctacaagcagaccctgaagatgatccggcagggcaaggccaagctggtgatcctggccaacaactgcccagccctgaggaagtcagaaattgagtactatgccatgctggccaagacaggagtgcaccactacagcggcaacaacatcgagctgggcacagcctgtgggaagtactacagagtgtgcaccctggccatcattgatcctggggacagcgacatcatccgctccatgcctgagcagacaggagagaagtag

SEQ ID NO: 17900 - DNA, 345 bp, Artificial Sequence
  derived and/or modified sequence
atggtggccgccaagaagaccaagaagagcctggagagcatcaacagccggctgcagctggtgatgaagagcggcaagtatgtgctgggctacaagcagaccctgaagatgatccggcagggcaaggccaagctggtgatcctggccaacaactgcccagccctgaggaagtcagaaattgagtactatgccatgctggccaagacaggagtgcaccactacagcggcaacaacatcgagctgggcacagcctgtgggaagtactacagagtgtgcaccctggccatcattgatcctggggacagcgacatcatccgctccatgcctgagcagacaggagagtag

SEQ ID NO: 17901 - DNA, 348 bp, Artificial Sequence
  derived and/or modified sequence
atggtggccgccaagaagaccaagaagagcctggagagcatcaactctcggttacagctggtcatgaagtcagggaaatacgtgctcggatataaacaaacccttaagatgatacgacagggaaaagccaagctcgtgattctggccaacaattgccccgccctcagaaagagcgagatagagtactacgcgatgctggccaagaccggggtgcaccattatagcggcaacaatatcgagctaggcaccgcctgtggcaaatactaccgcgtttgcaccctggccataattgatccaggggactccgacattatacgctccatgccggagcagacaggggaaaagtag

SEQ ID NO: 17902 - DNA, 348 bp, Artificial Sequence
  derived and/or modified sequence
atggtggccgccaagaagaccaagaagagcctggagagcatcaacagtaggctgcagctggtgatgaagagcggtaaatacgtgctaggctataaacagaccttgaagatgatccgacagggcaaagccaagctggtcatcctggctaacaattgccccgccctgagaaagtccgaaatcgagtactatgccatgctggctaaaactggagtgcaccactattcaggtaacaatatcgagctggggacagcctgcggaaagtactatcgcgtgtgtacattggccatcatcgatcccggcgacagcgacataattcgctctatgccggaacagactggcgagaaatag

SEQ ID NO: 17903 - DNA, 345 bp, Artificial Sequence
  derived and/or modified sequence
atggtggccgccaagaagaccaagaagagcctggagagcatcaacagccgactgcagctggtcatgaagtccgggaaatatgtcctgggttacaaacaaacacttaagatgatccggcagggcaaagccaagctcgtgatcctagccaataactgtcctgcccttcggaagagtgagattgagtactatgctatgctcgctaagacaggagtgcaccactattctggtaacaatattgaattagggacggcttgcggtaaatactatagggtgtgtacactggccatcattgatcctggtgactctgacattatcaggtctatgcccgaacagacaggggaatag

SEQ ID NO: 17904 - DNA, 348 bp, Artificial Sequence
  derived and/or modified sequence
atggtcgccgcaaagaagacaaagaagtccctcgagagcatcaatagtagactacaactggtcatgaaatccggcaaatacgtgctggggtacaagcagacgctcaagatgattcggcagggcaaagccaaacttgtcatacttgccaacaactgtccagcccttaggaaatctgagatcgagtactacgctatgctcgcgaagacaggcgtgcatcactactccggcaacaatatagaactgggcacggcttgcggcaaatactatcgtgtttgtacactggcaataattgacccaggcgactcagatattatcaggtcaatgcccgaacaaaccggcgagaagtag

SEQ ID NO: 17905 - DNA, 348 bp, Artificial Sequence
  derived and/or modified sequence
atggtcgcggctaaaaaaactaaaaaatccttagagtccattaacagccggctgcagttggttatgaaaagtggaaagtacgtcctcggttataagcagacgcttaagatgattaggcagggcaaagcgaagctcgtgatactggcgaataattgccctgcactacgcaagtcagaaatcgagtattatgctatgctggccaaaacgggggttcaccactactctgggaacaacatcgagttgggaactgcttgcggcaagtactacagagtatgcacattggctatcattgatccaggagactcggacattataagaagtatgccggagcaaacgggtgagaagtag

SEQ ID NO: 17906 - DNA, 345 bp, Artificial Sequence
  derived and/or modified sequence
atggtggccgctaagaaaacaaaaaagagtctcgaatccattaactcccgactccagctggtgatgaagagtgggaaatacgtgctggggtataaacagactctaaaaatgatacgccaggggaaggctaagcttgtcatactcgctaacaactgtccagccctcaggaaaagtgaaattgaatactacgcaatgcttgcgaagaccggagtacatcattattccgggaataacatcgaactggggaccgcttgcggcaaatattaccgagtatgtaccttggccatcattgacccaggagactctgacattattcgtagcatgccggagcagaccggcgagtag

SEQ ID NO: 17907 - DNA, 543 bp, Artificial Sequence
  derived and/or modified sequence
agttccggctctgccgtgaagagctttgcattgtgggaagtctttcctttctcgttccccggccatcttagcggctgctgttggttgggggccgtcccgctcctaaggcaggaagatggtggccgcaaagaagacgaaaaagtcgctggagtcgatcaactctaggctccaactcgttatgaaaagtgggaagtacgtcctggggtacaagcagactctgaagatgatcagacaaggcaaagcgaaattggtcattctcgctaacaactgcccagctttgaggaaatctgaaatagagtactatgctatgttggctaaaactggtgtccatcactacagtggcaataatattgaactgggcacagcatgcggaaaatactacagagtgtgcacactggctatcattgatccaggtgactctgacatcattagaagcatgccagaacagactggtgaaaagtaaaccttttcacctacaaaatttcacctgcaaaccttaaacctgcaaaattttcctttaataaaatttgcttgttttaaaaa

SEQ ID NO: 17908 - DNA, 575 bp, Artificial Sequence
  derived and/or modified sequence
gctgttggtgagtgggctcctaccgaccgaggtttaggcagcgcggggagctttgcgggttgccatttgtaactccggatcctaaaattcctgtcctgttctctgtctcttctaggttgggggccgtcccgctcctaaggcaggaagatggtggccgcaaagaagacgaaaaagtcgctggagtcgatcaactctaggctccaactcgttatgaaaagtgggaagtacgtcctggggtacaagcagactctgaagatgatcagacaaggcaaagcgaaattggtcattctcgctaacaactgcccagctttgaggaaatctgaaatagagtactatgctatgttggctaaaactggtgtccatcactacagtggcaataatattgaactgggcacagcatgcggaaaatactacagagtgtgcacactggctatcattgatccaggtgactctgacatcattagaagcatgccagaacagactggtgaaaagtaaaccttttcacctacaaaatttcacctgcaaaccttaaacctgcaaaattttcctttaataaaatttgcttgttttaaaaa

SEQ ID NO: 17909 - DNA, 1129 bp, Artificial Sequence
  derived and/or modified sequence
ttttaaaaaattagacctgtttatcgcgctctcagtgcaaactcggctcacaagttcacgctaacacagtcacaaaaggcgagttttgggaaactcgagcagggcgccaccgttctccaggggacaggtaacttgggtgaccgcaggggtgaggacacagctgcttctaccaagcggagagtaaatgcgggtgctgcggcgcatcggagtcacccacaaggctctccaagagccgcgcctcaggacaaagatgaattcagcggcattgagaccgtggtcgcagccgccgcagcctcttctcatctaccctcccacctcaccttcagtcggcttttcgaactccctccgggttctaagcgcctcgattagttagaccgcagctcgcagcagaacagcaacacaacgccgcgaagcttaaaggcccgcagagggggaaaagaacacccccgccgtcattcttttttttccttctttgagacagagtctcactctgtcgcccaggctgagtgcagtggcgcgatcatggctcactgcagcctcgacctaccgagctcaagcgacctctccgcctcagcctccggcgtagctgggagtagctaggactactggagcgcgccaccacgcccggctaatttcttttttatttcttttttatttttttgtagagacaggggtggtctatgttgtccaggctggccttgagctggacgcaacagatcttcccgcctcaacctccgaaagtgctgggattaaaggttgggggccgtcccgctcctaaggcaggaagatggtggccgcaaagaagacgaaaaagtcgctggagtcgatcaactctaggctccaactcgttatgaaaagtgggaagtacgtcctggggtacaagcagactctgaagatgatcagacaaggcaaagcgaaattggtcattctcgctaacaactgcccagctttgaggaaatctgaaatagagtactatgctatgttggctaaaactggtgtccatcactacagtggcaataatattgaactgggcacagcatgcggaaaatactacagagtgtgcacactggctatcattgatccaggtgactctgacatcattagaagcatgccagaacagactggtgaa

SEQ ID NO: 17910 - DNA, 348 bp, Artificial Sequence
  derived and/or modified sequence
atggtggccgccaagaagaccaagaagagcctggagagcatcaacagcagactgcagctggtgatgaagagcggcaagtacgtgctgggctacaagcagaccctgaagatgatcagacagggcaaggccaagctggtgatcctggccaacaactgccccgccctgagaaagagcgagatcgagtactacgccatgctggccaagaccggcgtgcaccactacagcggcaacaacatcgagctgggcaccgcctgcggcaagtactacagagtgtgcaccctggccatcatcgaccccggcgacagcgacatcatcagaagcatgcccgagcagaccggcgagaagtag

SEQ ID NO: 17911 - DNA, 345 bp, Artificial Sequence
  derived and/or modified sequence
atggtggccgccaagaagaccaagaagagcctggagagcatcaacagcagactgcagctggtgatgaagagcggcaagtacgtgctgggctacaagcagaccctgaagatgatcagacagggcaaggccaagctggtgatcctggccaacaactgccccgccctgagaaagagcgagatcgagtactacgccatgctggccaagaccggcgtgcaccactacagcggcaacaacatcgagctgggcaccgcctgcggcaagtactacagagtgtgcaccctggccatcatcgaccccggcgacagcgacatcatcagaagcatgcccgagcagaccggcgagtag

SEQ ID NO: 17912 - protein, 148 aa, Artificial Sequence [sequence omitted]

SEQ ID NO: 17913 - protein, 108 aa, Artificial Sequence
  derived and/or modified sequence
MPSRLRKTRKLRGHVSHGHGRIGKHRKHPGGRGNAGGLHHHRINFDKYHPGYFGKVGMKHYHLKRNQSFCPTVNLDKLWTLVSEQTRVNAAKNKTGAAPIIDVVRSVS

SEQ ID NO: 17914 - DNA, 447 bp, Artificial Sequence
  derived and/or modified sequence
atgcctagcagactgcgaaagacccggaaactgagaggacacgtttctcacggtcatggccgaattgggaagcaccgcaagcatcctggcggcaggggtaatgctggcggccttcaccaccacagaatcaattttgataaataccaccctggatatttcgggaaagttggcatgaaacactatcatttgaaaagaaatcagtctttttgtcccacagttaacctcgataaattgtggaccctcgtctctgaacagacaagggtgaatgcagcaaagaataagactggtgccgcacccattatagacgttgtacgctctggatactacaaggtgctgggcaaaggaaagcttcccaagcaaccagttattgtaaaggcgaagttcttcagtcgccgggctgaagaaaagattaagagcgtcggaggcgcttgcgttctagtggcttag

SEQ ID NO: 17915 - DNA, 327 bp, Artificial Sequence
  derived and/or modified sequence
atgcctagcagactcagaaaaacacgaaagctgcgtggccacgtctcccacggccatgggagaattggcaagcacaggaaacacccaggaggcagaggcaatgcgggtggcttgcaccaccaccgcattaactttgataaataccacccaggatactttggtaaagtgggaatgaagcactatcacctgaagcgaaaccagagtttttgcccaacggtgaacttggacaagctgtggacattggtcagcgagcagacaagggtcaacgccgctaaaaacaaaaccggcgcggctccaataatcgacgtcgtgaggagcgtgtcttag

SEQ ID NO: 17916 - DNA, 447 bp, Artificial Sequence
  derived and/or modified sequence
atgcccagccggctgaggaagaccaggaagctgcggggccacgtgagccacggccacggccgcatcggcaagcacaggaagcaccctgggggcagaggaaatgccggcggcctgcaccaccaccgcatcaactttgacaagtaccaccctggctactttgggaaggtgggcatgaagcactaccacctgaagaggaaccagagcttctgccccaccgtgaacctggacaagctgtggaccctggtgtctgagcagaccagggtgaatgctgccaagaacaagacaggagctgcccccatcattgatgtggtgcgcagcggctactacaaggtgctgggcaagggcaagctgcccaagcagcctgtgattgtgaaggccaagttcttcagcagaagagctgaggagaagatcaagtctgtgggcggggcctgtgtgctggtggcctag

SEQ ID NO: 17917 - DNA, 327 bp, Artificial Sequence
  derived and/or modified sequence
atgcccagccggctgaggaagaccaggaagctgcggggccacgtgagccacggccacggccgcatcggcaagcacaggaagcaccctgggggcagaggaaatgccggcggcctgcaccaccaccgcatcaactttgacaagtaccaccctggctactttgggaaggtgggcatgaagcactaccacctgaagaggaaccagagcttctgccccaccgtgaacctggacaagctgtggaccctggtgtctgagcagaccagggtgaatgctgccaagaacaagacaggagctgcccccatcattgatgtggtgcgctctgtgtcctag

SEQ ID NO: 17918 - DNA, 447 bp, Artificial Sequence
  derived and/or modified sequence
atgcccagccggctgcggaagacccggaagctgcggggccacgtgagtcacggccatggcaggattgggaagcaccgaaagcaccctggcggaaggggaaacgctggcggcttgcatcatcatcgaattaacttcgataaatatcaccctggttattttggcaaagtggggatgaagcactaccatctcaagcgaaaccagagcttctgccccacagtgaatctggacaaactgtggacgctcgtcagcgaacagaccagggtcaatgcagcaaaaaataagacgggggcggccccaatcatcgacgttgtaaggagtggttactataaagtcctgggcaaaggcaagctgccaaagcagccagtgattgtaaaggctaagtttttttcccgcagagccgaggagaagattaagtcagtggggggcgcctgcgtactggttgcctag

SEQ ID NO: 17919 - DNA, 327 bp, Artificial Sequence
  derived and/or modified sequence
atgcccagccggctgcggaagacccggaagctgcggggccacgtgtctcatgggcatgggcgcattgggaaacaccgaaaacatcccgggggcaggggtaacgcaggggggctgcaccaccatagaatcaatttcgataagtatcatcccggctactttggtaaggtgggaatgaaacattaccacctaaaacggaatcagtccttttgcccaacagtgaatctggataagctgtggactcttgtctcagagcagacgagagtgaatgccgcaaagaataagacaggcgcagctccaataatcgacgtggtgcgatcagtctcctag

SEQ ID NO: 17920 - DNA, 447 bp, Artificial Sequence
  derived and/or modified sequence
atgcctagccggctcaggaagacacggaagctgagagggcacgtatctcacggccacggcaggattgggaaacaccgaaagcacccaggcggtcggggaaacgctggaggtcttcaccatcatagaatcaattttgacaagtatcaccctggttacttcggaaaggtgggcatgaagcattatcacctcaagcgtaaccagtccttctgccccactgtgaacctcgacaagctgtggacattagtgtcagaacagactagagtcaatgctgctaaaaataaaaccggcgctgctcccatcatagatgtcgtgaggtctggctactacaaggtactgggcaaagggaaactacctaagcagcccgttattgtgaaggccaagttctttagccggcgagcggaagagaaaattaagtccgtgggcggagcatgtgtcctcgtggcctag

SEQ ID NO: 17921 - DNA, 327 bp, Artificial Sequence
  derived and/or modified sequence
atgccttctagactgaggaagacccgaaagctacgaggtcacgtgtcgcacggccatgggcgaatcggaaagcatcgcaagcaccctggtggcagaggcaacgctggcggtcttcatcaccatcgcattaactttgataagtaccaccctggctatttcggaaaggtggggatgaaacattaccacttaaaacgtaaccagtcattttgtccgaccgtaaacctggataaactatggacactggtttcagagcagacccgcgtaaacgcagcaaagaacaagaccggcgctgcccctatcattgacgtcgtgagatccgttagctag

SEQ ID NO: 17922 - DNA, 4916 bp, Artificial Sequence
  derived and/or modified sequence
cggctcagggctggcgcatttggtgaggagctcagacaacgaggcccttagggtcggcttaggcggttccctgaccaaggcgccagaaaagggcctggctcaagcaagcacgggcggcgtgcagtacagcacacctagccccgattcttcaacagttctcgccctccgagcctagcacaacgagcctcaccgaaaccgtacaccgccaccaggacactccgtgatgggggatcaccaccctcagaaagaggaagcgactagcaggcgcgcaatcccgcgagaccaggaggccccgcccgaagcccggcctctgtgaccggaagtgaggcgttttgccccgcccccgtggccgatacctcgcgagacttggcgaaggccttcctttttcgtctgggctgccaacatgccatccagactgaggaagacccggaaacttaggggccacgtgagccacggccacggccgcataggcaagcaccggaagcaccccggcggccgcggtaatgctggtggtctgcatcaccaccggatcaacttcgacaaataccacccaggctactttgggaaagttggtatgaagcattaccacttaaagaggaaccagagcttctgcccaactgtcaaccttgacaaattgtggactttggtcagtgaacagacacgggtgaatgctgctaaaaacaagactggggctgctcccatcattgatgtggtgcgatcgggctactacaaagttctgggaaagggaaagctcccaaagcagcctgtcatcgtgaaggccaaattcttcagcagaagagctgaggagaagattaagagtgttgggggggcctgtgtcctggtggcttgaagccacatggagggagtttcattaaatgctaactactttttccttgtggtgtgagtgtaggttcttcagtggcacctctacatcctgtgtgcattgggagcccaggttctagtacttagggtatgaagacatggggtcctctcctgacttccctcaaatatatggtaaacgtaagaccaacacagacgttggccagttaaacatttctgtttataaagtcagaataatacctgttgatcactgaaaggcctgcatgtattgtactctgaattttacagtgaatgagagaatgtaccctaattgttcaacagggctcaaaaggaaagattccattttgatgggtcacattctaaagaggggcagtgtgataggaatgagatggtcctttaggacttaagttctcagcccaaggtttttccacgtggccccctcatcttttttttttttttaaacggagtctctcttgccaggctggagtgcagtggcacgatctcggctcactgcagcctccgcctcccaggttaagcgattctcctgcctcagcttcctgactaactgggattacaggcgcccaccaccatgcccagctaatttttgtattttcagtagagatggggtttcaccatgttggccatgctggtctctaactcctaacctcaagtgatctgcccacatcggcctccaaaagttctgggattatagtgtgagccactgcgcccggccatggctccttaatcttgatccaaattattgttacatccagaatgtgatgaatcaaaatctcgagatgggggtccagcaatctgaaatttcagtatgccagggcttttctgtatgtcaaagtgggtttgaaatagttaatttttcttctagtctgaaatgtatcgggaaaatttggaaatcctgaaggctggaaattgaaataagtttttctaggatttgtgtctcttgctattggaaaactgatggtgaccaattcatgtttacaaataagatcctcatagatctcggtaaattataatttgctacagttttatggttcttcctgtgattttgagctttttttgacccaaaataatacagtctaaaactatagacaaataagatggcacttagactcctgggttttagttagtggaggtttccttagtgcactgtggggtcataataagccgagaaccatggctgtctatgggacacatctgtcaggacaacctttagaggatgttggggatcaaatagaaggcacagagaagcactgaattggcttacataagaataggctagaattacaagtagtgaaacctcgattcagctggacaattttaaacaaatgtatcatttggcttgtatcttctgttgtgctggagaagttagaaataagggctctccagaccagcctgaccaacctggagaaaccttgtctctactaaatacacaaaattagccaggcgtggtggcacatgcctgtaatcccagctactttggaggctgagccaggagaatctccaggaggcggaggttgctgtgagccgagatcgtgccattgcactccagcttgggcaacaagagtgaaactctgtccaccccccccaaaaaaagtaagggctctccattagggcccatagaggacttgtaatatggaacctgaatccaaggatcccacaataagtggtcagtagttcatgatgaattaaaagactcaatatttggtcttcacccaatacctgtgtgacttttagtcctaatttcctcatctttaaaatttcagtgaaagtgcctacctgaggattgtgtagattaaaatggaaaccgtgcacttaattttttgttttgttttgagacggagtctcgctctgtcgcccaggctggagtgcagtggtgcgatctcagatcactgcaagctccgcctcctaggttcagaccattctcctgcctcagcttcccaagtagctgggactacaggcgcccgccactgcgcccggctaattttttgcatttttagtagagacagggtttcaccgtgttagccaggatggtctcgatctcctgatctgcccgcctcagcctcccaaagtgctgggattacaggcatgagccaccgcgcccggcccaggcacttaatttttgtgtttgacttagtaacttaagtgcaaactattacgggagcagatggagtcaattggccttcatgtgattgtcagtgggaaattggtccaagcagagggaatactggttcaggaaactggtttgggaaggttaggcaaacgggaagtgctatggtggagagaaagattactctggccgggctgtaaaggacggctacaatgggaggctgaaggcagaaccaagaaaatgggagtgagtatggaaaaggtacgattcagacggcataatggacgggacttggagactgaattgtagtgggccgaccacaaaatgataaggcatggaaggaagtagagtttggggggaaggatccctagtcccttaatggctaccttcttccccaggagttgttaggccatccgatcccctggcctgggaaagaaacactgatttcgttgctggcttgttcactcaccagaagctacagctactaacagttctaaaaactgtttcatgtgatgaggaacagacgaaaatagttttgagccctaagtccgccgattccagtgctttcttgaacccgcatttactaaaatattttcatgactgccaagctttgaatagcctgctgtgttcatggaggctcatactggcgatctctagtggctggctaaagcttgaattgcaaaagatctaatttctggtctaatgtatatatgccttaaatatagttgcgttcaaacgtgggagctgcaggtgcaacttgattttatgacaaatggctgccacataatttgcacaagcagtgctcgtcaagggcagctaaatcaggcgagctttcaatcaaaataaatgtactactaaaccctacttagcggctaactagcccaagagcagacagcccacggacggactgcaagtcggaagcgcgggcggaagctgtgcagcgcccacctggtggctccatcggccgcgttcatcagtcagcacgacccgacctcagtggcgtcctcacaacacagaccggaccttgggtcttaccccggcacctgagaaccacttccggtgagtagcttctacttccggagacgatgactcccccgcgtcccagaccggaagaagcccggcggagaccggcctcgctcggccacttccggcaagggcggagccggccagtggtgcgcgagcgcagataactcccctggagaggcgggatgttcaactccacccctggtccttgggcggccgtgggtccccttcgaagcggaggaatggccaacctcgccgcacttcgagcccctttagggtgcgtttaagaacagtgggcgtggcctttacgtaaatcttcgagatgggaacctccagaatttgtctcaattgtctaaaaggtaatgagcgtcagcgacattcaagggcactttgggctaaaaaagaaagtgcttgtacacggatggaaatattctagaagaacataaaaggaatttcctcttaggaggttagggaaatgagcacgaagtatgttttggtgcagttttttgttcaacccaatgcgtattttcatattgagaggcaatataaatggagcgaaagtatcttgagaaaaaaaaaaaaactaccagaacttgccgttgctgaaaagtaatattttctctttcgagagttttcatggccttttaaattacacccccacctccacaggcaaataaatttgttttggaatgcataccacatcatctggctctagaaacgtattttgtgtagctcccctagcaagaatataggttaaagcgtaaatttaattcctggctctattttacatcccaatttttattttcctctcattcccactttacgttgtttcaaataacctagtttgtgtatccctgtaagtcattttggtataaagtaggttataagtgtacatgcgaaaagatgtttttaacaaaaatgtaactga

SEQ ID NO: 17923 - DNA, 867 bp, Artificial Sequence
  derived and/or modified sequence
cttcctttttcgtctgggctgccaacatgccatccagactgaggaagacccggaaacttaggggccacgtgagccacggccacggccgcataggcaagcaccggaagcaccccggcggccgcggtaatgctggtggtctgcatcaccaccggatcaacttcgacaaataccacccaggctactttgggaaagttggtatgaagcattaccacttaaagaggaaccagagcttctgcccaactgtcaaccttgacaaattgtggactttggtcagtgaacagacacgggtgaatgctgctaaaaacaagactggggctgctcccatcattgatgtggtgcgatcggtaagttaattggatgtttttctgtacttccataccttcccttacaaaactctggcttaatctaatccacttatataatctgtacttcccagttacctaccagacattgatattcttcctgtggtagaattatcataggtagttccctatccgtagcagtgcctactgtcactgcccaggttgtatcaggtttgcatttcgtgcttgaactatagctggttttcactgagcacagctcttggcccttcatgttctccagataatagaatcctaatatgttccattgatactcagtgccatgcattatctgaagagattttcccccaaaacagatgtattatgtctgtccttgcgggggttctggtccctgtgtcagtcttaactctcatgaatatagaggtagtgttaagaggccagaaccctagggacgctttaaattcacttcccagcctatttaatgtccattgagtagttctggtggtcaggaaggtggttgtcttcttttgcttagcagggggtattt

SEQ ID NO: 17924 - DNA, 447 bp, Artificial Sequence
  derived and/or modified sequence
atgcccagcagactgagaaagaccagaaagctgagaggccacgtgagccacggccacggcagaatcggcaagcacagaaagcaccccggcggcagaggcaacgccggcggcctgcaccaccacagaatcaacttcgacaagtaccaccccggctacttcggcaaggtgggcatgaagcactaccacctgaagagaaaccagagcttctgccccaccgtgaacctggacaagctgtggaccctggtgagcgagcagaccagagtgaacgccgccaagaacaagaccggcgccgcccccatcatcgacgtggtgagaagcggctactacaaggtgctgggcaagggcaagctgcccaagcagcccgtgatcgtgaaggccaagttcttcagcagaagagccgaggagaagatcaagagcgtgggcggcgcctgcgtgctggtggcctag

SEQ ID NO: 17925 - DNA, 327 bp, Artificial Sequence
  derived and/or modified sequence
atgcccagcagactgagaaagaccagaaagctgagaggccacgtgagccacggccacggcagaatcggcaagcacagaaagcaccccggcggcagaggcaacgccggcggcctgcaccaccacagaatcaacttcgacaagtaccaccccggctacttcggcaaggtgggcatgaagcactaccacctgaagagaaaccagagcttctgccccaccgtgaacctggacaagctgtggaccctggtgagcgagcagaccagagtgaacgccgccaagaacaagaccggcgccgcccccatcatcgacgtggtgagaagcgtgagctag

SEQ ID NO: 17926 - protein, 159 aa, Artificial Sequence [sequence omitted]

SEQ ID NO: 17927 - DNA, 480 bp, Artificial Sequence
  derived and/or modified sequence
atggctaagtcaaagaaccacactacccacaaccagagccggaagtggcacaggaatggtatcaagaaacctaggtcccagagatacgaatccttgaagggcgtggatccgaagttcctgaggaacatgcgtttcgctaaaaaacacaacaaaaaggggctcaagaaaatgcaggcgaacaacgctaaggccatgtcagcccgcgccgaggccatcaaggcattggtgaagcccaaagaagtgaaacctaagataccaaaaggggtttcccgtaaactggatagactggcctacattgctcaccctaagttaggaaagcgcgcaagagcaagaattgcgaaggggctcaggctgtgtcggcctaaggctaaagccaaggccaaggccaaggaccaaacaaaggcccaggcagctgcgccggcttcagtgccagctcaggcaccaaaacgcactcaggcaccgacgaaagcgtctgagtag

SEQ ID NO: 17928 - DNA, 480 bp, Artificial Sequence
  derived and/or modified sequence
atggctaaatcgaaaaaccacaccacccataaccagtctcgaaaatggcaccgtaatgggatcaaaaagccccggagccaacggtacgaaagccttaaaggggtagatcctaaatttctgagaaacatgagattcgcaaaaaagcacaacaagaaaggcctcaagaagatgcaggcaaataatgctaaggcaatgtctgctcgcgcagaagctatcaaagccctggtgaagccgaaggaggtgaaaccaaagatccctaagggagtctccagaaagttggatcgcttggcctatattgcccatcccaaattggggaaaagagcccgggcccggatcgcaaaggggctgcgactgtgtaggcctaaggcgaaagctaaggctaaagcaaaagaccagaccaaggcccaagctgccgcccctgcaagcgtcccagcacaagcccccaaacgcactcaggcccccacaaaggctagcgaatag

SEQ ID NO: 17929 - DNA, 480 bp, Artificial Sequence
  derived and/or modified sequence
atggcaaagtcaaagaaccatactacccataaccaaagcagaaaatggcacagaaacggaatcaaaaagccgagatcgcagagatatgagtctctcaaaggcgtagaccccaaattcctcaggaacatgcgcttcgcaaagaaacataacaagaagggccttaagaaaatgcaagcaaataacgcgaaggcaatgtctgctagagccgaagcgattaaggcattggttaagcccaaggaggtaaaaccaaaaatacctaaaggggtcagcaggaagttggatcgcttagcatacattgcacaccctaaattgggcaagagggctcgcgccaggatcgctaaggggttacggttgtgtagaccgaaagctaaggctaaagctaaggccaaagaccagacaaaagcacaggctgcagctcctgcaagtgtgcccgctcaggccccgaagagaacccaggcccctaccaaagcttccgaatag

SEQ ID NO: 17930 - DNA, 480 bp, Artificial Sequence
  derived and/or modified sequence
atggctaagagcaaaaaccacacaacgcacaatcagtcccgcaagtggcataggaatgggattaagaagccccggtctcagcgttatgagtctctgaagggagtcgaccccaagttcttgaggaacatgcggtttgccaagaagcacaataagaaaggcttgaaaaagatgcaggccaacaatgctaaggccatgtcagccagagccgaggcaattaaggccttggtgaagcctaaagaagtgaagcctaagataccaaagggagtttcacggaagcttgaccgcctggcatatatcgcccatcccaagctcggtaaaagggcacgcgccagaattgcgaaaggcttgcggttgtgccgcccaaaggctaaagcaaaggcgaaggctaaggaccagacgaaggcgcaggccgcggcccccgcctccgtgcccgcccaggctcccaagcgcacgcaggcccccactaaggcttcagagtag

SEQ ID NO: 17931 - DNA, 480 bp, Artificial Sequence
  derived and/or modified sequence
atggccaagtccaagaaccacacaacccataatcagtcgaggaagtggcatcgaaatggcatcaaaaaacctagaagccagagatacgaaagcctgaagggggtggacccaaagtttctgcggaatatgcggtttgctaaaaagcataataaaaaggggctcaagaagatgcaggccaataatgccaaagctatgagcgcacgcgccgaggcaattaaggccctcgttaagcccaaggaggtgaagccaaaaattcctaagggggtgagtaggaagctggataggctcgcctacattgcacacccaaagctgggaaaacgggcccgagcgcggattgctaaagggctccgcctgtgccgaccgaaggcgaaagctaaagctaaggcgaaggaccagaccaaagcccaggcggctgcgccggcttcggtgcccgctcaggcacctaagagaacccaggccccaaccaaagcctcagaatag

SEQ ID NO: 17932 - DNA, 480 bp, Artificial Sequence
  derived and/or modified sequence
atggctaaatccaagaaccacacaactcataatcagtctaggaagtggcataggaatgggataaagaaaccgcgctctcagcggtatgagagcttgaagggagtggacccaaaatttttaagaaatatgcggtttgcgaaaaagcataacaaaaagggccttaaaaaaatgcaagcaaacaacgccaaagccatgtccgccagagctgaggccattaaggctctcgtaaagccgaaggaggtgaaacctaaaattcccaaaggagttagccgcaagctggatcgtctggcatacatcgcccatccgaaactcggcaagagagcccgtgccagaatcgctaaaggacttcgactctgccggcccaaggcaaaagctaaagctaaagccaaggatcagactaaggctcaagcagccgccccagcctccgttcccgcacaggctccaaagaggactcaggcccccactaaggcaagcgagtag

SEQ ID NO: 17933 - DNA, 480 bp, Artificial Sequence
  derived and/or modified sequence
atggccaagagcaagaaccacaccacccacaaccagagcaggaagtggcacagaaatggcatcaagaagcccaggagccagagatatgagagcctgaagggcgtggaccccaagttcctgaggaacatgagatttgccaagaagcacaacaagaagggcctgaagaagatgcaggccaacaatgccaaggccatgtctgcccgggcagaggccatcaaggccctggtgaagcccaaggaggtgaagcccaagatccccaagggcgtgtccaggaagctggaccggctggcctacatcgcccaccccaagctgggcaagagggcccgggcccgcatcgccaagggcctgcggctgtgccggcccaaggccaaggccaaggccaaggccaaggaccagaccaaggcccaggccgccgccccagcctctgtgcctgcccaggcccccaagaggacccaggcccccaccaaggccagcgagtag

SEQ ID NO: 17934 - DNA, 480 bp, Artificial Sequence
  derived and/or modified sequence
atggccaagagcaagaaccacaccacccacaaccagagccggaagtggcaccgaaatgggatcaagaagcccaggagccaaagatacgagagtttaaagggggtcgaccctaagttccttagaaacatgagattcgctaagaagcacaacaagaaaggcttgaaaaagatgcaagccaacaatgcaaaggcaatgagcgctcgtgcagaggctataaaagccctcgttaagcctaaggaggttaaaccaaaaatcccgaaaggagtatcaagaaagcttgataggctagcctacatcgcacatcctaaacttggaaaaagggctcgggcacggatcgcgaaagggctacgactgtgccgcccaaaggccaaggccaaggcaaaggccaaagaccagaccaaggctcaggccgccgctccagcgtcagtgccagctcaggcaccaaagaggacccaagccccaacgaaggcctctgagtag

SEQ ID NO: 17935 - DNA, 480 bp, Artificial Sequence
  derived and/or modified sequence
atggccaagagcaagaaccacaccacccacaaccagagccggaagtggcaccggaacggcataaaaaagccccggtctcagagatatgagtctctcaagggagtggatcccaagtttcttagaaacatgcgctttgcaaaaaaacacaacaagaaaggattgaagaaaatgcaggctaataatgccaaggccatgagcgcgcgggcagaggcaattaaggccctggtcaaacccaaagaagtgaagccaaagatcccgaagggagtgtctcgtaagctggatcgcctggcttatatagcacaccccaagttaggcaagagggcacgcgcccggatcgccaaaggcctgaggctgtgccggccaaaggcgaaagctaaggctaaagccaaggaccagacaaaggcgcaagccgccgctccggcttctgttccggctcaagcgcccaaaaggacgcaggctccaacaaaggccagtgagtag

SEQ ID NO: 17936 - DNA, 480 bp, Artificial Sequence
  derived and/or modified sequence
atggccaagagcaagaaccacaccacccacaaccagagccggaagtggcacaggaacggaataaagaaaccaaggtcacagagatacgagagtctgaagggggtcgaccctaaatttctaagaaatatgaggtttgcaaaaaaacataataaaaaagggttaaaaaagatgcaggcaaacaacgccaaagcgatgtccgctcgcgcggaagcaattaaggcactcgtgaagccaaaggaagtgaaaccaaagatccccaagggcgtgagccgaaagctcgacagactcgcatacatcgcccaccccaagctggggaaacgagcccgggcccgtattgcaaaaggtctccgtctgtgcagacccaaggccaaggccaaagccaaggcgaaggatcaaacaaaagcgcaggccgccgcaccagcatcggtgcccgcgcaggcccctaaacgaactcaggcccctactaaagcctcggagtag

SEQ ID NO: 17937 - DNA, 480 bp, Artificial Sequence
  derived and/or modified sequence
atggccaagagcaagaaccacaccacccacaaccagagccggaagtggcacaggaacggcatcaagaaacctaggtctcagcggtacgagagcctcaagggcgtggaccccaagttcttaaggaacatgaggtttgcaaaaaaacataacaagaagggactcaaaaagatgcaggccaataacgctaaggccatgagcgccagagcggaagctattaaagcactggtgaagcccaaggaggtgaaacctaaaattccaaaaggcgtgagccgcaaattggacagactcgcctatatcgcgcaccccaaactcggaaaacgagcacgtgcgcggatcgccaagggcttgcgtctatgccgcccgaaggcaaaagcaaaggccaaggccaaagatcagactaaggcgcaagcagccgccccagcaagcgttccagcccaagccccaaaacgcacacaggctccaacgaaggcgagcgagtag

SEQ ID NO: 17938 - DNA, 480 bp, Artificial Sequence
  derived and/or modified sequence
atggccaagagcaagaaccacaccacccacaaccagagccggaagtggcacagaaatggcattaaaaagcccaggagccagcggtatgagtccttgaaaggtgtcgacccaaagttcctgcgcaatatgagattcgcgaaaaagcacaataaaaagggcctgaagaaaatgcaggccaacaacgccaaggctatgagcgcacgcgccgaagctattaaggccttggtaaaacctaaggaggttaaacccaaaatccctaaaggagtatcccgcaaacttgataggctggcctacattgcccaccccaaactgggaaagagagctcgcgctcggatcgcaaagggactgcggctttgcaggccaaaggccaaagcaaaagccaaggcaaaagaccagactaaggctcaggccgctgccccagcctccgttccagcgcaggctcccaaacgcacacaagcgcctaccaaggccagtgaatag

SEQ ID NO: 17939 - DNA, 480 bp, Artificial Sequence
  derived and/or modified sequence
atggccaagagcaagaaccacaccacccacaaccagagccggaagtggcacagaaatggtattaagaaacctagaagtcaaagatacgagtccctgaaaggagtcgaccccaaattcttgcgcaatatgaggttcgctaagaagcacaacaagaagggcttaaagaagatgcaagcaaataatgcaaaggcgatgagcgcaagagctgaggctattaaagcactcgtgaaaccaaaagaggttaagcccaagatcccaaagggcgtgagcagaaaattggacagactggcctacatcgctcaccccaagctggggaaacgagcacgagctagaatcgctaagggactaaggctatgccgacctaaggccaaagctaaagcaaaggctaaagaccaaacaaaagctcaagctgccgctcctgcaagtgttcctgcccaggctcctaagagaactcaggctcccacaaaagcctccgaatag

SEQ ID NO: 17940 - DNA, 480 bp, Artificial Sequence
  derived and/or modified sequence
atggcaaagtccaaaaaccatacaacacataatcagagccggaagtggcacagaaatggaattaaaaagccccgttcccagcgctatgagtccctcaagggagtggatccaaagttcctgcgcaacatgcgctttgcaaaaaaacacaacaagaaaggcttaaagaaaatgcaggcgaacaatgcaaaagctatgtccgccagagcggaagccatcaaagcactcgttaaacccaaagaagtcaagcctaaaatccctaaaggggtttctcgaaagctagaccgcctggcatatatagctcacccaaagctgggcaagagagctcgcgctcggattgcaaaggggctgaggttgtgcagaccgaaggcaaaggccaaggccaaggctaaggatcagacaaaggcacaagccgctgctccggcttctgtgccagcacaggcccctaagcgtacccaggccccaactaaagcatccgagtag

SEQ ID NO: 17941 - DNA, 480 bp, Artificial Sequence
  derived and/or modified sequence
atggctaaatctaagaatcataccactcacaatcagtctcgtaagtggcatcgaaatggcatcaaaaagcctagatctcagcgatatgagtctttgaaaggagtggaccccaagttcctcaggaatatgaggttcgccaaaaaacacaacaagaaaggcctgaagaaaatgcaggccaataatgcaaaggcgatgtctgccagggcggaggctatcaaggcgctggtgaagcctaaagaagtaaagcctaaaatccctaagggagtctctcgaaagctggacagactggcctacatagcccacccaaagctgggcaaacgagccagggccagaatcgcaaaggggctgcgtctgtgcagacctaaggccaaggcgaaggcaaaggctaaggaccagacaaaggcccaggcagcagcacctgccagtgtccctgctcaggccccaaagaggacccaggccccaacaaaggcttctgagtag

SEQ ID NO: 17942 - DNA, 480 bp, Artificial Sequence
  derived and/or modified sequence
atggctaagtcgaaaaatcatactacccacaaccagtcccgcaagtggcacaggaacggtatcaagaaacccagatcccaacggtacgagtctctcaaaggcgtagatcccaaatttcttcgtaatatgagatttgctaaaaagcataacaagaagggcttgaaaaagatgcaggctaataatgccaaagctatgtccgctagggcagaggccatcaaggctctggtgaaaccaaaggaggtgaagcccaagatccctaaaggggtttcccggaagctggatcgcttagcttatattgctcacccaaagctggggaagagggcgagagcccgaatcgccaaagggctgagactctgtagaccaaaggccaaggctaaggctaaagcaaaggaccagacaaaagcccaggctgctgcaccagcgtccgtgcctgcccaggctcccaagcggacccaggcacctaccaaagcctcggaatag

SEQ ID NO: 17943 - DNA, 480 bp, Artificial Sequence
  derived and/or modified sequence
atggctaaatccaagaaccacaccacgcacaaccaaagtaggaaatggcaccgcaatggtataaagaagccaagatcccagcgatatgaatctctgaaaggtgtggacccgaaatttttacgaaacatgcgtttcgctaaaaaacacaacaaaaaagggctgaagaaaatgcaagcaaacaacgcgaaagcaatgtcggcaagggccgaagccattaaggccctggtcaagcctaaagaggtaaaaccgaagataccgaagggggtctccagaaaacttgataggttggcttacatcgcacatcctaaactgggcaaaagagctcgtgctcgaattgcaaaggggctgcgcctttgtcgccctaaggctaaggccaaagccaaggccaaagatcagaccaaagctcaggcagcggctccagccagcgttccagcccaggctccaaagaggacacaggctccgaccaaggctagcgagtag

SEQ ID NO: 17944 - DNA, 480 bp, Artificial Sequence
  derived and/or modified sequence
atggccaaaagcaagaaccatacgacccacaaccagagtcggaagtggcataggaatggtataaagaaacccaggagccaacggtatgagtcactgaagggcgtcgacccaaaatttctgagaaacatgaggtttgccaagaaacataataaaaaggggctgaaaaagatgcaagcaaataatgctaaggctatgagtgccagggccgaagcaatcaaagccttggttaagcccaaggaagtgaagcctaagatcccaaaaggggtgtctaggaaactggacaggctggcctacatagctcaccctaagctgggcaaacgcgcacgcgctcgcatcgcaaaaggccttaggttgtgccgacccaaagccaaagctaaagctaaagccaaagaccagaccaaggcgcaggcagccgcaccagcctctgtacctgcccaggcaccgaagcgcacacaggcacccacgaaggcgtccgaatag

SEQ ID NO: 17945 - DNA, 480 bp, Artificial Sequence
  derived and/or modified sequence
atggctaagagcaagaatcacacaacacacaatcaatcacgtaagtggcacagaaatggcattaaaaagcctcgaagccagcggtacgagtcacttaagggggttgatccgaaatttctgcgaaacatgcgtttcgctaagaaacacaataagaaggggctcaagaagatgcaagcgaacaacgccaaggcaatgtcagccagggctgaggccataaaagcactcgttaagcctaaggaggtgaagcccaagattcccaaaggggtgtcaagaaagctcgataggctggcatacatcgctcaccccaagctaggtaaacgggcaagagcacgcattgcaaaagggctgcgactgtgtagaccgaaagctaaagcaaaggcaaaagccaaagaccagaccaaagcccaggccgcagccccagctagcgtccccgcacaagctcccaaacggacccaggctcccactaaagcctctgaatag

SEQ ID NO: 17946 - DNA, 695 bp, Artificial Sequence
  derived and/or modified sequence
ttccggcgttgttgaccctatttcccgtgctgcaccgcagcccctttctcttccggttctaggcgcttcgggagccgcggcttatggtgcagacatggccaagtccaagaaccacaccacacacaaccagtcccgaaaatggcacagaaatggtatcaagaaaccccgatcacaaagatacgaatctcttaagggggtggaccccaagttcctgaggaacatgcgctttgccaagaagcacaacaaaaagggcctaaagaagatgcaggccaacaatgccaaggccatgagtgcacgtgccgaggctatcaaggccctcgtaaagcccaaggaggttaagcccaagatcccaaagggtgtcagccgcaagctcgatcgacttgcctacattgcccaccccaagcttgggaagcgtgctcgtgcccgtattgccaaggggctcaggctgtgccggccaaaggccaaggccaaggccaaggccaaggatcaaaccaaggcccaggctgcagccccagcttcagttccagctcaggctcccaaacgtacccaggcccctacaaaggcttcagagtagatatctctgccaacatgaggacagaaggactggtgcgaccccccacccccgcccctgggctaccatctgcatggggctggggtcctcctgtgctatttgtacaaataaacctgaggcagga

SEQ ID NO: 17947 - DNA, 742 bp, Artificial Sequence
  derived and/or modified sequence
gcttatggtgagtgttggccgcgcggcatccgatgccatccgcgacttacgggtggcggcggggcgcgggctgcggagaggactggtgaccgaccgtgtgtctgtcgggagcaaaagctgcggggtgggaatggtgcagacatggccaagtccaagaaccacaccacacacaaccagtcccgaaaatggcacagaaatggtatcaagaaaccccgatcacaaagatacgaatctcttaagggggtggaccccaagttcctgaggaacatgcgctttgccaagaagcacaacaaaaagggcctaaagaagatgcaggccaacaatgccaaggccatgagtgcacgtgccgaggctatcaaggccctcgtaaagcccaaggaggttaagcccaagatcccaaagggtgtcagccgcaagctcgatcgacttgcctacattgcccaccccaagcttgggaagcgtgctcgtgcccgtattgccaaggggctcaggctgtgccggccaaaggccaaggccaaggccaaggccaaggatcaaaccaaggcccaggctgcagccccagcttcagttccagctcaggctcccaaacgtacccaggcccctacaaaggcttcagagtagatatctctgccaacatgaggacagaaggactggtgcgaccccccacccccgcccctgggctaccatctgcatggggctggggtcctcctgtgctatttgtacaaataaacctgaggcagga

SEQ ID NO: 17948 - DNA, 551 bp, Artificial Sequence
  derived and/or modified sequence
acgggtggcggcggggcgcgggctgcggagaggactggtgcagacatggccaagtccaagaaccacaccacacacaaccagtcccgaaaatggcacagaaatggtatcaagaaaccccgatcacaaagatacgaatctcttaagggggtggaccccaagttcctgaggaacatgcgctttgccaagaagcacaacaaaaagggcctaaagaagatgcaggccaacaatgccaaggccatgagtgcacgtgccgaggctatcaaggccctcgtaaagcccaaggaggttaagcccaagatcccaaagggtgtcagccgcaagctcgatcgacttgcctacattgcccaccccaagcttgggaagcgtgctcgtgcccgtattgccaaggggctcaggctgtgccggccaaaggccaaggccaaggccaaggccaaggatcaaaccaaggcccaggctgcagccccagcttcagttccagctcaggctcccaaacgtacccaggcccctacaaaggcttcagagtagatatctctgccaacatgaggacagaa

SEQ ID NO: 17949 - DNA, 670 bp, Artificial Sequence
  derived and/or modified sequence
tgccatccgcgacttacgggtggcggcggggcgcgggctgcggagaggactggtgaccgaccgtgcagacatggccaagtccaagaaccacaccacacacaaccagtcccgaaaatggcacagaaatggtatcaagaaaccccgatcacaaagatacgaatctcttaagggggtggaccccaagttcctgaggaacatgcgctttgccaagaagcacaacaaaaagggcctaaagaagatgcaggccaacaatgccaaggccatgagtgcacgtgccgaggctatcaaggccctcgtaaagcccaaggaggttaagcccaagatcccaaagggtgtcagccgcaagctcgatcgacttgcctacattgcccaccccaagcttgggaagcgtgctcgtgcccgtattgccaaggggctcaggctgtgccggccaaaggccaaggccaaggccaaggccaaggatcaaaccaaggcccaggctgcagccccagcttcagttccagctcaggctcccaaacgtacccaggcccctacaaaggcttcagagtagatatctctgccaacatgaggacagaaggactggtgcgaccccccacccccgcccctgggctaccatctgcatggggctggggtcctcctgtgctatttgtacaaataaacctgaggcagg

SEQ ID NO: 17950 - DNA, 537 bp, Artificial Sequence
  derived and/or modified sequence
cgggtggcggcggggcgcgggctgcggagaggactggtgaccgaccgtgtgtgcagacatggccaagtccaagaaccacaccacacacaaccagtcccgaaaatggcacagaaatggtatcaagaaaccccgatcacaaagatacgaatctcttaagggggtggaccccaagttcctgaggaacatgcgctttgccaagaagcacaacaaaaagggcctaaagaagatgcaggccaacaatgccaaggccatgagtgcacgtgccgaggctatcaaggccctcgtaaagcccaaggaggttaagcccaagatcccaaagggtgtcagccgcaagctcgatcgacttgcctacattgcccaccccaagcttgggaagcgtgctcgtgcccgtattgccaaggggctcaggctgtgccggccaaaggccaaggccaaggccaaggccaaggatcaaaccaaggcccaggctgcagccccagcttcagttccagctcaggctcccaaacgtacccaggcccctacaaaggcttcagagta

SEQ ID NO: 17951 - DNA, 713 bp, Artificial Sequence
  derived and/or modified sequence
cgcgcggcatccgatgccatccgcgacttacgggtggcggcggggcgcgggctgcggagaggactggtgaccgaccgtgtgtctgtcgggagcaaaagctgcggggtgcagacatggccaagtccaagaaccacaccacacacaaccagtcccgaaaatggcacagaaatggtatcaagaaaccccgatcacaaagatacgaatctcttaagggggtggaccccaagttcctgaggaacatgcgctttgccaagaagcacaacaaaaagggcctaaagaagatgcaggccaacaatgccaaggccatgagtgcacgtgccgaggctatcaaggccctcgtaaagcccaaggaggttaagcccaagatcccaaagggtgtcagccgcaagctcgatcgacttgcctacattgcccaccccaagcttgggaagcgtgctcgtgcccgtattgccaaggggctcaggctgtgccggccaaaggccaaggccaaggccaaggccaaggatcaaaccaaggcccaggctgcagccccagcttcagttccagctcaggctcccaaacgtacccaggcccctacaaaggcttcagagtagatatctctgccaacatgaggacagaaggactggtgcgaccccccacccccgcccctgggctaccatctgcatggggctggggtcctcctgtgctatttgtacaaataaacctgaggcagg

SEQ ID NO: 17952 - DNA, 480 bp, Artificial Sequence
  derived and/or modified sequence
atggccaagagcaagaaccacaccacccacaaccagagcagaaagtggcacagaaacggcatcaagaagcccagaagccagagatacgagagcctgaagggcgtggaccccaagttcctgagaaacatgagattcgccaagaagcacaacaagaagggcctgaagaagatgcaggccaacaacgccaaggccatgagcgccagagccgaggccatcaaggccctggtgaagcccaaggaggtgaagcccaagatccccaagggcgtgagcagaaagctggacagactggcctacatcgcccaccccaagctgggcaagagagccagagccagaatcgccaagggcctgagactgtgcagacccaaggccaaggccaaggccaaggccaaggaccagaccaaggcccaggccgccgcccccgccagcgtgcccgcccaggcccccaagagaacccaggcccccaccaaggccagcgagtag

SEQ ID NO: 17953 - protein, 125 aa, Artificial Sequence [sequence omitted]

SEQ ID NO: 17954 - protein, 130 aa, Artificial Sequence
  derived and/or modified sequence
MAPAKKGGEKKKGRSAINEVVTREYTINIHKRIHGVGFKKRAPRALKEIRKFAMKEMGTPDVRIDTRLNKAVWAKGIRNVPYRIRVRLSRKRNEDEDSPNKLYTLVTYVPVTTFKSLQNDDLFKTDCHHQ

SEQ ID NO: 17955 - protein, 120 aa, Artificial Sequence
  derived and/or modified sequence
MAPAKKGGEKKKGRSAINEVVTREYTINIHKRIHGVGFKKRAPRALKEIRKFAMKEMGTPDVRIDTRLNKAVWAKGIRNVPYRIRVRLSRKRNEDEDSPNKLYTLVTYVPVTTFKNCHHQ

SEQ ID NO: 17956 - DNA, 393 bp, Artificial Sequence
  derived and/or modified sequence
atggcccccgccaagaagggcggcgagaagaagaagggcagaagcgccatcaacgaggtggtgaccagagagtacaccatcaacatccacaagagaatccacggcgtgggcttcaagaagagagcccccagagccctgaaggagatcagaaagttcgccatgaaggagatgggcacccccgacgtgagaatcgacaccagactgaacaaggccgtgtgggccaagggcatcagaaacgtgccctacagaatcagagtgagactgagcagaaagagaaacgaggacgaggacagccccaacaagctgtacaccctggtgacctacgtgcccgtgaccaccttcaagagcctgcagaacgacgacctgttcaagaccgactgccaccaccagtag

SEQ ID NO: 17957 - DNA, 363 bp, Artificial Sequence
  derived and/or modified sequence
atggcccccgccaagaagggcggcgagaagaagaagggcagaagcgccatcaacgaggtggtgaccagagagtacaccatcaacatccacaagagaatccacggcgtgggcttcaagaagagagcccccagagccctgaaggagatcagaaagttcgccatgaaggagatgggcacccccgacgtgagaatcgacaccagactgaacaaggccgtgtgggccaagggcatcagaaacgtgccctacagaatcagagtgagactgagcagaaagagaaacgaggacgaggacagccccaacaagctgtacaccctggtgacctacgtgcccgtgaccaccttcaagaactgccaccaccagtag

SEQ ID NO: 17958 - DNA, 378 bp, Artificial Sequence
  derived and/or modified sequence
atggcaccggctaagaagggaggcgagaaaaaaaaagggcgaagcgcgataaatgaagtggtcacgcgcgagtatacaattaacattcataaaaggatccacggagttggttttaaaaaaagagcacccagggccctaaaagaaattaggaagtttgcaatgaaggaaatggggaccccggacgtgcggattgacacccggctgaataaagctgtttgggcaaaggggatcaggaacgttccctaccgaatccgcgtgaggttgtcgagaaaaaggaacgaggacgaggactctcctaacaagctttacacccttgtgacttatgtgccagtcacaacttttaagaacctgcagacggtcaatgtggacgaaaactag

SEQ ID NO: 17959 - DNA, 393 bp, Artificial Sequence
  derived and/or modified sequence
atggctcccgccaagaagggcggggagaagaagaagggacgcagtgccatcaatgaggtggtgaccagggagtatacaatcaacattcataagaggattcatggcgtgggcttcaaaaagagagcgcccagggccctgaaggagatccggaaatttgctatgaaggaaatgggcactccagacgttcgtatcgatacccggctgaataaggccgtgtgggctaaggggatcagaaatgtcccttataggataagagttcggctttcccggaaaaggaatgaagatgaagacagccccaacaaattgtacacgctcgtgacatacgtgcctgtcaccaccttcaaatcgctccaaaacgatgacctctttaagaccgactgccaccaccagtag

SEQ ID NO: 17960 - DNA, 363 bp, Artificial Sequence
  derived and/or modified sequence
atggctcctgcgaaaaagggaggagagaaaaaaaagggccgttctgcgataaacgaggtagtgacccgtgagtacaccattaacatccataaacggattcatggtgttggctttaagaagagggccccccgggctctgaaggaaatcagaaaatttgctatgaaagagatgggaacgccagatgtgagaattgatacccggttgaataaagctgtgtgggccaaagggattcggaacgtaccatatcgcatccgagttagactgagtaggaaaaggaatgaagatgaggattctcctaacaaactgtacactttagtgacctatgttcccgtaaccactttcaaaaattgtcatcaccagtag

SEQ ID NO: 17961 - DNA, 378 bp, Artificial Sequence
  derived and/or modified sequence
atggcccctgcgaaaaaagggggggagaagaaaaaggggagatccgctattaacgaagtcgttaccagggaatacaccattaatattcacaagagaatccatggcgttggcttcaagaaacgagctcctcgggccctgaaggagatccgcaagtttgcaatgaaagagatgggtacccccgacgtccgcatcgatacccgcctcaataaagccgtttgggctaaggggatccgcaatgtcccctaccgtattcgagtcaggttgagccggaagcggaacgaggacgaagattccccaaataagctgtataccctcgtgacatacgttccggtgaccaccttcaagaaccttcagaccgtaaatgtggatgagaattag

SEQ ID NO: 17962 - DNA, 378 bp, Artificial Sequence
  derived and/or modified sequence
atggccccagccaagaagggcggggagaagaagaagggccgcagcgccatcaatgaggtggtgacccgggagtacaccatcaacatccacaagaggatccacggcgtgggcttcaagaagagggccccccgggccctgaaggagatcaggaagtttgccatgaaggagatgggcaccccagatgtgagaattgacacccggctgaacaaggctgtgtgggccaagggcatcagaaatgtgccctaccgcatccgggtgcggctgagcaggaagagaaatgaagatgaggacagccccaacaagctgtacaccctggtgacctacgtgcctgtgaccaccttcaagaacctgcagacagtgaatgtggatgagaactag

SEQ ID NO: 17963 - DNA, 393 bp, Artificial Sequence
  derived and/or modified sequence
atggccccagccaagaagggcggggagaagaagaagggccgcagcgccatcaatgaggtggtgacccgggagtacaccatcaacatccacaagaggatccacggcgtgggcttcaagaagagggccccccgggccctgaaggagatcaggaagtttgccatgaaggagatgggcaccccagatgtgagaattgacacccggctgaacaaggctgtgtgggccaagggcatcagaaatgtgccctaccgcatccgggtgcggctgagcaggaagagaaatgaagatgaggacagccccaacaagctgtacaccctggtgacctacgtgcctgtgaccaccttcaagagcctgcagaatgatgacctcttcaagacagactgccaccaccagtag

SEQ ID NO: 17964 - DNA, 363 bp, Artificial Sequence
  derived and/or modified sequence
atggccccagccaagaagggcggggagaagaagaagggccgcagcgccatcaatgaggtggtgacccgggagtacaccatcaacatccacaagaggatccacggcgtgggcttcaagaagagggccccccgggccctgaaggagatcaggaagtttgccatgaaggagatgggcaccccagatgtgagaattgacacccggctgaacaaggctgtgtgggccaagggcatcagaaatgtgccctaccgcatccgggtgcggctgagcaggaagagaaatgaagatgaggacagccccaacaagctgtacaccctggtgacctacgtgcctgtgaccaccttcaagaactgccaccaccagtag

SEQ ID NO: 17965 - DNA, 378 bp, Artificial Sequence
  derived and/or modified sequence
atggcccccgccaagaagggcggcgagaagaagaagggccggagcgctataaacgaggtggtaactagagagtatactattaacatccataaacgcatccatggcgttgggttcaaaaagagggccccgagagccttgaaagaaatacgtaagtttgcaatgaaggagatgggaacacccgatgtgagaatcgatacaaggctgaacaaagccgtctgggcaaaaggcatcaggaacgtcccatatcgcattcgagtgaggctttcaagaaaacggaatgaggatgaagacagcccaaataaactgtatacccttgtaacatacgtacccgttactacttttaagaacctacagaccgtaaacgtggacgagaattag

SEQ ID NO: 17966 - DNA, 393 bp, Artificial Sequence
  derived and/or modified sequence
atggcccccgccaagaagggcggcgagaagaagaagggccggagcgcaattaatgaggtggtgacccgcgaatatacaattaacattcataagcgaattcacggcgtcgggttcaaaaaacgggctccaagagcccttaaagaaattcggaagtttgctatgaaggaaatgggaacgccggacgtgcgcattgatacacgcctgaacaaagctgtttgggctaaaggcataaggaatgtaccttaccggatccgggttagacttagtcgcaaacggaatgaagacgaagatagcccaaataagctttatactcttgtgacttacgtgcccgttacaacatttaaaagcctccagaacgacgatctgttcaagaccgattgccatcatcagtag

SEQ ID NO: 17967 - DNA, 363 bp, Artificial Sequence
  derived and/or modified sequence
atggcccccgccaagaagggcggcgagaagaagaagggccggagcgctattaacgaggtggtgactcgtgagtacacaataaacatacacaagcgaattcatggggtgggcttcaaaaagagggctccccgcgcactgaaggaaattcgaaagttcgcaatgaaggagatggggaccccagacgttaggattgacacacgactaaacaaagctgtttgggccaagggcataaggaacgttccttaccggattagagtaagattgagtagaaagagaaacgaggatgaggactccccaaacaagctgtacacactggtaacatacgtccccgtcacaactttcaaaaactgtcaccaccagtag

SEQ ID NO: 17968 - DNA, 378 bp, Artificial Sequence
  derived and/or modified sequence
atggcccccgccaagaagggcggcgagaagaagaagggccggagcgccataaatgaggtcgtgacgagagagtatactatcaacatccataaaagaatccacggtgtaggctttaaaaaacgggcccctcgagccctgaaggaaattcggaaattcgccatgaaagaaatgggcacccctgatgtgagaatcgatacccgccttaataaagccgtgtgggccaaaggcatcaggaatgtcccttaccgaatccgcgtcagactgtccagaaaacgtaatgaggacgaggactcaccaaataagctctatactctggtgacatatgtacccgtcaccacgtttaagaatcttcagactgtgaatgtggacgaaaactag

SEQ ID NO: 17969 - DNA, 817 bp, Artificial Sequence
  derived and/or modified sequence
ctttccaacttggacgctgcagaatggctcccgcaaagaagggtggcgagaagaaaaagggccgttctgccatcaacgaagtggtaacccgagaatacaccatcaacattcacaagcgcatccatggagtgggcttcaagaagcgtgcacctcgggcactcaaagagattcggaaatttgccatgaaggagatgggaactccagatgtgcgcattgacaccaggctcaacaaagctgtctgggccaaaggaataaggaatgtgccataccgaatccgtgtgcggctgtccagaaaacgtaatgaggatgaagattcaccaaataagctatatactttggttacctatgtacctgttaccactttcaaaagtcttcaaaacgatgatctcttcaaaacagattgtcaccatcagtgagaaaccgaacaagaagaggaaagcaaatggcattttcttctctacttggtgaaaagtcattatagaggattcgaacggttccaatgctcgcaattctacttcaagcatgtgctcattctacatatcaacccctttttcactgacaaatgtaatgttgacaatctaggctaatgggactagattttgaatccaatcaacactttttcatataaagttttcagaataacaaagctttccctcattcatacagatattgctgtactaatctataattatgttttagaattcaaattataacactgactaaacatcactaatgaaacatttgtgacctccttttttccgaagtttaatttttgctttgaattcatattttatcagtatgtgttaatataatgtca

SEQ ID NO: 17970 - DNA, 770 bp, Artificial Sequence
  derived and/or modified sequence
ctttccaacttggacgctgcagaatggctcccgcaaagaagggtggcgagaagaaaaagggccgttctgccatcaacgaagtggtaacccgagaatacaccatcaacattcacaagcgcatccatggagtgggcttcaagaagcgtgcacctcgggcactcaaagagattcggaaatttgccatgaaggagatgggaactccagatgtgcgcattgacaccaggctcaacaaagctgtctgggccaaaggaataaggaatgtgccataccgaatccgtgtgcggctgtccagaaaacgtaatgaggatgaagattcaccaaataagctatatactttggttacctatgtacctgttaccactttcaaaaattgtcaccatcagtgagaaaccgaacaagaagaggaaagcaaatggcattttcttctctacttggtgaaaagtcattatagaggattcgaacggttccaatgctcgcaattctacttcaagcatgtgctcattctacatatcaacccctttttcactgacaaatgtaatgttgacaatctaggctaatgggactagattttgaatccaatcaacactttttcatataaagttttcagaataacaaagctttccctcattcatacagatattgctgtactaatctataattatgttttagaattcaaattataacactgactaaacatcactaatgaaacatttgtgacctccttttttccgaagtttaatttttgctttgaattcatattttatcagtat

SEQ ID NO: 17971 - DNA, 825 bp, Artificial Sequence
  derived and/or modified sequence
ctttccaacttggacgctgcagagtgagtatgggtggcggagtctgggctcctggaatccagccccatcctcctttgggattgtgctaactgggaccgcaaaatctctcccgagccagcccggggctccggttgtggggagatgggaatacaccctgcttttaaaggctcccagagcctgaggaagaaagtgaccaggcttaggggagccggagcggcagggatttccgggtcggaggcatctgaggggcgcaggggcgcgggtgcgtgggccactgggtgaccgacttagcctggccagactctcagcacctggaagcgccccgagagtgacagcgtgaggctgggagggaggacttggcttgagcttgttaaactctgctctgagcctccttgtcgcctgcatttagatggctcccgcaaagaagggtggcgagaagaaaaagggccgttctgccatcaacgaagtggtaacccgagaatacaccatcaacattcacaagcgcatccatggagtgggcttcaagaagcgtgcacctcgggcactcaaagagattcggaaatttgccatgaaggagatgggaactccagatgtgcgcattgacaccaggctcaacaaagctgtctgggccaaaggaataaggaatgtgccataccgaatccgtgtgcggctgtccagaaaacgtaatgaggatgaagattcaccaaataagctatatactttggttacctatgtacctgttaccactttcaaaaatctacagacagtcaatgtggatgagaactaatcgctgatcgtcagatcaaataaagttataaaattgcc

SEQ ID NO: 17972 - DNA, 378 bp, Artificial Sequence
  derived and/or modified sequence
atggcccctgcaaaaaagggaggagagaaaaaaaaaggcagatctgcaatcaatgaggttgtgactagagaatatacaatcaatatccacaagagaattcacggagtcgggttcaagaaacgcgcaccgagagcgttgaaggagatccgtaaatttgctatgaaagagatgggaacccctgacgtgcgaatcgacacacggttgaacaaggcagtgtgggcgaagggtatccggaatgtgccttaccgcattcgtgtacggctgagtaggaaaagaaacgaggatgaagattcaccaaacaagctgtataccctcgtgacctacgttcccgtgaccacattcaaaaatctgcagacggtaaatgtcgacgagaattag

SEQ ID NO: 17973 - DNA, 393 bp, Artificial Sequence
  derived and/or modified sequence
atggcgcctgctaagaaaggcggagagaagaaaaagggcagatccgccatcaacgaggttgtcactagagaatacaccatcaatatacacaagagaattcacggcgtagggtttaaaaaacgcgcaccacgcgctctgaaggagatcagaaaatttgccatgaaagagatgggcaccccggacgtacgcattgatactaggctgaacaaggctgtgtgggcaaaggggattagaaacgtgccataccggatccgcgtgagattgtcacggaagaggaatgaggatgaagatagtccaaataaattatatacactagtgacatacgttcctgtgacaacgtttaaaagcttacagaacgatgacctgtttaaaactgattgccaccaccagtag

SEQ ID NO: 17974 - DNA, 363 bp, Artificial Sequence
  derived and/or modified sequence
atggcccctgccaaaaagggaggggaaaaaaagaaaggacgcagcgccatcaatgaggtagtgacgcgggagtatactataaacatacacaagcgtattcatggcgtggggtttaagaaaagagcccctcgcgctttaaaagagatcaggaagttcgcaatgaaagaaatgggcaccccagacgttagaatcgataccagactaaacaaagcagtgtgggccaaaggcatccggaatgtgccttataggattcgtgtgcgcctgagtagaaagcggaatgaggatgaagattcccctaacaaactctataccttagtgacctatgtgccagtgaccacttttaaaaattgccaccatcagtag

SEQ ID NO: 17975 - DNA, 378 bp, Artificial Sequence
  derived and/or modified sequence
atggcccctgcaaagaagggaggggagaagaagaagggccgtagcgccattaacgaggtagtgacgcgggagtacaccattaacattcacaagcgcatacacggggtcggctttaaaaaacgagctccccgagcccttaaggagatccgcaaatttgcaatgaaggagatgggcacaccggacgtgaggatcgacactaggctgaataaagccgtctgggccaaaggtattcggaatgtgccatatcgcatcagggtgcggctgtcccgaaaaaggaacgaggatgaggatagtccaaataagttatatactctcgtgacttatgtgcctgttacgacatttaaaaatctgcaaacagtgaacgttgatgagaactag

SEQ ID NO: 17976 - DNA, 1865 bp, Artificial Sequence
  derived and/or modified sequence
ctcagatctccctgtcgtgtcatctcacatctgtcatctctcaggtcatatccaacacactgggccacccacgcacagggacgacgcgacagccctgtggctccaccgcacaggacagccacgactggcaatcctgtgccggccctgctcgacgcaagcacctccagcgccgggttgcgtcttagtgaccctgggaccgccagccaggcaccgcgcccgacgcaggctcagtcagtgttggtcggatgcatgaatgaatgggaaaaacgaagtctctctctccctggccctgctcccatacatctgtaggcctaggtcttggttttatccgaagacttagagaagggacgcaagttccttcgcggagccagaaggaatccgtcgagaagcgggacctcaagctcgcggcccaaaagcgcggccccgccacgacgcctgctagctggccccacttcggcgcgcgccgcttacatcatagctcgcctctccccttccctagccacacccccttgcctggcgacccggaagttgtacttgcaactgcggctttccttctcccacaatccttcgcgctcttcctttccaacttggacgctgcagaatggctcccgcaaagaagggtggcgagaagaaaaagggccgttctgccatcaacgaagtggtaacccgagaatacaccatcaacattcacaagcgcatccatggagtgggcttcaagaagcgtgcacctcgggcactcaaagagattcggaaatttgccatgaaggagatgggaactccagatgtgcgcattgacaccaggctcaacaaagctgtctgggccaaaggaataaggaatgtgccataccgaatccgtgtgcggctgtccagaaaacgtaatgaggatgaagattcaccaaataagctatatactttggttacctatgtacctgttaccactttcaaaaatctacagacagtcaatgtggatgagaactaatcgctgatcgtcagatcaaataaagttataaaattgccttcatgtttttgttctttttagttgcaacataatgtacttgtataccctatcctaattatgggatcatttgaagagcttttcccaaattgatggcctgtgctgccttctccccatcccctggggttttaaagtgatttcaaactgcaacctagttttagaaccactgttctgggtagttgggatactgaaggcatattgttaattattctacttgtatgttttgctaattctaagataagcatttttccagaaaccaggatgtagaatccagttgccattgacatcttaacattttaggaaacaactttaaaatgatatactatctatctatctatctgtagcatcttaaaggtaatgaaattaatgtggcagtaggtcttttaagcttctgcctacatccatattgagtatagttgttgtcttctaaaataattaattgatttttggtgagataaccagattcatattttaagccttttgtaatggccccgtggtacctggagtcaaggttcagaagtaaaaagttccttaaggtatcaataacaaaaatttgtattaatagttcagtcctaaagcagtgttgctgagattatgtttcaccagcatttacaagctgtatgttaaatgctgccataaagaggtctctgaagccgtagggcacacccaaggcagggctgagaagtacctagtagtgttgcaccacccaaaaaccatggatgggcagcagcaacatctccagcttacccattcactgccacagtctacagcttaagacacttaactacaaggtaaaagaaaaggaccaagtaaatacaaaaagtttcttattaaaaaacttggaagccaa

SEQ ID NO: 17977 - DNA, 378 bp, Artificial Sequence
  derived and/or modified sequence
atggcccccgccaagaagggcggcgagaagaagaagggcagaagcgccatcaacgaggtggtgaccagagagtacaccatcaacatccacaagagaatccacggcgtgggcttcaagaagagagcccccagagccctgaaggagatcagaaagttcgccatgaaggagatgggcacccccgacgtgagaatcgacaccagactgaacaaggccgtgtgggccaagggcatcagaaacgtgccctacagaatcagagtgagactgagcagaaagagaaacgaggacgaggacagccccaacaagctgtacaccctggtgacctacgtgcccgtgaccaccttcaagaacctgcagaccgtgaacgtggacgagaactag

SEQ ID NO: 17978 - protein, 68 aa, Artificial Sequence
  derived and/or modified sequence
MVKKIEISQHAKYTCSFCGKTKMKRRAVGIWHCGSCMKTVAGGAWTYNTTSAVTVKSAIRRLKELKDQ

SEQ ID NO: 17979 - protein, 92 aa, Artificial Sequence [sequence omitted]

SEQ ID NO: 17980 - DNA, 207 bp, Artificial Sequence
  derived and/or modified sequence
atggtaaaaaaaatagagatttctcagcacgccaagtacacctgttcgttttgtggtaaaacgaagatgaagaggagggctgtcgggatttggcactgtggctcttgcatgaagactgtcgcaggaggtgcttggacatataacactacctccgccgtgacagtgaagtcagccattagacgtctcaaggagctgaaggaccagtag

SEQ ID NO: 17981 - DNA, 279 bp, Artificial Sequence
  derived and/or modified sequence
atggcgaaacgaactaaaaaagttgggatcgtggggaagtacggcacccgctacggtgctagtctccgtaaaatggtcaagaaaatcgaaatttcacagcacgctaaatacacatgctccttctgcgggaagaccaaaatgaagaggagagccgtcgggatatggcactgcggctcatgtatgaagaccgtcgcaggcggcgcttggacatacaatactacaagtgccgttacggttaagtcggccatccggcggctgaaggaattaaaggatcagtag

SEQ ID NO: 17982 - DNA, 207 bp, Artificial Sequence
  derived and/or modified sequence
atggtgaagaagattgagatcagccagcacgccaagtacacctgcagcttctgtgggaagaccaagatgaagagaagagctgtgggcatctggcactgcggcagctgcatgaagacagtggccggcggggcctggacctacaacaccaccagcgctgtgacagtgaagagcgccatccggcggctgaaggagctgaaggaccagtag

SEQ ID NO: 17983 - DNA, 279 bp, Artificial Sequence
  derived and/or modified sequence
atggccaagaggaccaagaaggtgggcatcgtgggcaagtatggcacccgctacggggccagcctgaggaagatggtgaagaagattgagatcagccagcacgccaagtacacctgcagcttctgtgggaagaccaagatgaagagaagagctgtgggcatctggcactgcggcagctgcatgaagacagtggccggcggggcctggacctacaacaccaccagcgctgtgacagtgaagagcgccatccggcggctgaaggagctgaaggaccagtag

SEQ ID NO: 17984 - DNA, 207 bp, Artificial Sequence
  derived and/or modified sequence
atggtgaagaagatcgagatcagccagcacgccaagtacacctgctctttttgtggaaaaacgaaaatgaaacggagagctgtgggaatatggcactgcggttcctgtatgaagaccgtggcaggcggggcttggacctataatacaacatctgcagtgactgtaaagtctgctatccggcggctcaaggagttgaaggaccaatag

SEQ ID NO: 17985 - DNA, 279 bp, Artificial Sequence
  derived and/or modified sequence
atggccaagcggaccaagaaggtgggcatcgtgggcaagtacggcacacggtatggggccagcctaaggaaaatggtcaagaaaatcgagatttctcagcacgccaagtacacatgctccttctgtggtaagacaaagatgaagaggagagctgtaggtatctggcattgcggctcctgtatgaagacagttgctggaggcgcttggacctacaataccacatccgctgtgaccgttaaatcagctatcagaaggttaaaagagcttaaagatcaatag

SEQ ID NO: 17986 - DNA, 207 bp, Artificial Sequence
  derived and/or modified sequence
atggtgaagaagatcgagattagccagcacgccaagtatacatgctccttttgtggtaagacaaagatgaagaggagagctgtgggcatctggcattgcggctcatgtatgaagacggtggcgggtggcgcatggacttataatacaacgagcgcagtcaccgttaaatccgccatccgccgactcaaagagcttaaggatcagtag

SEQ ID NO: 17987 - DNA, 279 bp, Artificial Sequence
  derived and/or modified sequence
atggctaagaggaccaagaaagtgggcatagtgggaaagtacggtacaaggtacggtgcttctctccggaaaatggtgaagaaaatcgaaatcagccagcatgctaagtacacctgcagcttttgtggtaagaccaagatgaagcgtagagcagtcgggatctggcattgtggcagctgcatgaagaccgtggctggtggcgcttggacatacaatacaaccagcgccgtgaccgtgaaaagcgccattcggaggctaaaggagctaaaggatcagtag

SEQ ID NO: 17988 - DNA, 401 bp, Artificial Sequence
  derived and/or modified sequence
gggccttcggagcgcgcggccagccctgggcactggtttcgttgggttgaatttagggaaaactaggccaaacgtaccaagaaagtcgggatcgtcggtaaatacgggacccgctatggggcctccctccggaaaatggtgaagaaaattgaaatcagccagcacgccaagtacacttgctctttctgtggcaaaaccaagatgaagagacgagctgtggggatctggcactgtggttcctgcatgaagacagtggctggcggtgcctggacgtacaataccacttccgctgtcacggtaaagtccgccatcagaagactgaaggagttgaaagaccagtagacgctcctctactctttgagacatcactggcctataataaatgggttaatttatgtaac

SEQ ID NO: 17989 - DNA, 3112 bp, Artificial Sequence
  derived and/or modified sequence
gactttcctcaggaaacaccaggctcttctgaattagtcgcgagcagaaccatcgtcctttccttcagaactctgaccagtttgaaactgtctaacttcttaatgtggctatatgatcgtttgcagctggcctgcaacttgttctgggaatggaaccttggattttagtcaccactgtcgctagcatcctgcacagtcagccacttttagagagcataatgcagagggggaaataaatgagatttggaatagagacggggtttcaccctgctggccaggctggtctcgaactcctgacccaccccgcctcccaaagtgttagaatcacaagcgtgagccaccgcgcccggccccacaaatgtaagatttatgcacttctccaagccaagtgctgtgcatcgaatggaggaactcgtacctttgcaggattttgtgatatatgtgaaataatccggacatgcttctgctatggttgtttgtcgccatagtttgcgaatctgggtaaacctggatgagagagacgccttacaattgcaaacatttctcaggaggccgcctgaaaacgcccaaaccatagagctcagttcctagctaggcctctaccagccacttccgctcgtccgcctaataccgcgcctgcgcaccgcgtctcttcctttctgggctcggacctaggtcgcggcgacatggccaaacgtaccaagaaagtcgggatcgtcggtaaatacgggacccgctatggggcctccctccggaaaatggtgaagaaaattgaaatcagccagcacgccaagtacacttgctctttctgtggcaaaaccaagatgaagagacgagctgtggggatctggcactgtggttcctgcatgaagacagtggctggcggtgcctggacgtacaataccacttccgctgtcacggtaaagtccgccatcagaagactgaaggagttgaaagaccagtagacgctcctctactctttgagacatcactggcctataataaatgggttaatttatgtaacaaaattgccttggcttgttaactttattagacattctgatgtttgcattgtgtaaatactgttgtattggaaaagcatgccaagatggattattgtaattcagtgtcttttttagtagtcaaatggtaaaatgcagcataagaatataagtcttccaagttagatatgagtgttagctttttataagtctgctcctgccagtttgactttgagatacattggagccaactgtaaactttagtttttaaattacagttagtttttttgtttgtttttgaggcggagtctctgttacccaggctggagtgcagtataccagtcttggcccacttcaacctccacttcttaggttcaagcgattctcctgcctcagcctcctgagtagctgggattacaggcacgcaccaccatacctggctaatttttgtattttgagtagagatggagttttcaccacattggccaggctgttcttgaactgacctcaagcgatccacctgccttggccttccagagtgctgggattacaggtgtgagccaccacgcccagccttgcatttaatatttttataatgtgtctaggctgggtgcggtgactcacgcctgaaatcccagcactttgggtggctgaggcaggtggattacttgaggccaggagattgagaccagtgtggccaacatagcaaaaacccgtctcgacgaaaaatacaaaaaatagcttggtatggtggcacatgcctgtaatcccagctactttggaggctcaggcacaagaatcacttgaacctacgaggcggaggttgcagtgggccaggatcgtgccactgcactttatttagccaggacaacactctgtctccaaaaaaaagtttctgaaggtaaaagatatactaaaggatatacatatactgcctcttctatgatgtttcatttgacctacaccatcagcatcttcaggaaacagtatgaaactaatttcacattaaatgttgcaaacgtctgcaattctccagtttttagtttgcacgtaaggattcgtaggattgatttcagattgacagatggttgtagtaacaaaaaaatgaattgccttggagaattcgagttattttaggcctgcctttgacacttttatgcacttaattcactgccaatttagtctaactcctcaaccatctgtggtatggacttctcagtcctcctaattggtatgtcttttatctatcccagagtcagtagtcctttaaggatgcaaatttaattcgataagaatgtggatttacttcatctttaggacagagtaaaaacctttatttcacttggtctgacccctatcttctataacttgtttttttgctcattactggcctttgcacggatgtctcccttcacctgtacctcctgcattgcctctggcagaaacatcgctaccccaggagaatacttcactgggtcaggcatttgctagatccatagcagtaactcatctgtggatctcatttgtgtcacaaaatggtactcctactgattttgtaatgtgaagcaagtactgtgggtcagtaggggtaggaccaggagtgacaagtcaggattttcaggcttcataggaatgacacagctctccaggtgaatctcctggagaattctccataggatctccaggtgagtgaccaggatttcatgtaagcatagggaattgaatgagcattagatggtctaatgctgcggttaagaacaccaacttagccaaactgcctagatagttgggtgacttgggttaagtgacttaacctctctgcttcagtttcctgtataattcttggtagtagaatggagtatatgctgggtgtttggattattaatttggagtcttacaaagctgctatgttacatgattaggcatggaaaacttcggtttttataatcagtgaagtactgctttttgtttgttttctgagagagtgtctgtcacccaggctgaagtgcagtggcatgatctcagttcactgcagcctctacctcccgggttcaagcagttctcgtgcctcagcctccgaagtagctgggattacaggcttatgccacaaa

SEQ ID NO: 17990 - DNA, 207 bp, Artificial Sequence
  derived and/or modified sequence
atggtgaagaagatcgagatcagccagcacgccaagtacacctgcagcttctgcggcaagaccaagatgaagagaagagccgtgggcatctggcactgcggcagctgcatgaagaccgtggccggcggcgcctggacctacaacaccaccagcgccgtgaccgtgaagagcgccatcagaagactgaaggagctgaaggaccagtag

SEQ ID NO: 17991 - DNA, 279 bp, Artificial Sequence
  derived and/or modified sequence
atggccaagagaaccaagaaggtgggcatcgtgggcaagtacggcaccagatacggcgccagcctgagaaagatggtgaagaagatcgagatcagccagcacgccaagtacacctgcagcttctgcggcaagaccaagatgaagagaagagccgtgggcatctggcactgcggcagctgcatgaagaccgtggccggcggcgcctggacctacaacaccaccagcgccgtgaccgtgaagagcgccatcagaagactgaaggagctgaaggaccagtag

SEQ ID NO: 17992 - protein, 70 aa, Artificial Sequence [sequence omitted]

SEQ ID NO: 17993 - DNA, 213 bp, Artificial Sequence
  derived and/or modified sequence
atgccgcggaaaatcgaggaaatcaaggacttcttactcaccgctcgcagaaaagatgccaagtccgtgaaaatcaaaaaaaataaggataatgtgaagttcaaagtgaggtgtagcaggtacctatacactctggtgattacggataaggaaaaggccgagaaattaaagcagagcctgcccccgggtttagccgtcaaagaactgaaatag

SEQ ID NO: 17994 - DNA, 213 bp, Artificial Sequence
  derived and/or modified sequence
atgccaagaaagatcgaagagattaaggatttcttacttaccgcgcgacggaaagatgctaaatcagtcaagataaagaagaacaaggacaatgtgaagttcaaagtccgctgctcccgttatttgtatacactcgtaatcaccgacaaggagaaagccgagaaattgaaacagtcattgccgccagggctggccgtcaaagaactcaagtag

SEQ ID NO: 17995 - DNA, 213 bp, Artificial Sequence
  derived and/or modified sequence
atgccccgtaaaatcgaggaaattaaagattttctcctgacagctaggcgaaaggacgctaaatctgtgaaaatcaagaaaaataaagacaacgtgaagttcaaggtcaggtgcagccgctacctatataccttggtcataaccgataaggaaaaggccgagaaactgaagcagagccttccacccggtctcgcagttaaagagctcaagtag

SEQ ID NO: 17996 - DNA, 213 bp, Artificial Sequence
  derived and/or modified sequence
atgcccaggaagattgaggagatcaaggacttcctgctgacagcccggaggaaggatgccaagtctgtgaagatcaagaagaacaaggacaacgtgaagttcaaggtgcgctgcagccgctacctgtacaccctggtgatcacagacaaggagaaggccgagaagctgaagcagagcctgcccccaggcctggccgtgaaggagctgaagtag

SEQ ID NO: 17997 - DNA, 213 bp, Artificial Sequence
  derived and/or modified sequence
atgccccggaagatcgaggagatcaaggacttcctgctgaccgccaggaggaaagatgccaaaagcgtgaaaataaagaagaataaggataatgttaaattcaaggtgcgatgtagccggtatttgtatactctggttataaccgataaagagaaagccgagaaactgaaacagtcactaccaccaggtttggcggtgaaggaactcaagtag

SEQ ID NO: 17998 - DNA, 213 bp, Artificial Sequence
  derived and/or modified sequence
atgccccggaagatcgaggagatcaaggacttcctgctgaccgccagaaggaaggatgctaagtcagtaaagattaaaaagaacaaagataacgtgaaattcaaagtgcgttgttcaagatacctatacacccttgtgatcaccgataaggagaaggctgagaagctgaagcagagtctgccaccaggcctggctgttaaggaactgaaatag

SEQ ID NO: 17999 - DNA, 213 bp, Artificial Sequence
  derived and/or modified sequence
atgccccggaagatcgaggagatcaaggacttcctgctgaccgccaggcggaaagatgctaaatctgtcaagatcaaaaagaataaggataacgtcaaatttaaagtccgctgcagccgctatttgtatacactcgtaatcacggataaggagaaggccgaaaagctaaagcagagcctccctccaggcctggcggtgaaggaactgaaatag

SEQ ID NO: 18000 - DNA, 213 bp, Artificial Sequence
  derived and/or modified sequence
atgcccaggaagatagaagaaattaaggatttcctgctcaccgcccgacgaaaggacgcaaagagtgtaaagataaagaaaaataaggataatgtgaagttcaaagttcgctgtagccgctatctgtatacactggttatcaccgataaagaaaaagccgagaagttgaagcagagcctcccacctggtttggcggttaaggaactaaagtag

SEQ ID NO: 18001 - DNA, 213 bp, Artificial Sequence
  derived and/or modified sequence
atgcctagaaagattgaagaaattaaggacttcttgctcaccgccaggcgaaaggatgccaaaagtgtgaagattaaaaaaaacaaggacaatgtgaagtttaaggttcgatgttcccgttacttgtatacactcgtcatcacggataaggagaaggctgaaaagcttaagcagtcgctgccccctggcttggccgtgaaggagcttaaatag

SEQ ID NO: 18002 - DNA, 213 bp, Artificial Sequence
  derived and/or modified sequence
atgccccgaaaaatcgaagaaatcaaagatttcctgctaaccgccagacggaaagacgccaagtctgtgaagatcaagaagaacaaggacaatgttaagtttaaagtgagatgtagccgctacctatatacactggtcatcacagacaaggaaaaggccgaaaagctgaagcaatctttgccccctggcttagctgtgaaggaactcaaatag

SEQ ID NO: 18003 - DNA, 1052 bp, Artificial Sequence
  derived and/or modified sequence
actgcccggaaacggaagtctcgttctttttcgtccttttccccggttgctgcttgctgtgagtgtctctagggtgatacgtgggtgagaaaggtcctggtccgcgccagagcccagcgcgcctcgtcgccatgcctcggaaaattgaggaaatcaaggacttcctgctcacagcccgacgaaaggatgccaaatctgtcaagatcaagaaaaataaggacaacgtgaagtttaaagttcgatgcagcagatacctttacaccctggtcatcactgacaaagagaaggcagagaaactgaagcagtccctgccccccggtttggcagtgaaggaactgaaatgaaccagacacactgattggaactgtattatattaaaatactaaaaatcctaagtgtctttcgtctttgcggatgggaaagggaaaaatgctacctcgtagtggcttctgatgggaacaggacgcgggttctgttgctgccttcctgtgtctttttttttttttttttttctttctttgagacggagtcttgctctgtggctcatcctggagcacagtggtgcgatatcagctcactaccacctccgcctcctgggttcaagcgactgtcctgcctcagcctcccgagtggctgggattacaggcacacatcaccacgcctggccaatttttgtatttgtagtagagacagggtttcactgcctgcctcagcctcccatagtgctgggattacaggcatgagcctccgtgcccggtgcatccctaatcttgagcatgatctcagtcggcaaatgaggccatctgttttcagcctgtttgaaaataagatgtggggaggccatgatggaaatagcacgtggggttaaacataactggcagatgtgggagcgatggtggggcatgccattcaaacaggtcccaaaatgggtgcaacaaggtatagcacatctaccactcgctaacttgactgacttggagaaatgactacacttttgcctgtttcctcagttggaaaatagccatattaacacctctttcattggcttgctg

SEQ ID NO: 18004 - DNA, 431 bp, Artificial Sequence
  derived and/or modified sequence
agtgcgaacgcctacatgagtcttgatcctcggcaggcaccgtacccagtttcctccgttgggagggtttaactgcccggaaacggaagtctcgttctttttcgtccttttccccggttgctgcttgctgtcctggtccgcgccagagcccagcgcgcctcgtcgccatgcctcggaaaattgaggaaatcaaggacttcctgctcacagcccgacgaaaggatgccaaatctgtcaagatcaagaaaaataaggacaacgtgaagtttaaagttcgatgcagcagatacctttacaccctggtcatcactgacaaagagaaggcagagaaactgaagcagtccctgccccccggtttggcagtgaaggaactgaaatgaaccagacacactgattggaactgtattatattaaaatactaaaaatcctaa

SEQ ID NO: 18005 - DNA, 532 bp, Artificial Sequence
  derived and/or modified sequence
gcttgctgtgagtgtctctagggtgatacgtgggtgagaaaggtaatctggggcaatccactgccaggtgaaatctggggaccccaggtccgcgtggagggtgtcggggaggagaaggggagtgcgatggggccgatatttcgggggagagcgggaaaacggggttcgctgccagcccccgcgccgtgttaacgccgaggactgtttcccgcaggtcctggtccgcgccagagcccagcgcgcctcgtcgccatgcctcggaaaattgaggaaatcaaggacttcctgctcacagcccgacgaaaggatgccaaatctgtcaagatcaagaaaaataaggacaacgtgaagtttaaagttcgatgcagcagatacctttacaccctggtcatcactgacaaagagaaggcagagaaactgaagcagtccctgccccccggtttggcagtgaaggaactgaaatgaaccagacacactgattggaactgtattatattaaaatactaaaaatcctaagtgtctttcgtctttg

SEQ ID NO: 18006 - DNA, 213 bp, Artificial Sequence
  derived and/or modified sequence
atgcccagaaagatcgaggagatcaaggacttcctgctgaccgccagaagaaaggacgccaagagcgtgaagatcaagaagaacaaggacaacgtgaagttcaaggtgagatgcagcagatacctgtacaccctggtgatcaccgacaaggagaaggccgagaagctgaagcagagcctgccccccggcctggccgtgaaggagctgaagtag

SEQ ID NO: 18007 - protein, 51 aa, Artificial Sequence [sequence omitted]

SEQ ID NO: 18008 - DNA, 156 bp, Artificial Sequence
  derived and/or modified sequence
atgagcagccacaagaccttcagaatcaagagattcctggccaagaagcagaagcagaacagacccatcccccagtggatcagaatgaagaccggcaacaagatcagatacaacagcaagagaagacactggagaagaaccaagctgggcctgtag

SEQ ID NO: 18009 - DNA, 156 bp, Artificial Sequence
  derived and/or modified sequence
atgagcagtcataagacatttcggataaaaagatttctcgcaaagaagcaaaaacagaaccgacctataccacagtggatccgtatgaaaacaggaaataagatcaggtataactctaagagacggcattggcgcaggacgaagctgggtctttag

SEQ ID NO: 18010 - DNA, 401 bp, Artificial Sequence
  derived and/or modified sequence
cttccgccagcttccctcctcttcctttctccgccatcgtggtgtgttcttgactccgctgctcgccatgtcttctcacaagactttcaggattaagcgattcctggccaagaaacaaaagcaaaatcgtcccattccccagtggattcggatgaaaactggaaataaaatcaggtacaactccaaaaggagacattggagaagaaccaagctgggtctataaggaattgcacatgagatggcacacatatttatgctgtctgaaggtcacgatcatgttaccatatcaagctgaaaatgtcaccactatctggagatttcgacgtgttttcctctctgaatctgttatgaacacgttggttggctggattcagtaataaatatgtaaggcctttcttttt

SEQ ID NO: 18011 - DNA, 156 bp, Artificial Sequence
  derived and/or modified sequence
atgagcagccacaagaccttccgcatcaagcgcttcctggccaagaagcagaagcagaaccggcccatcccccagtggatccgcatgaagacaggcaacaagatccgctacaacagcaagagaagacactggaggaggaccaagctgggcctgtag

SEQ ID NO: 18012 - DNA, 156 bp, Artificial Sequence
  derived and/or modified sequence
atgagcagccacaagaccttccggatcaagcggttcctggccaagaaacagaagcagaacagacccattccccagtggattagaatgaagaccggaaataaaatccgctacaattcaaaaaggagacactggcgccggacaaagctcggactgtag

SEQ ID NO: 18013 - DNA, 156 bp, Artificial Sequence
  derived and/or modified sequence
atgagttctcacaaaacatttcggattaaacgattcctggcaaaaaaacagaagcaaaaccgtcctattccccaatggattcgcatgaaaacagggaataaaattaggtacaacagtaagcgacgtcactggcgacggaccaagttaggtctctag

SEQ ID NO: 18014 - DNA, 321 bp, Artificial Sequence
  derived and/or modified sequence
atggtgaacgttcctaagacccggaggaccttttgtaaaaagtgtggcaagcaccaaccccataaggtaacacagtacaaaaaggggaaagactcgctatatgcgcaggggaagagaagatacgaccggaaacagagtggatacggaggacagaccaaacctatttttcgtaagaaagctaaaacaacaaaaaagatagtgcttcgattagaatgcgtcgagccgaactgtcggagtaaacggatgctcgctataaagcgctgcaaacattttgagctcggtggcgacaagaagcgcaagggacaagtaattcagttttag

SEQ ID NO: 18015 - DNA, 321 bp, Artificial Sequence
  derived and/or modified sequence
atggtgaacgtccccaagacgcgtcgcaccttctgcaaaaaatgtggcaaacaccagccccataaagtgactcagtacaagaaaggtaaggactctctttacgcccaaggcagaagaaggtacgacaggaagcaaagcggctacgggggccagacaaagccaatctttcggaagaaagccaaaacaactaagaaaatcgtgctgaggctcgaatgtgtggagcccaattgccggagtaaacgcatgcttgctataaaacggtgcaaacatttcgaattggggggcgacaagaaacggaaaggacaggtcatccagttttag

SEQ ID NO: 18016 - DNA, 321 bp, Artificial Sequence
  derived and/or modified sequence
atggtgaatgtgcccaagaccaggaggaccttctgcaagaagtgtgggaagcaccagccccacaaggtgacccagtacaagaagggcaaggacagcctgtatgcccagggcaagagaagatatgacaggaagcagagcggctacggcggccagaccaagcccatcttcaggaagaaggccaagaccaccaagaagatcgtgctgcggctggagtgtgtggagcccaactgccgcagcaagaggatgctggccatcaagcgctgcaagcactttgagctgggcggggacaagaagaggaagggccaggtgatccagttctag

SEQ ID NO: 18017 - DNA, 321 bp, Artificial Sequence
  derived and/or modified sequence
atggtgaatgtgcccaagaccaggaggaccttctgcaagaagtgtgggaagcaccagccccacaaggtgacccagtacaagaagggcaaggacagcctgtatgcccagggcagaagaagatatgacaggaagcagagcggctacggcggccagaccaagcccatcttcaggaagaaggccaagaccaccaagaagatcgtgctgcggctggagtgtgtggagcccaactgccgcagcaagaggatgctggccatcaagcgctgcaagcactttgagctgggcggggacaagaagaggaagggccaggtgatccagttctag

SEQ ID NO: 18018 - DNA, 321 bp, Artificial Sequence
  derived and/or modified sequence
atggtgaacgtgcccaagacccggcggaccttctgcaagaagtgcgggaaacatcagcctcacaaggtcacacagtataaaaaagggaaggactctttatacgcacaggggaagaggcggtacgaccgcaagcagagcggctatggcggccagacgaagcctatctttaggaagaaagctaaaaccaccaaaaagatcgtgttgcggcttgagtgcgtggaaccaaactgccgaagcaaacgtatgcttgccatcaagagatgcaaacacttcgagctaggaggagacaaaaaaagaaaaggccaagtgattcagttctag

SEQ ID NO: 18019 - DNA, 321 bp, Artificial Sequence
  derived and/or modified sequence
atggtgaacgtgcccaagacccggcggaccttctgcaagaagtgcgggaagcatcagccacataaggtgacccaatacaaaaaaggaaaagattcactttatgcacaaggccggagacgatacgaccgcaagcaaagtgggtacggaggccagaccaaacctatctttcggaagaaagctaagacaactaagaagattgtgttgagattggagtgcgtcgagccaaactgtagatccaaacggatgctggctattaaacgctgcaaacacttcgagctggggggggataagaaaaggaagggccaggtgatccaattttag

SEQ ID NO: 18020 - DNA, 321 bp, Artificial Sequence
  derived and/or modified sequence
atggtaaacgtgcctaagaccaggcgcacattttgcaagaaatgtggcaaacaccagccacataaagtgactcaatataagaaagggaaagactctctgtatgcccagggcaagcgcaggtacgaccggaagcagagcggctacggcggacaaaccaaacctattttccgcaaaaaggctaagacgactaaaaagattgttcttcgcttagagtgtgtcgaacccaactgtcggtctaagcggatgctggctattaagagatgcaagcactttgagctgggcggagacaagaagaggaaaggccaggtaatccagttttag

SEQ ID NO: 18021 - DNA, 321 bp, Artificial Sequence
  derived and/or modified sequence
atggttaacgtgcccaagacgcgccgtaccttctgcaaaaagtgcggaaagcaccagccccacaaagtgacccagtataaaaaaggaaaagattctctttacgctcaggggagacgcagatatgatcgtaagcagtcgggctacggaggccagaccaagccaattttccggaaaaaagccaaaacgaccaagaagatcgttctgcgtttggagtgcgtcgaacccaattgtagatccaagcgcatgcttgccatcaaaagatgtaagcacttcgaactgggcggagacaagaaaagaaagggacaggtgatccagttctag

SEQ ID NO: 18022 - DNA, 321 bp, Artificial Sequence
  derived and/or modified sequence
atggtgaacgtgcccaagaccagaagaaccttctgcaagaagtgcggcaagcaccagccccacaaggtgacccagtacaagaagggcaaggacagcctgtacgcccagggcaagagaagatacgacagaaagcagagcggctacggcggccagaccaagcccatcttcagaaagaaggccaagaccaccaagaagatcgtgctgagactggagtgcgtggagcccaactgcagaagcaagagaatgctggccatcaagagatgcaagcacttcgagctgggcggcgacaagaagagaaagggccaggtgatccagttctag

SEQ ID NO: 18023 - DNA, 321 bp, Artificial Sequence
  derived and/or modified sequence
atggtgaacgtgcccaagaccagaagaaccttctgcaagaagtgcggcaagcaccagccccacaaggtgacccagtacaagaagggcaaggacagcctgtacgcccagggcagaagaagatacgacagaaagcagagcggctacggcggccagaccaagcccatcttcagaaagaaggccaagaccaccaagaagatcgtgctgagactggagtgcgtggagcccaactgcagaagcaagagaatgctggccatcaagagatgcaagcacttcgagctgggcggcgacaagaagagaaagggccaggtgatccagttctag

SEQ ID NO: 18024 - protein, 317 aa, Artificial Sequence
  derived and/or modified sequence
MPREDRATWKSNYFLKIIQLLDDYPKCFIVGADNVGSKQMQQIRMSLRGKAVVLMGKNTMMRKAIRGHLENNPALEKLLPHIRGNVGFVFTKEDLTEIRDMLLANKVPAAARAGAIAPCEVTVPAQNTGLGPEKTSFFQALGITTKISRGTIEILSDVQLIKTGDKVGASEATLLNMLNISPFSFGLVIQQVFDNGSIYNPEVLDITEETLHSRFLEGVRNVASVCLQIGYPTVASVPHSIINGYKRVLALSVETDYTFPLAEKVKAFLADPSAFVAAAPVAAATTAAPAAAAAPAKVEAKEESEESDEDMGFGLFD

SEQ ID NO: 18025 - protein, 255 aa, Artificial Sequence
  derived and/or modified sequence
MPREDRATWKSNYFLKIIQLLDDYPKCFIVGADNVGSKQMQQIRMSLRGKAVVLMGKNTMMRKAIRGHLENNPALEKLLPHIRGNVGFVFTKEDLTEIRDMLLANKVPAAARAGAIAPCEVTVPAQNTGLGPEKTSFFQALGITTKISRGTIEILGVRNVASVCLQIGYPTVASVPHSIINGYKRVLALSVETDYTFPLAEKVKAFLADPSAFVAAAPVAAATTAAPAAAAAPAKVEAKEESEESDEDMGFGLFD

SEQ ID NO: 18026 - DNA, 954 bp, Artificial Sequence
  derived and/or modified sequence
atgcccagagaggacagagccacctggaagagcaactacttcctgaagatcatccagctgctggacgactaccccaagtgcttcatcgtgggcgccgacaacgtgggcagcaagcagatgcagcagatcagaatgagcctgagaggcaaggccgtggtgctgatgggcaagaacaccatgatgagaaaggccatcagaggccacctggagaacaaccccgccctggagaagctgctgccccacatcagaggcaacgtgggcttcgtgttcaccaaggaggacctgaccgagatcagagacatgctgctggccaacaaggtgcccgccgccgccagagccggcgccatcgccccctgcgaggtgaccgtgcccgcccagaacaccggcctgggccccgagaagaccagcttcttccaggccctgggcatcaccaccaagatcagcagaggcaccatcgagatcctgagcgacgtgcagctgatcaagaccggcgacaaggtgggcgccagcgaggccaccctgctgaacatgctgaacatcagccccttcagcttcggcctggtgatccagcaggtgttcgacaacggcagcatctacaaccccgaggtgctggacatcaccgaggagaccctgcacagcagattcctggagggcgtgagaaacgtggccagcgtgtgcctgcagatcggctaccccaccgtggccagcgtgccccacagcatcatcaacggctacaagagagtgctggccctgagcgtggagaccgactacaccttccccctggccgagaaggtgaaggccttcctggccgaccccagcgccttcgtggccgccgcccccgtggccgccgccaccaccgccgcccccgccgccgccgccgcccccgccaaggtggaggccaaggaggagagcgaggagagcgacgaggacatgggcttcggcctgttcgactag

SEQ ID NO: 18027 - DNA, 954 bp, Artificial Sequence
  derived and/or modified sequence
atgccccgagaggaccgggctacatggaagtcgaattacttcctaaagatcattcagcttctcgatgattatcctaaatgttttatagtaggcgcagataacgtgggaagcaagcaaatgcagcaaatccggatgtcacttcggggcaaggctgtggtactgatgggaaagaatacgatgatgagaaaagccatccgcgggcacctggagaataatccggcccttgagaagctgctgccacacattagaggtaacgtgggattcgtttttacaaaagaggatttgaccgagattagggatatgctcttggcaaacaaggtgcccgctgcagccagggccggagccatcgccccttgtgaagtgaccgtacctgcacaaaataccggccttgggccggagaagacctcgttctttcaagcacttggaattaccaccaagataagccggggaaccatcgaaatccttagcgatgtgcagctgattaagacaggagacaaggtgggcgccagtgaagctaccttattaaacatgttgaatatcagccctttctcttttggcctcgtgatacagcaagtcttcgataacgggagcatatacaatccagaggtgctggatattactgaggaaactttacattcccgctttcttgagggtgtccggaatgtcgcgtctgtgtgcctccagatcggctacccaactgtcgctagcgtgccgcactccatcattaacggctacaaaagagtactggccctctctgttgaaactgattatacattcccactcgccgagaaggtgaaggcattcctggcagaccccagcgcctttgtggcggccgcccctgtcgcggcagctaccacagcggcacccgctgccgccgcggcgcctgccaaagttgaggcgaaggaagagtcggaggagtctgacgaggacatgggatttgggctgtttgattag

SEQ ID NO: 18028 - DNA, 954 bp, Artificial Sequence
  derived and/or modified sequence
atgccccgggaggaccgggccacctggaagagcaactacttcctgaagatcatccagctgctggatgactaccccaagtgcttcatcgtgggcgctgacaacgtgggcagcaagcagatgcagcagatccgcatgagcctgcggggcaaggctgtggtgctgatgggcaagaacaccatgatgaggaaggccatccggggccacctggagaacaacccagccctggagaagctgctgccccacatcagaggaaatgtgggctttgtgttcaccaaggaggacctgacagagatccgggacatgctgctggccaacaaggtgcctgctgctgcccgggccggggccatcgccccctgtgaggtgacagtgcctgcccagaacacaggcctgggccctgagaagaccagcttcttccaggccctgggcatcaccaccaagatcagccggggcaccatcgagatcctgagtgatgtgcagctgatcaagacaggagacaaggtgggcgccagcgaggccaccctgctgaacatgctgaacatcagccccttctcctttggcctggtgatccagcaggtgtttgacaatggcagcatctacaaccctgaggtgctggacatcacagaggagaccctgcacagccgcttcctggagggcgtgagaaatgtggcctctgtgtgcctgcagatcggctaccccaccgtggcctctgtgccccacagcatcatcaatggctacaagagggtgctggccctgtctgtggagacagactacaccttccccctggccgagaaggtgaaggccttcctggccgaccccagcgcctttgtggccgccgcccctgtggccgccgccaccacagctgccccagctgctgctgctgccccagccaaggtggaggccaaggaggagagcgaggagagtgatgaggacatgggcttcggcctgtttgattag

SEQ ID NO: 18029 - DNA, 954 bp, Artificial Sequence
  derived and/or modified sequence
atgccccgggaggaccgggccacctggaagagcaactacttcctgaagatcatccagttactggacgattacccgaagtgcttcattgtgggcgccgataacgttggaagcaagcagatgcagcagatccgaatgagccttcggggcaaggccgtagttctgatgggaaagaacacaatgatgcggaaagctatccgcggacatctagagaacaatcccgcgctggaaaagttgttaccacacattcgtggtaacgtgggctttgtcttcaccaaagaagacctgaccgagattagggatatgctcctggctaacaaggtcccagctgcagcacgcgcaggggcaatcgctccctgcgaggttaccgtgccagctcagaatacaggcctcggccctgagaagacgtcttttttccaggccctgggcatcactactaaaatctcgcgaggaacgatagagatcctgtcagatgtccagttaatcaagacgggagataaagtcggggcaagtgaggcgacgctactaaacatgcttaatattagcccttttagcttcggactggtaatccagcaggtttttgacaacggcagcatatacaacccagaagtactcgacatcacagaggagaccctccattcacgttttctcgagggcgtgagaaatgtagcctccgtgtgtttacaaataggttatcctacggtcgcgagtgtaccccatagcatcattaacgggtacaagagagttctggctctgtcagttgaaacagactacactttcccgctcgctgagaaagtgaaggcttttctcgcggatcccagtgcttttgtggccgccgccccagtggccgctgccaccactgccgctcccgccgctgcagctgcccctgcaaaggtcgaagcaaaggaagagtcagaggagagtgatgaggatatgggattcggtctctttgactag

SEQ ID NO: 18030 - DNA, 954 bp, Artificial Sequence
  derived and/or modified sequence
atgccacgggaggacagagccacatggaagtcaaactacttcctgaagatcatacagctactggacgactacccaaagtgctttatcgttggagctgataatgttggcagcaaacagatgcagcaaattaggatgagcctccggggtaaagccgtggttctaatgggcaagaatactatgatgagaaaggctatacgtggccacctcgaaaataaccctgcactagagaagcttttaccgcacattaggggcaatgtgggcttcgtgtttaccaaagaggaccttacggagatcagagacatgttactggccaataaggtgcctgcagcagctagagctggcgcaatagctccgtgtgaagtcactgtccctgcccagaacactggccttggtcccgagaagacttctttcttccaggctcttggtatcacaactaaaatctcccggggaactatcgagatcctttctgatgtgcagctgattaaaacgggtgacaaagtgggcgcaagcgaagccaccttgctgaacatgctaaacatcagtccattttcctttggcctggtgattcagcaggtatttgataatggaagcatctataacccagaagttctggatatcaccgaggaaaccctgcattctcggttcttggaaggtgtccgcaacgtggcgagcgtgtgcctgcagatcggttatccaaccgtggccagcgtccctcactcgattattaatggctataaacgcgtcctggccctgtctgttgagaccgattatacatttccgctagcagagaaggtaaaagcatttttggccgacccaagtgcgtttgtggcagcagccccagtcgccgcagccaccaccgctgcccctgccgcagcggctgccccagccaaggtggaagccaaggaggaaagcgaggaatctgatgaggacatggggttcggccttttcgactag

SEQ ID NO: 18031 - DNA, 768 bp, Artificial Sequence
  derived and/or modified sequence
atgccccgagaagaccgggccacctggaagagcaattacttcctaaagataattcagctcctggacgactatccaaagtgcttcatcgttggcgcagacaacgtcgggagcaagcagatgcagcagattcggatgtcactgagggggaaggcagtggtccttatgggaaagaataccatgatgcgcaaagcaattcgtgggcaccttgagaataacccagccctggaaaagctgctcccgcacatccgcggaaatgttggcttcgttttcactaaagaggatctgaccgagatacgggacatgctccttgctaataaggtgcccgcagcagctagggctggcgctatcgccccctgcgaggttactgtgcccgcccagaataccggcttaggaccagaaaaaacatcttttttccaggcactcggcattaccacaaagattagccggggaacaatagagatcctgggtgtcaggaacgtggccagtgtgtgcctacagatcgggtacccaaccgtggcgtccgtgccccatagtatcatcaatggttataagcgcgtgcttgctctcagtgtggagaccgactacacattccccctggccgagaaagtgaaagcatttctggccgatccctccgcatttgtggctgccgcccctgtcgcagccgcaaccacggctgctcctgcagccgcagccgcccctgctaaagtggaggctaaggaagaatccgaagagagcgatgaggatatgggttttggtctttttgactag

SEQ ID NO: 18032 - DNA, 954 bp, Artificial Sequence
  derived and/or modified sequence
atgccaagggaggatcgcgctacctggaagagtaactatttcctaaaaatcatccaactgctggacgattatcctaagtgctttatcgtcggagcagataatgtgggctccaaacagatgcaacagatccggatgtcacttaggggtaaagcagtagtcctgatgggtaagaatacaatgatgcgtaaagccatcagaggtcacctagaaaacaatccagcacttgaaaagctgttgcctcacatcagaggaaacgtgggtttcgtgttcactaaagaggacctgactgagatccgggatatgctgctggcaaacaaggtgcctgcggccgcgcgcgctggtgccatcgccccttgcgaggtgacagtaccagcccagaacacaggactggggcctgaaaaaactagtttcttccaggcccttggaattactaccaagatctctagagggaccattgagatacttagcgatgtccagttgatcaagacaggtgataaagtgggggccagtgaggccacgttgctgaatatgctgaacatatctccctttagctttggcctcgtcatccagcaggtgttcgataacggaagtatttacaacccagaggtgctggatatcactgaagagactctccattcccgttttctagaaggcgtccgaaacgtcgctagcgtgtgcttgcagattggttatccaacggtggcctccgttcctcactcaatcatcaatgggtacaagagagtactggctttgagcgttgagacggattatacctttcctttagccgagaaggtcaaggcctttctcgccgacccttctgcttttgtggccgctgcccccgttgctgccgccacaacggcagcccccgcagcagcagctgctccagcgaaagtggaggccaaggaggaaagcgaggagtcggacgaggatatgggcttcggtctcttcgactag

SEQ ID NO: 18033 - DNA, 954 bp, Artificial Sequence
  derived and/or modified sequence
atgccccgcgaggaccgcgcgacctggaagtccaattatttcctcaagatcatccaactgctggatgactacccgaaatgttttatcgtgggggcagacaacgtgggctctaagcagatgcagcagataaggatgtcgctgaggggtaaggccgtcgtgcttatgggcaagaacacgatgatgcgcaaggctatccggggacacttggagaacaatcccgccctggaaaagctgcttccgcacatccgggggaacgtgggctttgtttttactaaagaggacctcaccgagattcgtgatatgctattagcaaacaaggtgccagcagccgctcgcgctggggcaatcgccccatgcgaggtgacagttccagcccagaataccggcttgggccctgaaaagacatctttcttccaggctctcggtattacgaccaagatctcaagggggacaatcgagatcctcagtgatgtccagcttataaaaactggggacaaggtcggggcaagcgaggctactctgttgaacatgctaaatatatcccctttctcgtttggattggttatacaacaggtgttcgataatggatctatttataatccagaagtgctggatattactgaagagaccctacacagcaggtttctcgagggcgtccgaaatgtggcttctgtgtgtctccagatcggttatccgaccgtcgcttctgtgccgcatagtattattaatgggtataaacgagtgttagccttgtcagtggaaacagattataccttcccgctcgcagaaaaggtcaaagctttcctggctgacccaagtgccttcgtggcagctgctcccgtggctgccgcaactactgcagcccctgccgctgcagcagcacccgctaaggtcgaagccaaggaagaaagtgaggagagcgatgaggatatgggctttggactgtttgactag

SEQ ID NO: 18034 - DNA, 768 bp, Artificial Sequence
  derived and/or modified sequence
atgccccgggaggaccgggccacctggaagagcaactacttcctgaagatcatccagctgctggatgactaccccaagtgcttcatcgtgggcgctgacaacgtgggcagcaagcagatgcagcagatccgcatgagcctgcggggcaaggctgtggtgctgatgggcaagaacaccatgatgaggaaggccatccggggccacctggagaacaacccagccctggagaagctgctgccccacatcagaggaaatgtgggctttgtgttcaccaaggaggacctgacagagatccgggacatgctgctggccaacaaggtgcctgctgctgcccgggccggggccatcgccccctgtgaggtgacagtgcctgcccagaacacaggcctgggccctgagaagaccagcttcttccaggccctgggcatcaccaccaagatcagccggggcaccatcgagatcctgggcgtgagaaatgtggcctctgtgtgcctgcagatcggctaccccaccgtggcctctgtgccccacagcatcatcaatggctacaagagggtgctggccctgtctgtggagacagactacaccttccccctggccgagaaggtgaaggccttcctggccgaccccagcgcctttgtggccgccgcccctgtggccgccgccaccacagctgccccagctgctgctgctgccccagccaaggtggaggccaaggaggagagcgaggagagtgatgaggacatgggcttcggcctgtttgattag

SEQ ID NO: 18035 - DNA, 768 bp, Artificial Sequence
  derived and/or modified sequence
atgccccgggaggaccgggccacctggaagagcaactacttcctgaagataatacagcttctggatgactaccctaagtgcttcatcgtcggcgcagacaatgtaggctcaaaacagatgcagcagattcgaatgagcttgagaggaaaggccgtagttttgatggggaaaaacacaatgatgcgcaaagccatacgcggacacctagagaacaaccccgcactcgagaaactgctgccacacatccggggtaatgtgggctttgtgtttacaaaggaggatctgaccgagatccgggacatgctgctcgctaataaggtgcctgctgccgctagagctggggccatcgcgccctgcgaggtcaccgtgccagcccaaaacactggcctgggccctgagaagacatcatttttccaggcgttgggcattaccactaagatctccaggggcaccatcgaaattttgggcgtgcgcaacgtggctagtgtatgcctccagatcgggtacccgacagtggcctcagtcccgcatagtatcatcaacggctataagcgggttttggctttgtccgtggaaacagactatacattcccacttgcagagaaggtcaaggcctttttagctgaccccagcgctttcgttgcagctgctcccgtcgctgctgcaactactgcagcacccgcggcagctgcagcaccagccaaagtggaagccaaggaggagtctgaggaatcagacgaagatatggggttcggcttgttcgactag

SEQ ID NO: 18036 - DNA, 954 bp, Artificial Sequence
  derived and/or modified sequence
atgccccgggaggaccgggccacctggaagagcaactacttcctgaagatcatccagctgttggacgattaccctaagtgcttcatcgtcggcgcggacaatgtggggtcaaagcagatgcaacagatcaggatgtctttacgtggcaaagccgtggtgttgatgggtaagaacaccatgatgaggaaagctattagagggcatctcgagaataacccggcgctggaaaagctgctccctcacattcgtggtaacgtaggctttgtcttcacgaaggaagacctaaccgagatccgggacatgctgttggcgaataaggtacctgcagccgctagggcgggcgcaatcgccccctgcgaggtgacggtgccagcacagaacactgggctcggaccggagaagacatcctttttccaggccttggggatcacaaccaaaatttcccgtggaaccatcgaaatcctcagcgatgtacagttgatcaaaaccggcgacaaagtgggggcttcagaggcaacacttttgaacatgctgaacatctctcccttttcgttcggcctcgttatccaacaggtattcgataacggcagtatttataaccctgaggtgctagatatcacagaggagacactgcactcaaggttcctggagggcgtcagaaatgttgcctctgtgtgcctgcagattggctaccccaccgtggcctcagtgcctcactcgatcattaatggttacaaaagagtgctcgctttatcagtcgaaacggactacacctttcccctggccgagaaagtgaaggctttccttgcagatccttccgcttttgtagctgccgcgccggtagccgccgccacaactgctgctccagccgctgccgctgcccctgcgaaggtagaagctaaggaggaatctgaagagtccgatgaggacatgggattcggcctctttgattag

SEQ ID NO: 18037 - DNA, 954 bp, Artificial Sequence
  derived and/or modified sequence
atgccccgggaggaccgggccacctggaagagcaactacttcctgaagatcattcaactactggacgactatccaaagtgttttatcgtgggggccgacaatgtagggtccaagcagatgcaacaaatccgaatgagcttgcgtggcaaggctgtggtcctgatgggaaaaaacaccatgatgcggaaggcgatccgaggccaccttgaaaataatccagcactggaaaaactgctgcctcatatccgagggaatgtcggcttcgtctttacaaaggaggatttgacggagatccgggacatgcttctggcgaacaaagtgcccgccgctgctcgggctggggccattgcaccctgtgaagttactgtgcccgcccagaatacgggacttggccccgaaaaaacgagtttctttcaagcccttgggataactacaaaaattagcagggggaccatcgagattctgtccgatgtacagcttatcaagaccggcgataaggtcggcgcttctgaagctacactgttgaatatgctgaacattagtcccttctctttcgggcttgttatccaacaggtttttgataacggttctatatataatcccgaagtactggatattaccgaggagacacttcactccagattcctggaaggcgtgaggaatgtggccagcgtctgtctacagatcggataccctacagtagctagtgtgccccattctattataaacggctacaagcgtgtcctagccttatccgtggagaccgattatacctttcctctcgcagaaaaggtcaaggctttccttgccgacccctcggccttcgtggcggctgccccagttgccgcagccactactgccgcccccgcagccgctgcagctcccgcgaaggttgaggccaaagaggaaagcgaagagtccgatgaggacatggggttcggtctgttcgactag

SEQ ID NO: 18038 - DNA, 768 bp, Artificial Sequence
  derived and/or modified sequence
atgcctagagaagatagggccacctggaagtccaattactttcttaaaatcatacagctgttggacgactaccctaagtgcttcatcgtgggtgctgacaacgttgggtcaaagcagatgcagcagatcagaatgagtctccgaggcaaagccgtggtactcatgggcaagaacacaatgatgagaaaggccatacgcggacacctcgagaacaatccggctttggaaaagctgctgccgcacattcggggaaacgtgggcttcgtgtttacgaaggaagatcttacagaaattcgtgacatgctgcttgcgaataaggtccctgccgctgcgagggccggtgccatagcaccgtgtgaagtgacagtgccagcccaaaacaccggactggggccagagaagaccagctttttccaggcactcgggatcacgaccaaaatttctagaggcaccattgaaatcctgggagtccgtaacgttgccagcgtgtgcctccagatcggataccctaccgttgcatctgttccacactcaattatcaatggatataagcgggttctagctttgtcagtcgagactgactatacctttccgctggcagagaaagtaaaggcgtttctcgccgatccctcggcttttgtggccgcagccccagtggcagctgctaccactgccgctcctgcagcggcagccgcacctgcgaaagttgaagctaaagaagaatccgaggaatccgatgaggacatgggattcggcctttttgactag

SEQ ID NO: 18039 - DNA, 954 bp, Artificial Sequence
  derived and/or modified sequence
atgcccagggaagacagagctacctggaaaagcaactactttctcaagatcatacagctcctggatgactaccccaagtgctttattgtgggggctgataatgtagggtcaaagcaaatgcaacaaatccgcatgagcctgcggggtaaagccgtggtgcttatgggaaagaatactatgatgaggaaagctatccggggtcatttagaaaataatcctgctttggaaaagctgcttccacatattaggggaaacgtcggttttgtttttaccaaggaggacctgacggagatccgcgacatgttactggcaaacaaggtccctgctgctgctcgagccggagccatagctccctgcgaagtgacagtaccagcccagaatactggactcggacctgaaaagactagctttttccaagctttaggaataaccaccaaaattagccgcggtaccattgaaatcctatcagacgtccagctgattaagacgggcgacaaagtgggcgcttccgaagcaacactgctgaatatgttaaacatttcaccttttagtttcggactcgtaatccagcaggtctttgataatggttctatctacaaccctgaggttttggatataacggaggagactttacacagccgctttctggagggggtccgaaatgtagcatccgtatgtctacagatcgggtacccaacggtggcgagcgtcccccattcaatcatcaacgggtacaagcgcgtcctcgctctgtccgtcgaaaccgactacacttttcctctggcggagaaagtcaaggccttcttagccgaccctagtgccttcgtggctgcagctccagtcgcggcagctaccacagcggctcccgctgcagccgctgcaccagccaaggtagaggcaaaagaggaaagtgaggaaagcgatgaagacatggggttcggcctatttgactag

SEQ ID NO: 18040 - DNA, 954 bp, Artificial Sequence
  derived and/or modified sequence
atgccaagagaggaccgtgcaacctggaagtcaaactacttccttaagataatacagctgctggatgattatccaaagtgctttatcgtcggggctgacaatgtggggtctaagcagatgcagcaaattaggatgtcactgagaggaaaagctgtggtactgatggggaagaatacgatgatgcggaaggcaattagaggacacctggaaaataacccggctctggaaaaactgctgccacatattaggggcaacgtgggcttcgtattcactaaggaagatttgaccgagattagagatatgctgctggcgaacaaggtccctgccgcagcaagggctggtgctattgctccatgtgaagttactgtgccagcacagaataccggactgggccctgaaaagacgtcattttttcaggcgctgggcataacgacgaagatcagcaggggaacaatagagatcctatccgatgtgcagcttattaaaacaggggacaaggttggcgcatccgaagctacccttctgaacatgttaaatatctctcccttcagttttgggttggtaattcagcaggtctttgataacggcagtatatacaaccccgaggtattagacatcacagaggaaactctgcattcaaggtttcttgaaggtgtgcggaacgtggcctctgtatgtcttcagatcggctatccgacagttgcttccgtgccccattcaattatcaacggatataaacgtgtgttggccctctctgtagaaacagactatacttttccactggctgagaaggtcaaggcgttcctcgcagacccttctgctttcgtggccgcagctcctgttgcagctgcaactacagcggctccggcagctgctgccgctccagcgaaggtggaggctaaagaagagagtgaggagagcgacgaagatatgggttttgggctctttgattag

SEQ ID NO: 18041 - DNA, 1257 bp, Artificial Sequence
  derived and/or modified sequence
gtctgacgggcgatggcgcagccaatagacaggagcgctatccgcggtttctgattggctactttgttcgcattataaaaggcacgcgcgggcgcgaggcccttctctcgccaggcgtcctcgtggaaggcccgggaccgcgggatgggtgtcggcgtgaccaggcctgagctccctgtctctcctcagtgacatcgtctttaaaccctgcgtggcaatccctgacgcaccgccgtgatgcccagggaagacagggcgacctggaagtccaactacttccttaagatcatccaactattggatgattatccgaaatgtttcattgtgggagcagacaatgtgggctccaagcagatgcagcagatccgcatgtcccttcgcgggaaggctgtggtgctgatgggcaagaacaccatgatgcgcaaggccatccgagggcacctggaaaacaacccagctctggagaaactgctgcctcatatccgggggaatgtgggctttgtgttcaccaaggaggacctcactgagatcagggacatgttgctggccaataaggtgccagctgctgcccgtgctggtgccattgccccatgtgaagtcactgtgccagcccagaacactggtctcgggcccgagaagacctcctttttccaggctttaggtatcaccactaaaatctccaggggcaccattgaaatcctgagtgatgtgcagctgatcaagactggagacaaagtgggagccagcgaagccacgctgctgaacatgctcaacatctcccccttctcctttgggctggtcatccagcaggtgttcgacaatggcagcatctacaaccctgaagtgcttgatatcacagaggaaactctgcattctcgcttcctggagggtgtccgcaatgttgccagtgtctgtctgcagattggctacccaactgttgcatcagtaccccattctatcatcaacgggtacaaacgagtcctggccttgtctgtggagacggattacaccttcccacttgctgaaaaggtcaaggccttcttggctgatccatctgcctttgtggctgctgcccctgtggctgctgccaccacagctgctcctgctgctgctgcagccccagctaaggttgaagccaaggaagagtcggaggagtcggacgaggatatgggatttggtctctttgactaatcaccaaaaagcaaccaacttagccagttttatttgcaaaacaaggaaataaaggcttacttcttt

SEQ ID NO: 18042 - DNA, 912 bp, Artificial Sequence
  derived and/or modified sequence
ctctcgccaggcgtcctcgtggaagtgacatcgtctttaaaccctgcgtggcaatccctgacgcaccgccgtgatgcccagggaagacagggcgacctggaagtccaactacttccttaagatcatccaactattggatgattatccgaaatgtttcattgtgggagcagacaatgtgggctccaagcagatgcagcagatccgcatgtcccttcgcgggaaggctgtggtgctgatgggcaagaacaccatgatgcgcaaggccatccgagggcacctggaaaacaacccagctctggagaaactgctgcctcatatccgggggaatgtgggctttgtgttcaccaaggaggacctcactgagatcagggacatgttgctggccaataaggtgccagctgctgcccgtgctggtgccattgccccatgtgaagtcactgtgccagcccagaacactggtctcgggcccgagaagacctcctttttccaggctttaggtatcaccactaaaatctccaggggcaccattgaaatcctgggtgtccgcaatgttgccagtgtctgtctgcagattggctacccaactgttgcatcagtaccccattctatcatcaacgggtacaaacgagtcctggccttgtctgtggagacggattacaccttcccacttgctgaaaaggtcaaggccttcttggctgatccatctgcctttgtggctgctgcccctgtggctgctgccaccacagctgctcctgctgctgctgcagccccagctaaggttgaagccaaggaagagtcggaggagtcggacgaggatatgggatttggtctctttgactaatcaccaaaaagcaaccaacttagccagttttatttgcaaaacaaggaaataaaggcttacttctttaaaaa

SEQ ID NO: 18043 - DNA, 1218 bp, Artificial Sequence
  derived and/or modified sequence
gtctgacgggcgatggcgcagccaatagacaggagcgctatccgcggtttctgattggctactttgttcgcattataaaaggcacgcgcgggcgcgaggcccttctctcgccaggcgtcctcgtggaagtgacatcgtctttaaaccctgcgtggcaatccctgacgcaccgccgtgatgcccagggaagacagggcgacctggaagtccaactacttccttaagatcatccaactattggatgattatccgaaatgtttcattgtgggagcagacaatgtgggctccaagcagatgcagcagatccgcatgtcccttcgcgggaaggctgtggtgctgatgggcaagaacaccatgatgcgcaaggccatccgagggcacctggaaaacaacccagctctggagaaactgctgcctcatatccgggggaatgtgggctttgtgttcaccaaggaggacctcactgagatcagggacatgttgctggccaataaggtgccagctgctgcccgtgctggtgccattgccccatgtgaagtcactgtgccagcccagaacactggtctcgggcccgagaagacctcctttttccaggctttaggtatcaccactaaaatctccaggggcaccattgaaatcctgagtgatgtgcagctgatcaagactggagacaaagtgggagccagcgaagccacgctgctgaacatgctcaacatctcccccttctcctttgggctggtcatccagcaggtgttcgacaatggcagcatctacaaccctgaagtgcttgatatcacagaggaaactctgcattctcgcttcctggagggtgtccgcaatgttgccagtgtctgtctgcagattggctacccaactgttgcatcagtaccccattctatcatcaacgggtacaaacgagtcctggccttgtctgtggagacggattacaccttcccacttgctgaaaaggtcaaggccttcttggctgatccatctgcctttgtggctgctgcccctgtggctgctgccaccacagctgctcctgctgctgctgcagccccagctaaggttgaagccaaggaagagtcggaggagtcggacgaggatatgggatttggtctctttgactaatcaccaaaaagcaaccaacttagccagttttatttgcaaaacaaggaaataaaggcttacttctttaaaaagtctctggactcttaa

SEQ ID NO: 18044 - DNA, 1344 bp, Artificial Sequence
  derived and/or modified sequence
aggcgtcctcgtggaaggttcgtgtgctagttagatgggcgccaggggtcgccggcgggaagcatggaggggtctttgggggcctttgggaacatggagtcctattctgttccgcctggggcctcggtggcggcttgcacgccccgagatgacggccgctgccctaggcagggccggcgggcgattgcgcgtgtcctgctcctcttaggcccgggaccgcgggatgggtgtcggcgtgaccaggcctgagctccctgtctctcctcagtgacatcgtctttaaaccctgcgtggcaatccctgacgcaccgccgtgatgcccagggaagacagggcgacctggaagtccaactacttccttaagatcatccaactattggatgattatccgaaatgtttcattgtgggagcagacaatgtgggctccaagcagatgcagcagatccgcatgtcccttcgcgggaaggctgtggtgctgatgggcaagaacaccatgatgcgcaaggccatccgagggcacctggaaaacaacccagctctggagaaactgctgcctcatatccgggggaatgtgggctttgtgttcaccaaggaggacctcactgagatcagggacatgttgctggccaataaggtgccagctgctgcccgtgctggtgccattgccccatgtgaagtcactgtgccagcccagaacactggtctcgggcccgagaagacctcctttttccaggctttaggtatcaccactaaaatctccaggggcaccattgaaatcctgagtgatgtgcagctgatcaagactggagacaaagtgggagccagcgaagccacgctgctgaacatgctcaacatctcccccttctcctttgggctggtcatccagcaggtgttcgacaatggcagcatctacaaccctgaagtgcttgatatcacagaggaaactctgcattctcgcttcctggagggtgtccgcaatgttgccagtgtctgtctgcagattggctacccaactgttgcatcagtaccccattctatcatcaacgggtacaaacgagtcctggccttgtctgtggagacggattacaccttcccacttgctgaaaaggtcaaggccttcttggctgatccatctgcctttgtggctgctgcccctgtggctgctgccaccacagctgctcctgctgctgctgcagccccagctaaggttgaagccaaggaagagtcggaggagtcggacgaggatatgggatttggtctctttgactaatcaccaaaaagcaaccaacttagccagttttatttgcaaaacaaggaaataaaggcttacttctttaaaaagtc

SEQ ID NO: 18045 - DNA, 768 bp, Artificial Sequence
  derived and/or modified sequence
atgcccagagaggacagagccacctggaagagcaactacttcctgaagatcatccagctgctggacgactaccccaagtgcttcatcgtgggcgccgacaacgtgggcagcaagcagatgcagcagatcagaatgagcctgagaggcaaggccgtggtgctgatgggcaagaacaccatgatgagaaaggccatcagaggccacctggagaacaaccccgccctggagaagctgctgccccacatcagaggcaacgtgggcttcgtgttcaccaaggaggacctgaccgagatcagagacatgctgctggccaacaaggtgcccgccgccgccagagccggcgccatcgccccctgcgaggtgaccgtgcccgcccagaacaccggcctgggccccgagaagaccagcttcttccaggccctgggcatcaccaccaagatcagcagaggcaccatcgagatcctgggcgtgagaaacgtggccagcgtgtgcctgcagatcggctaccccaccgtggccagcgtgccccacagcatcatcaacggctacaagagagtgctggccctgagcgtggagaccgactacaccttccccctggccgagaaggtgaaggccttcctggccgaccccagcgccttcgtggccgccgcccccgtggccgccgccaccaccgccgcccccgccgccgccgccgcccccgccaaggtggaggccaaggaggagagcgaggagagcgacgaggacatgggcttcggcctgttcgactag

SEQ ID NO: 18046 - protein, 114 aa, Artificial Sequence
  derived and/or modified sequence
MASVSELACIYSALILHDDEVTVTEDKINALIKAAGVNVEPFWPGLFAKALANVNIGSLICNVGAGGPAPAAGAAPAGGPAPSTAAAPAEEKKVEAKKEESEESDDDMGFGLFD

SEQ ID NO: 18047 - DNA, 345 bp, Artificial Sequence
  derived and/or modified sequence
atggccagcgtgagcgagctggcatgcatctattctgcccttatactgcatgatgacgaagtgaccgttactgaagataaaattaatgcgctgatcaaggctgctggagtaaacgtggagcccttctggcctggattgtttgcgaaggcgctcgctaatgtgaacattgggtccttaatatgcaatgtcggtgccggaggaccagcccctgcagcaggtgccgctcccgccgggggcccagccccaagtactgccgcagccccagcggaagagaagaaagtggaagccaaaaaggaagagagtgaagagtcggacgatgacatggggtttgggctcttcgattag

SEQ ID NO: 18048 - DNA, 345 bp, Artificial Sequence
  derived and/or modified sequence
atggcctctgtgtctgagctggcctgcatctacagcgccctgatcctgcatgatgatgaggtgacagtgacagaggacaagatcaatgccctgatcaaggctgctggggtgaatgtggagcccttctggccaggcctgtttgccaaggccctggccaacgtgaacatcggcagcctcatctgcaatgtgggcgccggcggccctgccccagctgctggggccgccccagctgggggccctgcccccagcacagctgctgccccagctgaggagaagaaggtggaggccaagaaggaggagagcgaggagagtgatgatgacatgggcttcggcctgtttgattag

SEQ ID NO: 18049 - DNA, 345 bp, Artificial Sequence
  derived and/or modified sequence
atggccagcgtgagcgagctggcctgcatctacagcgccctgatcctccacgacgatgaggttactgtgactgaagataagatcaacgctttgataaaagccgcaggggttaatgttgaaccattttggccaggcctgttcgccaaggccttggcaaatgtgaatataggcagtctgatttgcaacgtcggcgctggcggaccagctcctgccgctggtgcagcgcccgcaggggggcccgcaccatccacagccgcggcaccagcagaggagaaaaaagtcgaagcaaagaaggaggagagcgaagagtctgacgacgatatgggttttgggctcttcgattag

SEQ ID NO: 18050 - DNA, 345 bp, Artificial Sequence
  derived and/or modified sequence
atggcgtcggtgtctgagttagcatgtatatattccgctttgattcttcacgatgacgaagttacggtgaccgaggacaagatcaacgccttaatcaaggccgcaggcgtcaacgtggagccattctggcctgggctgttcgccaaagccttggctaacgtcaacatcggatccctgatatgtaacgtgggagcaggtggacccgcacccgctgcaggagctgctcctgccggagggccagctccaagcacggccgctgcccctgctgaggagaagaaggtggaggcaaaaaaagaagagagcgaagaatctgatgatgacatgggtttcggtcttttcgactag

SEQ ID NO: 18051 - DNA, 919 bp, Artificial Sequence
  derived and/or modified sequence
tggacacataagaggctgcgtataggcgcgagagcccctttcctcagctgccgccaaggtgctcggtccttccgaggaagctaaggctgcgttggggtgaggccctcacttcatccggcgactagcaccgcgtccggcagcgccagccctacactcgcccgcgccatggcctctgtctccgagctcgcctgcatctactcggccctcattctgcacgacgatgaggtgacagtcacggaggataagatcaatgccctcattaaagcagccggtgtaaatgttgagcctttttggcctggcttgtttgcaaaggccctggccaacgtcaacattgggagcctcatctgcaatgtaggggccggtggacctgctccagcagctggtgctgcaccagcaggaggtcctgccccctccactgctgctgctccagctgaggagaagaaagtggaagcaaagaaagaagaatccgaggagtctgatgatgacatgggctttggtctttttgactaaacctcttttataacatgttcaataaaaagctgaactttactgctgttggtcttgtccatagttttggaatgtgctctgcaaaaatggtctgttttgtaatgttggctttcagcctattctgccatgacacaggctggattttccctgccaccattgccggatgtgagatttagacaatcctgatgctaacaagaaggcacctcatggtacagtgttgaaaactgcactggggtggcaggaggaaggatcagagcagatgctttgtccaggttacctgtgtaaacttgatgattataaggtgtgtcccctacactgggggtggagggtaatacagaccagctttagaaagcctcctgggtatttaccctatacaaccctgcctaagaacgaactttgacgtatgctgaat

SEQ ID NO: 18052 - DNA, 345 bp, Artificial Sequence
  derived and/or modified sequence
atggccagcgtgagcgagctggcctgcatctacagcgccctgatcctgcacgacgacgaggtgaccgtgaccgaggacaagatcaacgccctgatcaaggccgccggcgtgaacgtggagcccttctggcccggcctgttcgccaaggccctggccaacgtgaacatcggcagcctgatctgcaacgtgggcgccggcggccccgcccccgccgccggcgccgcccccgccggcggccccgcccccagcaccgccgccgcccccgccgaggagaagaaggtggaggccaagaaggaggagagcgaggagagcgacgacgacatgggcttcggcctgttcgactag

SEQ ID NO: 18053 - protein, 243 aa, Artificial Sequence
  derived and/or modified sequence
MAVQISKKRKFVADGIFKAELNEFLTRELAEDGYSGVEVRVTPTRTEIIILATRTQNVLGEKGRRIRELTAVVQKRFGFPEGSVELYAEKVATRGLCAIAQAESLRYKLLGGLAVRRACYGVLRFIMESGAKGCEVVVSGKLRGQRAKSMKFVDGLMIHSGDPVNYYVDTAVRHVLLRQGVLGIKVKIMLPWDPTGKIGPKKPLPDHVSIVEPKDEILPTTPISEQKGGKPEPPAMPQPVPTA

SEQ ID NO: 18054 - DNA, 732 bp, Artificial Sequence
  derived and/or modified sequence
atggcagtccagatttctaaaaagaggaagttcgttgcagatggcatatttaaggctgaattgaacgaatttttgaccagggaactggctgaggatggatacagcggcgtggaagtccgtgtgacccctacgcgcacagaaatcatcattctcgccacccggactcaaaacgtcctcggggaaaagggccgacgcatcagagagctgactgcagtggtacagaagcggtttggttttcctgagggctccgtcgagctgtatgcagagaaggttgctacgaggggactatgcgcaatcgcacaggcagaatccctgaggtacaaactgctaggggggctggccgttcgccgggcttgctacggtgtgttgagatttattatggagagcggagcaaaaggttgtgaagtcgtggtttcaggcaagcttagaggccagagagcaaagtccatgaaattcgtggacggactaatgatacattcaggagaccccgtgaactactatgttgataccgccgtgcggcacgtgcttttaagacagggggtgttgggcattaaagtcaaaatcatgctcccctgggaccctaccggaaagatcgggcctaaaaagcctttgccggaccacgtgtctatcgtcgaaccaaaagacgagatactgccaactactcctatctcagagcaaaagggcggaaaacctgagccccccgcgatgccacagcccgtccccactgcctag

SEQ ID NO: 18055 - DNA, 732 bp, Artificial Sequence
  derived and/or modified sequence
atggcggtgcagatcagtaagaagcggaaatttgtagccgatgggatcttcaaagccgagctaaatgaattccttacaagggagctagccgaggacggatatagcggcgttgaggtccgggtgacaccgacaaggaccgagatcatcattcttgccacgcggacccagaatgtccttggggagaaaggacgacgcattagagagctcacagccgtggtccaaaaaagattcggcttccccgaaggctctgtggaactctacgcggaaaaagtcgcaactcgtggcctgtgcgctatagcccaagccgaaagcctgcggtataaattactgggcgggttggcagtgagacgggcctgttacggtgtccttcgcttcataatggaaagtggcgccaaaggttgcgaggtcgtcgtgtccggcaagctgagagggcagcgcgcaaagtccatgaaatttgtggacgggctgatgattcattccggggacccagtgaattactatgtggatactgcggtgagacacgtgctcctgaggcagggggtgcttggaattaaagtgaagattatgctgccctgggaccccacagggaagatcggcccaaagaagccattgcctgatcacgtttcaatagtggagcccaaagatgagatcctgcccactactcccatcagcgaacagaagggagggaaacccgagccaccggctatgccccagcctgtgcctactgcgtag

SEQ ID NO: 18056 - DNA, 732 bp, Artificial Sequence
  derived and/or modified sequence
atggccgtgcagatctcgaaaaagagaaaattcgtggcagatgggattttcaaggcagaattgaacgaatttttgacccgggagctggccgaggacggctactccggtgtggaggtccgcgttactcccaccagaacagagatcattatcttagcaacgcgcactcagaacgtgctgggagagaaggggcgccgaatccgcgagctgacagccgttgtccagaagcgctttggtttccccgagggatctgttgagctgtacgccgaaaaagtcgcgacccgcggcctctgtgccattgctcaggcggagagtctgcgatataaactgttaggaggtttggcggtgcgaagagcctgttacggagtgctccgattcatcatggagtctggcgcaaaaggatgcgaggtggtggtttctggaaagttaagaggacaacgtgccaaaagcatgaagttcgttgacggacttatgattcactccggagacccagtgaattattacgttgatactgccgtgcgacacgtgttgttgagacagggcgtgctaggcatcaaggtgaagatcatgctcccttgggatcccacaggcaaaataggccctaaaaaacctctcccagatcatgtatccatcgtggagcctaaagatgaaatcctcccaaccacaccaatctcggagcagaagggtggcaaacccgagccccccgcaatgccccagccagtaccaaccgcctag

SEQ ID NO: 18057 - DNA, 732 bp, Artificial Sequence
  derived and/or modified sequence
atggctgtgcagatcagcaagaagaggaagtttgtggctgatggcatcttcaaggccgagctgaatgagttcctgacccgggagctggctgaagatggctacagcggcgtggaggtgcgggtgacccccaccaggacagagatcatcatcctggccaccaggacccagaatgtgctgggggagaagggccgccgcatccgggagctgacagctgtggtgcagaagagatttggcttccctgagggctctgtggagctgtatgcagagaaggtggccacccggggcctgtgtgccatcgcccaggccgagagcctgcgctacaagctgctgggcggcctggccgtgcggcgggcctgctacggcgtgctgcgcttcatcatggagagcggggccaagggctgtgaggtggtggtgtctgggaagctgcggggccagagggccaagtccatgaagtttgtggatggcctgatgatccacagcggggaccctgtgaactactacgtggacacagctgtgcgccacgtgctgctgcggcagggcgtgctgggcatcaaggtgaagatcatgctgccctgggaccccaccgggaagattggccccaagaagcccctgcctgaccacgtgtccatcgtggagcccaaggatgagatcctgcccaccacccccatcagcgagcagaagggcggcaagccagagcccccagccatgccccagcctgtgcccacagcctag

SEQ ID NO: 18058 - DNA, 732 bp, Artificial Sequence
  derived and/or modified sequence
atggccgtgcagatcagcaagaagcggaagttcgtggccgacggcatctttaaagccgaacttaacgaatttctcaccagggagctggccgaggatgggtactccggcgtagaagtgcgggtgactcccactagaacggagataatcattctagcgacccggacacagaacgtgctaggtgagaaaggtcgtagaatccgggaactgacggctgtagtgcaaaaaaggttcggttttcccgaaggttctgtggaactctacgcggagaaagtggccaccagggggctgtgcgcaatcgcccaggcggaaagcctacggtataaattgttaggtggactggctgtgcgccgcgcctgttacggcgtacttcgctttatcatggagtccggagctaagggctgcgaagtggtagtgtctggaaagctacgaggacaacgggctaagtccatgaagtttgtggacggtctcatgatacatagcggcgatcccgtgaattactacgtagataccgccgtgaggcacgtgcttctgcgccagggggtgctgggaataaaagtgaaaataatgctgccatgggatcctaccggaaaaataggcccaaagaaacccctacccgaccatgtctctatcgttgaacccaaggatgagattctgccaaccaccccaatctctgaacagaaaggcggcaaacctgaacccccagctatgcctcaacccgtcccgaccgcgtag

SEQ ID NO: 18059 - DNA, 732 bp, Artificial Sequence
  derived and/or modified sequence
atggccgtgcagatcagcaagaagcggaagttcgtggccgacggcatcttcaaggctgaactaaacgagttcctgactagagagctggcagaggatggttactccggcgtggaggtacgcgtgaccccaacaagaactgagattatcatcctcgccacacggacgcagaacgtattaggggagaagggacgcagaatcagggaactcactgccgtggtccaaaagaggttcgggtttcctgagggctccgtcgagctgtatgccgagaaagtcgccacccgcgggctgtgcgcaattgcccaagccgagagtttgcggtataagctactgggcgggctggcagtgaggagagcatgttacggcgttctgcggttcatcatggagtccggggccaagggctgtgaggtggttgtgtccggcaaactgagggggcagagggcaaaaagcatgaagttcgtcgacgggttaatgatccattcaggcgacccagtaaactactatgtcgataccgccgtgaggcacgtgctcctcagacagggcgtcttaggaatcaaggttaaaattatgttgccatgggatccgacgggtaaaattggcccgaaaaagccgttgcccgatcacgtcagtatcgtcgagccaaaagatgaaattctaccaaccaccccgatttccgagcagaaaggtggcaaaccagagccaccagcaatgcctcagccagtgcccacggcttag

SEQ ID NO: 18060 - DNA, 732 bp, Artificial Sequence
  derived and/or modified sequence
atggccgtgcagatcagcaagaagcggaagttcgtggccgacggcatctttaaggcagagctaaacgagtttctcacaagggaactggcggaggacggatattctggcgttgaggtcagagtcacccccacaaggacagagatcatcatcctggctactcggacccagaatgtgctcggcgagaaggggcgtagaatacgggagttaactgccgtcgtgcagaaacggttcggattcccagaaggcagtgtagagctgtacgctgaaaaggtcgcaacaagggggctctgtgccattgcgcaagctgaaagcctcaggtataagcttttaggcggcctggccgtgaggagagcgtgttacggcgtgttgagattcatcatggagtccggggcaaagggatgtgaagtggtcgtctcaggaaagctgaggggtcagcgcgctaagagcatgaagtttgtggatggcttgatgatccacagtggtgatccggttaattattacgtcgacactgccgtgaggcacgtactgttaagacagggagtgctgggtataaaggtgaaaattatgctgccctgggacccaaccggaaagataggccccaaaaaacccttgcccgaccacgtgtccatcgtggagcccaaagatgaaatactccccaccacacctatttccgaacagaaggggggcaagcctgagcccccagcaatgccgcagcccgttcctacggcctag

SEQ ID NO: 18061 - DNA, 732 bp, Artificial Sequence
  derived and/or modified sequence
atggctgtccaaatttctaagaaacgcaaattcgtagcagacgggatcttcaaagcagagttgaacgaattcctgacccgcgaactggcagaggacgggtattccggcgttgaggttagagtcaccccgaccagaaccgagattattattctggccactaggactcagaacgttctcggagagaagggcagacggatcagggaactgacagctgttgtccagaagaggttcggcttccctgaagggagcgtcgagttgtacgctgagaaggtcgcaaccaggggactgtgtgccatcgcacaagcggagtccctccgatacaaactgttgggtggcctggccgttagacgcgcttgttacggcgtgctccggttcataatggaatcgggagccaaggggtgtgaggtcgtggttagcggaaaattgagagggcaacgggctaagtcaatgaaatttgtagatggcctgatgatccatagcggtgatcccgtaaactactacgttgatactgccgttagacacgttttgttaaggcaaggggtacttgggatcaaagtcaaaattatgttgccttgggaccctactggcaagatcgggccaaaaaaaccgctacctgatcacgtgagcatcgtcgagccaaaggatgagatcttgccaactacacccatttccgagcaaaagggcggtaaacctgaaccccctgccatgccccagcccgtgcccaccgcttag

SEQ ID NO: 18062 - DNA, 732 bp, Artificial Sequence
  derived and/or modified sequence
atggctgtgcagatctcgaagaaacgcaaatttgttgcagatgggatctttaaggctgaacttaacgagttcttgacccgggagcttgcggaggacgggtacagcggggttgaggtaagagtcaccccgacaaggacggagatcattattctcgctacacgcacacagaacgttctcggggagaagggccgaagaataagagagttgacagccgtcgtgcagaagagatttgggttcccagagggatctgtagagttgtatgcagagaaagttgccactaggggtctgtgcgcaatagcgcaagctgaatctctgagatacaaattgctgggcggattagcagtgcgcagggcttgctacggggtactcagattcattatggagagcggtgccaagggttgtgaagtggtggttagcggcaagttgcgcggacagcgtgcaaagtccatgaagtttgtggacggtctgatgatccactcaggagacccagtcaactactatgtagacactgccgtgcggcacgttcttcttagacagggagtactgggcataaaggttaagattatgttgccatgggacccgacaggaaagattggccctaaaaaaccgctccccgatcacgtgagtattgtggaacctaaagatgagatcctgcctacaacaccgatttcagagcagaagggtgggaagccagaaccccctgctatgccgcagccagtgccaacggcatag

SEQ ID NO: 18063 - DNA, 732 bp, Artificial Sequence
  derived and/or modified sequence
atggccgttcagatctccaagaagcggaagttcgttgcagatggcatcttcaaggcggagttgaacgagttccttacccgtgaactggcagaggatgggtattctggtgtggaggtacgggtgaccccaactaggacagaaataatcattctggcaacgagaacacagaatgttctcggcgaaaaaggtcgccgtatcagggagctgacagctgtcgtgcagaagcggttcgggttccccgaaggttctgtggagctgtacgcagaaaaagtcgccactcggggactgtgcgctatagcccaagctgagtccttgcggtacaaattactgggaggtctggccgtccgcagagcgtgttatggcgttctacggtttatcatggagtctggagcaaaaggctgcgaagtggtggtttccggcaaactcaggggccaaagagccaagagtatgaagttcgttgatggactcatgatccattcaggagatccagttaactattatgtagacactgctgtgcgccacgtcctgctgcggcagggagtcctgggaatcaaggtgaagattatgctcccctgggatcccactggaaagataggacctaagaagcctctccctgaccacgtaagtatcgtggaacccaaagacgaaattctccctaccacaccaatttcagagcaaaaaggtggaaagcctgaacctcctgctatgccacaacccgtgccaactgcatag

SEQ ID NO: 18064 - DNA, 866 bp, Artificial Sequence
  derived and/or modified sequence
gcaagatggcagtgcaaatatccaagaagaggaagtttgtcgctgatggcatcttcaaagctgaactgaatgagtttcttactcgggagctggctgaagatggctactctggagttgaggtgcgagttacaccaaccaggacagaaatcattatcttagccaccagaacacagaatgttcttggtgagaagggccggcggattcgggaactgactgctgtagttcagaagaggtttggctttccagagggcagtgtagagctttatgctgaaaaggtggccactagaggtctgtgtgccattgcccaggcagagtctctgcgttacaaactcctaggagggcttgctgtgcggagggcctgctatggtgtgctgcggttcatcatggagagtggggccaaaggctgcgaggttgtggtgtctgggaaactccgaggacagagggctaaatccatgaagtttgtggatggcctgatgatccacagcggagaccctgttaactactacgttgacactgctgtgcgccacgtgttgctcagacagggtgtgctgggcatcaaggtgaagatcatgctgccctgggacccaactggtaagattggccctaagaagcccctgcctgaccacgtgagcattgtggaacccaaagatgagatactgcccaccacccccatctcagaacagaagggtgggaagccagagccgcctgccatgccccagccagtccccacagcataacaggtatgtctgcaagggcaggggcctcttggggcataatagggtccttccgagtctttctgttaatacttgtatcccacattctggtaagcgtttggtgaataaaaatttcatttatttgctttatgt

SEQ ID NO: 18065 - DNA, 1306 bp, Artificial Sequence
  derived and/or modified sequence
cggagcgcggcggcaagatggcagtgcaaatatccaagaagaggaagtttgtcgctgatggcatcttcaaagctgaactgaatgagtttcttactcgggagctggctgaagatggctactctggagttgaggtgcgagttacaccaaccaggacagaaatcattatcttagccaccagaacacagaatgttcttggtgagaagggccggcggattcgggaactgactgctgtagttcagaagaggtttggctttccagagggcagtgtagagctttatgctgaaaaggtggccactagaggtctgtgtgccattgcccaggcagagtctctgcgttacaaactcctaggagggcttgctgtgcggagggcctgctatggtgtgctgcggttcatcatggagagtggggccaaaggctgcgaggttgtggtgtctgggaaactccgaggacagagggctaaatccatgaagtttgtggatggcctgatgatccacagcggagaccctgttaactactacgttgacactgctgtgcgccacgtgttgctcagacagggtgtgctgggcatcaaggtgaagatcatgctgccctgggacccaactggtaagattggccctaagaagcccctgcctgaccacgtgagcattgtggaacccaaagatgagatactgcccaccacccccatctcagaacagaagggtgggaagccagagccgcctgccatgccccagccagtccccacagcataacagcctcttccatgagtggggagcccgctgcttgtctccagctcctagcagtgagtcctgataatctcaaatttaaggacagtaactttgtctgggatgagtgtgggaaaggatgtgtttgggaacagacgcgagcctgcagaggtgtttgtaaccatctctttctaagtggtgggaagcagacattttattctttaactgttaatatatatagtgtgtgttttttatgcatgaaatattttatagtttttaaaaatgcccacactactattttgaaagtaaatgaggtaatgtatgtgtcagaacccaatacccaaagcgatcgtagtaagaggtggggcctttgggaaggcattaaattgcttagggaatgagggtggaaccctcatgaatgagattagagccttataggagaggttggagggagttgcctggcctccctctcccatgtgaagactcagcaagaaaacattatttaggaagcagagagccctcatcaaacaccagatctgctggccacctgatctggcactttccagccttcagaactgtgagaa

SEQ ID NO: 18066 - DNA, 2097 bp, Artificial Sequence
  derived and/or modified sequence
cctttatactcacttccgcccgcgagccacttcctttcctttcagcggagcgcggcggcaagatggcagtgcaaatatccaagaagaggaagtttgtcgctgatggcatcttcaaagctgaactgaatgagtttcttactcgggagctggctgaagatggctactctggagttgaggtgcgagttacaccaaccaggacagaaatcattatcttagccaccagaacacagaatgttcttggtgagaagggccggcggattcgggaactgactgctgtagttcagaagaggtttggctttccagagggcagtgtagagctttatgctgaaaaggtggccactagaggtctgtgtgccattgcccaggcagagtctctgcgttacaaactcctaggagggcttgctgtgcggagggcctgctatggtgtgctgcggttcatcatggagagtggggccaaaggctgcgaggttgtggtgtctgggaaactccgaggacagagggctaaatccatgaagtttgtggatggcctgatgatccacagcggagaccctgttaactactacgttgacactgctgtgcgccacgtgttgctcagacagggtgtgctgggcatcaaggtgaagatcatgctgccctgggacccaactggtaagattggccctaagaagcccctgcctgaccacgtgagcattgtggaacccaaagatgagatactgcccaccacccccatctcagaacagaagggtgggaagccagagccgcctgccatgccccagccagtccccacagcataacagggtctccttggcagctgtattctggagtctggatgttgctctctaaagacctttaataaaattttgtacaaagacacaaggtctgactagactgttcagtattcagactgaggggcatgttggcctctggagcattacatatcttcttggttttaaccatacttgtggtatttgcaagggccagaacagtaagacccaagcagagccaaccagagaaataatatttgtgtgatagagaaggctgatagcaagcaaggcagcaccttgattcgttgtcctgtagttcaggattgtaggtttagaagagggatatgtttgagtttttcctatgcataaggcgatccacgttgcacatagaaagtgaatataaatggccattatattttgtgtcatgctgtgctctaagtgttctttacatatgtactcgttaatcaacctctctaaagtgtaaaggaaatttgcttgcaccactgaaggcacataaggctcagaagtaaatttgcctaagcagtataaagctatcattagaatccacattcctaagttgtgttctcttaggggatcatggaaccagtcattggtactacaggctattatgttctggagaactgtgaagaacatttaaattgtctctgattttatctatcaatgttttgaagtattttctaccagtgtctgtacttcacaagaaattcggcactattttttcaggcaaaactagtgagggacaggttggcttgaaaatcatgagactgttgttaaatcagatgctggttgatcacagaggggacttccagggaaagctgttatcaggtggctgcttcctggtgatgcagcctggctgatgagataaccctggctccacagatggcttagcaggtgctgtgatgatttggttttcttctcaattagactgagctgcacatggtgtttatattgcttggcacatggtaagggcttaatatttgaggtaattatgtagggcgtacactgacaagtatctgacccccccttcctttttgactcataaattggtcatcttaaccatttaagtgtacacttctatagtgacagagttagccctctgtccaagggatttgcatctgtggattcaaccaactttgggtcaaaaataatcaaaaaggatggttgtgtgtgtattgaacatgtagacttatttttcttattttcaaaatactatattttcttgtcacttattttcttgtacactgcagttgtaacagctatgtagcatgtacattaggtattaaaagtaatccagtgaagattgaaagtctaa

SEQ ID NO: 18067 - DNA, 732 bp, Artificial Sequence
  derived and/or modified sequence
atggccgtgcagatcagcaagaagagaaagttcgtggccgacggcatcttcaaggccgagctgaacgagttcctgaccagagagctggccgaggacggctacagcggcgtggaggtgagagtgacccccaccagaaccgagatcatcatcctggccaccagaacccagaacgtgctgggcgagaagggcagaagaatcagagagctgaccgccgtggtgcagaagagattcggcttccccgagggcagcgtggagctgtacgccgagaaggtggccaccagaggcctgtgcgccatcgcccaggccgagagcctgagatacaagctgctgggcggcctggccgtgagaagagcctgctacggcgtgctgagattcatcatggagagcggcgccaagggctgcgaggtggtggtgagcggcaagctgagaggccagagagccaagagcatgaagttcgtggacggcctgatgatccacagcggcgaccccgtgaactactacgtggacaccgccgtgagacacgtgctgctgagacagggcgtgctgggcatcaaggtgaagatcatgctgccctgggaccccaccggcaagatcggccccaagaagcccctgcccgaccacgtgagcatcgtggagcccaaggacgagatcctgcccaccacccccatcagcgagcagaagggcggcaagcccgagccccccgccatgccccagcccgtgcccaccgcctag

SEQ ID NO: 18068 - protein, 264 aa, Artificial Sequence [sequence omitted]

SEQ ID NO: 18069 - protein, 175 aa, Artificial Sequence
  derived and/or modified sequence
MAVAKKKVVDPFSKKDWYDVKAPAMFNIRNIGKTLVTRTQGTKIASDGLKGRVFEVSLADLQNDEVAFRKFKLITEDVQGKNCLTNFHGMDLTRDKMCSMVKKWQTMIEAHVDVKTTDGYLLRLFCVGFTKKRNNQIRKTSYAQHQQVRQIRKKMMEIMTREVQTNDLKEVVNKL

SEQ ID NO: 18070 - protein, 227 aa, Artificial Sequence
  derived and/or modified sequence
MFNIRNIGKTLVTRTQGTKIASDGLKGRVFEVSLADLQNDEVAFRKFKLITEDVQGKNCLTNFHGMDLTRDKMCSMVKKWQTMIEAHVDVKTTDGYLLRLFCVGFTKKRNNQIRKTSYAQHQQVRQIRKKMMEIMTREVQTNDLKEVVNKLIPDSIGKDIEKACQSIYPLHDVFVRKVKMLKKPKFELGKLMELHGEGSSSGKATGDETGAKVERADGYEPPVQESV

SEQ ID NO: 18071 - protein, 145 aa, Artificial Sequence
  derived and/or modified sequence
MIEAHVDVKTTDGYLLRLFCVGFTKKRNNQIRKTSYAQHQQVRQIRKKMMEIMTREVQTNDLKEVVNKLIPDSIGKDIEKACQSIYPLHDVFVRKVKMLKKPKFELGKLMELHGEGSSSGKATGDETGAKVERADGYEPPVQESV

SEQ ID NO: 18072 - protein, 208 aa, Artificial Sequence
  derived and/or modified sequence
KRLTKGGKKGAKKKVVDPFSKKDWYDVKAPAMFNIRNIGKTLVTRTQGTKIASDGLKGRVFETMIEAHVDVKTTDGYLLRLFCVGFTKKRNNQIRKTSYAQHQQVRQIRKKMMEIMTREVQTNDLKEVVNKLIPDSIGKDIEKACQSIYPLHDVFVRKVKMLKKPKFELGKLMELHGEGSSSGKATGDETGAKVERADGYEPPVQESV

SEQ ID NO: 18073 - DNA, 795 bp, Artificial Sequence
  derived and/or modified sequence
atggccgtgggtaagaataaaagattgaccaaaggagggaaaaagggggctaagaaaaaggttgtggatccattttctaaaaaagattggtatgacgtaaaagcgcctgctatgtttaacatccgtaacataggcaaaacgctggtcacaaggacgcaaggaacaaaaatcgcctcagacggactcaaaggcagagtgtttgaggtgtctttggccgacttgcagaatgacgaggtcgcattccgaaaatttaagctgattactgaggatgtgcaggggaaaaactgtttgacgaacttccacggcatggatctcacgagagataaaatgtgctcaatggtcaaaaagtggcagaccatgattgaggctcacgtggatgtcaaaaccactgatgggtatctgcttagactgttctgcgtgggtttcaccaagaagagaaataaccagattcggaagacttcctatgcccaacaccaacaggtccgtcagatcagaaagaagatgatggaaattatgacgagggaggttcagaccaacgacctgaaagaagttgtgaacaagctgattcctgactcaattgggaaggatatagaaaaggcgtgccaaagcatttacccacttcacgacgttttcgtccggaaagtgaagatgctgaagaaacctaaattcgagttagggaaactaatggaattgcatggggagggtagcagcagtgggaaggcaactggagatgagactggcgccaaagtggaaagagcggacgggtacgaaccgcctgtccaggaaagcgtctag

SEQ ID NO: 18074 - DNA, 528 bp, Artificial Sequence
  derived and/or modified sequence
atggcagtggcaaaaaaaaaagtggtcgatcctttcagtaaaaaagactggtacgatgttaaggcccccgcgatgtttaatatcaggaatataggcaagacgctcgtgacgagaactcagggaacaaagattgcctccgatggcttgaaggggcgtgtgttcgaagtgtcactggcagacttgcagaacgacgaggtggcttttcgtaagtttaagctcatcacagaagacgtgcaaggtaagaactgcttgaccaacttccatggaatggatctaactcgggacaaaatgtgttcaatggttaaaaagtggcagacaatgattgaagcgcacgttgacgtcaagactacggatggatatttgctcagactgttctgtgtgggcttcaccaaaaagaggaacaaccagatcaggaagacgagctatgctcagcatcagcaggtccgacagattcgtaagaagatgatggagatcatgactcgcgaggtgcagacaaacgacctcaaggaggtcgtcaacaaactttag

SEQ ID NO: 18075 - DNA, 684 bp, Artificial Sequence
  derived and/or modified sequence
atgtttaacatccggaatatcggaaaaacgctcgtgactaggacccagggaacaaaaatcgcatcagacgggctgaaaggacgtgtattcgaggtttctctggcagacctgcagaatgacgaggtggcctttcgaaagtttaaacttataaccgaagacgtgcaaggaaaaaattgtttgactaactttcacggtatggatctgactagggacaaaatgtgcagtatggtgaagaaatggcaaactatgatcgaggctcatgtagacgtaaaaaccaccgacggctatctgctgcggctgttttgtgtgggttttaccaagaagaggaataatcaaattaggaagacatcctacgctcagcatcaacaggtacgccagatccggaaaaagatgatggaaattatgacaagagaagtccaaacgaatgacctgaaagaagtggtgaataagctcatccctgactcaatcggaaaggatatcgaaaaagcgtgccagtcaatataccctttgcacgatgtttttgtgcggaaagtcaagatgctgaagaaaccgaaattcgagctcggaaaactaatggagctacatggcgaggggagctcctccggcaaggcaacgggtgacgagaccggagctaaggtggagcgggctgatggctacgagcctccagttcaggaaagcgtatag

SEQ ID NO: 18076 - DNA, 438 bp, Artificial Sequence
  derived and/or modified sequence
atgatcgaggcacacgttgatgttaaaaccacagatgggtacttactgaggctattctgcgttgggtttactaaaaagcgcaataaccaaattcgaaagacaagctacgcacagcaccaacaggtgcgacagatcagaaaaaaaatgatggagataatgacccgtgaagttcagactaacgatctgaaggaagtagttaacaaactcattcctgattcaatcggaaaggacatcgagaaggcttgccaaagcatctatccgctccatgatgtgtttgtcaggaaagtgaagatgttgaagaaaccaaaattcgaactggggaagcttatggagctgcatggtgagggctcttcctccgggaaggctacaggcgatgagaccggggcaaaggtagagagagccgatggctatgaaccccccgtccaggaatcggtgtag

SEQ ID NO: 18077 - DNA, 684 bp, Artificial Sequence
  derived and/or modified sequence
atgtttaacataaggaacatcggtaagacactcgtgacgaggacccaggggaccaaaatcgccagcgacgggcttaaggggcgtgtctttgaggtcagtttggcagacctgcagaatgacgaggttgcttttcggaagttcaagctgattaccgaagacgtgcagggcaaaaattgtctgacaaacttccacggcatggacctgacccgggacaagatgtgctcgatggtgaagaagtggcagactatgatcgaagctcacgtcgatgtgaaaaccacggacggctacctgttgcgcttattctgcgtcggtttcacgaaaaaacgaaacaaccaaatccgaaagacatcgtacgcccagcaccagcaagtccgacagatccgaaaaaaaatgatggaaatcatgacaagagaagttcagacgaacgatctgaaggaagtggtgaataagctaataccagactcgattggcaaagacatcgaaaaagcctgtcaatctatatacccgctccacgatgtcttcgtgagaaaggtgaagatgctgaagaagcctaagttcgaattaggtaagttaatggagctccatggggagggctctagttctggaaaggcaacgggggatgaaaccggtgcaaaagtggagagagccgacggatacgagccaccagtacaggagtctgtttag

SEQ ID NO: 18078 - DNA, 627 bp, Artificial Sequence
  derived and/or modified sequence
aagcgcctcacgaaagggggcaagaaaggcgctaagaaaaaagtggtcgacccatttagtaagaaagattggtatgacgttaaagccccggctatgtttaatatcagaaacattggcaaaacactcgtgacccgcacacaaggtacaaagattgcctccgacggcttgaaaggacgtgtgttcgaaacaatgatcgaggcacacgtggacgtgaagactacagatggctatctcctgcggctcttttgcgtcggcttcactaaaaagaggaacaaccagattcggaagacctcttatgcccagcatcagcaagtaagacagatccggaaaaagatgatggaaatcatgactagggaagtccagaccaacgatctcaaagaagtagtgaataaattgattcctgatagcatagggaaggacatcgagaaggcctgtcaatcgatctatcctctgcacgacgtgttcgttagaaaagtgaagatgctgaagaagcctaagtttgagctgggtaagctgatggagctgcatggcgaaggctcgagctcaggtaaggcgactggggatgagacaggcgccaaagtcgagcgcgcagatggttatgagccccccgtccaggaaagtgtctag

SEQ ID NO: 18079 - DNA, 795 bp, Artificial Sequence
  derived and/or modified sequence
atggctgtgggcaagaacaagaggctgaccaagggcggcaagaagggggccaagaagaaggtggtggaccccttcagcaagaaggactggtatgatgtgaaggccccagccatgttcaacatccggaacatcggcaagaccctggtgaccaggacccagggcaccaagatcgccagtgatggcctgaagggccgggtgtttgaggtgtccctggccgacctgcagaatgatgaggtggccttcaggaagttcaagctgatcacagaagatgtgcagggcaagaactgcctgaccaacttccacggcatggacctgacccgggacaagatgtgcagcatggtgaagaagtggcagaccatgattgaggcccacgtggatgtgaagaccacagatggctacctgctgcggctcttctgtgtgggcttcaccaagaagaggaacaaccagatcaggaagaccagctatgcccagcaccagcaggtgcggcagatcaggaagaagatgatggagatcatgacccgggaggtgcagaccaatgacctgaaggaggtggtgaacaagctgatcccagacagcatcggcaaggacatcgagaaggcctgccagagcatctaccccctgcatgatgtgtttgtgaggaaggtgaagatgctgaagaagcccaagtttgagctgggcaagctgatggagctgcacggggagggcagcagcagcggcaaggccactggagatgagaccggggccaaggtggagcgggcagatggctatgagccccctgtgcaggagagcgtgtag

SEQ ID NO: 18080 - DNA, 528 bp, Artificial Sequence
  derived and/or modified sequence
atggctgtggccaagaagaaggtggtggaccccttcagcaagaaggactggtatgatgtgaaggccccagccatgttcaacatcagaaatattggcaagaccctggtgaccaggacccagggcaccaagatcgccagtgatggcctgaagggccgggtgtttgaggtgtccctggccgacctgcagaatgatgaggtggccttcaggaagttcaagctgatcacagaagatgtgcagggcaagaactgcctgaccaacttccacggcatggacctgacccgggacaagatgtgcagcatggtgaagaagtggcagaccatgattgaggcccacgtggatgtgaagaccacagatggctacctgctgcggctcttctgtgtgggcttcaccaagaagaggaacaaccagatcaggaagaccagctatgcccagcaccagcaggtgcggcagatcaggaagaagatgatggagatcatgacccgggaggtgcagaccaatgacctgaaggaggtggtgaacaagctgtag

SEQ ID NO: 18081 - DNA, 684 bp, Artificial Sequence
  derived and/or modified sequence
atgttcaacatcagaaatattggcaagaccctggtgaccaggacccagggcaccaagatcgccagtgatggcctgaagggccgggtgtttgaggtgtccctggccgacctgcagaatgatgaggtggccttcaggaagttcaagctgatcacagaagatgtgcagggcaagaactgcctgaccaacttccacggcatggacctgacccgggacaagatgtgcagcatggtgaagaagtggcagaccatgattgaggcccacgtggatgtgaagaccacagatggctacctgctgcggctcttctgtgtgggcttcaccaagaagaggaacaaccagatcaggaagaccagctatgcccagcaccagcaggtgcggcagatcaggaagaagatgatggagatcatgacccgggaggtgcagaccaatgacctgaaggaggtggtgaacaagctgatcccagacagcatcggcaaggacatcgagaaggcctgccagagcatctaccccctgcatgatgtgtttgtgaggaaggtgaagatgctgaagaagcccaagtttgagctgggcaagctgatggagctgcatggagagggcagcagcagcggcaaggccactggagatgaaacaggagccaaggtggagcgggcagatggctatgagccccctgtgcaggagagcgtgtag

SEQ ID NO: 18082 - DNA, 438 bp, Artificial Sequence
  derived and/or modified sequence
atgattgaggcccacgtggatgtgaagaccacagatggctacctgctgcggctcttctgtgtgggcttcaccaagaagaggaacaaccagatcaggaagaccagctatgcccagcaccagcaggtgcggcagatcaggaagaagatgatggagatcatgacccgggaggtgcagaccaatgacctgaaggaggtggtgaacaagctgatcccagacagcatcggcaaggacatcgagaaggcctgccagagcatctaccccctgcatgatgtgtttgtgaggaaggtgaagatgctgaagaagcccaagtttgagctgggcaagctgatggagctgcatggagagggcagcagcagcggcaaggccactggagatgaaacaggagccaaggtggagcgggcagatggctatgagccccctgtgcaggagagcgtgtag

SEQ ID NO: 18083 - DNA, 627 bp, Artificial Sequence
  derived and/or modified sequence
aagaggctgaccaagggcggcaagaagggggccaagaagaaggtggtggaccccttcagcaagaaggactggtatgatgtgaaggccccagccatgttcaacatccggaacatcggcaagaccctggtgaccaggacccagggcaccaagatcgccagtgatggcctgaagggccgggtgtttgagaccatgattgaggcccacgtggatgtgaagaccacagatggctacctgctgcggctcttctgtgtgggcttcaccaagaagaggaacaaccagatcaggaagaccagctatgcccagcaccagcaggtgcggcagatcaggaagaagatgatggagatcatgacccgggaggtgcagaccaatgacctgaaggaggtggtgaacaagctgatcccagacagcatcggcaaggacatcgagaaggcctgccagagcatctaccccctgcatgatgtgtttgtgaggaaggtgaagatgctgaagaagcccaagtttgagctgggcaagctgatggagctgcacggggagggcagcagcagcggcaaggccactggagatgagaccggggccaaggtggagcgggcagatggctatgagccccctgtgcaggagagcgtgtag

SEQ ID NO: 18084 - DNA, 795 bp, Artificial Sequence
  derived and/or modified sequence
atggccgtgggcaagaacaagcggctgaccaagggcggcaagaagggcgcaaagaagaaggtggtggacccctttagtaagaaagactggtatgacgtcaaggctccggctatgttcaatattcgtaatatcggcaagacactggtgactcgcacacagggaacaaaaattgcaagcgacggactcaaagggcgcgtttttgaggtctctctggcggacttgcagaacgatgaggtggccttcagaaagtttaagctcattacagaagatgtgcagggcaaaaattgtctgacaaattttcatggaatggacctgaccagggacaagatgtgcagtatggtcaaaaagtggcaaaccatgatcgaggcccacgtggatgtgaagacaacagacggctatttgttgaggctgttttgtgtaggtttcacaaagaaacggaataaccagatccggaagacaagttacgctcaacatcaacaggtccgacagattcggaaaaaaatgatggaaatcatgactcgcgaggtccagaccaacgacttgaaggaggtggtgaacaagttgatcccggactctattgggaaggatatcgaaaaagcttgccagagtatatatccccttcatgatgtcttcgtgaggaaggtgaagatgctaaaaaagccaaagtttgaactgggaaaactcatggagttacacggggagggaagcagtagcggcaaagctaccggggacgagacgggcgccaaggtggagcgcgccgacggctacgagcctcccgtccaggagtcagtttag

SEQ ID NO: 18085 - DNA, 528 bp, Artificial Sequence
  derived and/or modified sequence
atggccgtggccaagaagaaggtggtggaccccttcagcaagaaggactggtatgatgtcaaagcaccagcaatgttcaatatacggaacatcggtaaaacactggtgactagaacacaaggaaccaagatcgcatcggacgggttgaagggtcgcgtctttgaggtatccctcgccgaccttcagaacgacgaggtagcattccggaagttcaagttgatcacagaggatgtccaggggaagaattgcttgaccaacttccatggcatggatctgacaagagataaaatgtgctccatggtgaaaaagtggcagacgatgatagaggcacacgttgatgtgaaaacaaccgacggttatcttctgcgtctcttttgtgtaggatttaccaagaaacggaataaccagattagaaaaacctcctatgcccaacaccagcaagtccggcagatccgtaaaaagatgatggaaattatgacccgcgaagttcagaccaacgaccttaaggaagtagttaacaagctgtag

SEQ ID NO: 18086 - DNA, 684 bp, Artificial Sequence
  derived and/or modified sequence
atgttcaacatccggaacatcggcaagaccctggtgacccggacccagggcaccaaaatcgcttctgacggtcttaagggacgggtgttcgaagtgagccttgctgacctacaaaatgacgaggtcgcatttcgcaagtttaaattgattacggaggatgttcagggaaaaaattgccttactaacttccacggcatggacctaacacgtgacaagatgtgctctatggtgaaaaagtggcagactatgatcgaagcccatgtggatgtgaagaccacagacggttacctacttaggctgttctgcgtgggtttcactaaaaagcgtaataaccagatcaggaaaacgtcatatgcccagcatcagcaagttaggcagatacggaagaaaatgatggagatcatgacgcgagaggtgcagacaaatgacctgaaagaggttgtgaacaaactgattcctgatagtatcggcaaagacattgaaaaggcttgccagagtatctaccccctacatgacgtcttcgtgcgtaaggttaaaatgctcaaaaagcccaagttcgagcttggcaaactcatggaactgcacggggagggcagctctagtgggaaggccactggcgatgaaacaggagccaaagtagagcgagcagacggctacgaaccgccggttcaggagtccgtgtag

SEQ ID NO: 18087 - DNA, 438 bp, Artificial Sequence
  derived and/or modified sequence
atgatcgaggcccacgtggacgtgaagaccaccgacggctacctgttgcgtctgttctgcgtgggattcaccaagaagcgcaacaaccagatcagaaagactagctacgcccaacaccagcaggtccgccagatcaggaaaaagatgatggaaattatgactcgggaagtgcaaacaaacgatttaaaagaggtcgtgaacaagttgatccccgacagcataggcaaagacatcgagaaagcctgtcagtcaatttaccctctacatgacgtgtttgtcaggaaagttaagatgttgaaaaagccaaagtttgagctcgggaaactgatggaactccacggagaggggtccagctctgggaaagccaccggcgacgagacgggcgccaaggttgagcgtgccgatggatacgagccccctgttcaggagtccgtgtag

SEQ ID NO: 18088 - DNA, 684 bp, Artificial Sequence
  derived and/or modified sequence
atgttcaacatccggaacatcggcaagaccctggtgacccggacccaaggcaccaaaattgccagtgatggcttaaaaggaagggtcttcgaggtctcactcgccgatttgcagaatgatgaggtggcctttcgaaaattcaaactgataaccgaggacgtgcagggaaaaaattgcttgaccaacttccacggcatggaccttactagggataaaatgtgcagcatggtcaagaagtggcagaccatgatcgaggcacacgtggatgtgaaaacaaccgatggatacctcctgcggttattttgtgttggatttacaaaaaaaaggaataaccaaatacgtaaaaccagctatgcgcagcaccagcaggtcaggcagattagaaaaaaaatgatggagattatgacacgagaagtgcagacaaatgatcttaaggaagttgtcaacaagctgatccctgactccataggtaaagacatcgaaaaagcctgccagagcatttacccccttcacgacgtcttcgtaagaaaggtaaagatgttgaagaagcccaaatttgagttgggcaaattgatggagctgcacggtgaagggagcagttccggcaaagctactggagacgagacaggagctaaagtcgaacgcgccgacgggtatgagccaccagtgcaagagagcgtttag

SEQ ID NO: 18089 - DNA, 627 bp, Artificial Sequence
  derived and/or modified sequence
aagcggctgaccaagggcggcaagaagggcgccaagaagaaggtggtggaccccttctcaaagaaagactggtacgacgtcaaagcccctgctatgtttaacatccggaacattggcaagactctcgtgaccagaacacagggcacgaaaatcgcttctgatggcctgaaagggagggtgttcgagaccatgattgaagcacacgtcgacgtgaagacaaccgatggttacctgctgagattgttttgcgtcggctttaccaagaaacggaataaccagatccggaaaaccagttacgcacaacaccaacaagtcaggcagatccgcaagaaaatgatggagatcatgaccagagaggttcagacgaacgaccttaaggaggttgtaaataagctcatccccgactcaattgggaaggatattgagaaagcgtgtcagagcatttacccgctccacgatgtctttgtccgaaaggttaagatgctgaagaagcccaaattcgagctaggcaaactgatggagttacatggtgagggttcaagcagcggcaaggcgactggggacgagactggcgcaaaggttgagcgtgccgatggatacgagccgccagtgcaggaaagcgtatag

SEQ ID NO: 18090 - DNA, 795 bp, Artificial Sequence
  derived and/or modified sequence
atggcggtgggcaaaaacaagcgcctgaccaaaggcggtaaaaagggggctaagaaaaaggtggtcgacccattctctaaaaaggattggtatgatgtcaaagcccctgcgatgttcaacatccggaacattggaaaaacactagttacccggacgcagggaaccaagatcgccagcgacgggctaaaagggagggtattcgaagtcagcctcgctgacctccagaatgatgaagtcgcgttccggaaattcaaactcatcaccgaggacgttcagggaaagaactgtttgactaatttccatggtatggacctgacccgcgataaaatgtgcagcatggtgaaaaaatggcagacgatgatcgaggcccatgtagacgtaaagacaacggacggctacctcctgcgccttttctgcgtcgggttcacaaagaaacggaacaatcagatacggaaaacgagctacgcccaacatcagcaagtccggcagatccggaaaaaaatgatggagatcatgactcgggaggttcagacgaacgacctgaaggaagtagtcaacaaactgatcccagattcaatcggtaaggatatagagaaggcctgccaaagcatttacccactgcatgatgtgttcgtacgcaaggtcaaaatgctcaagaagcctaaattcgaactcggaaagctcatggagcttcacggggaaggctccagttctggaaaggccactggcgatgagactggcgctaaggtcgaaagagccgatggctatgagcctccagtacaggaatcagtttag

SEQ ID NO: 18091 - DNA, 528 bp, Artificial Sequence
  derived and/or modified sequence
atggcggttgccaagaagaaagtcgtggacccttttagcaagaaggactggtacgatgtgaaggcccctgccatgtttaacatacggaatatcgggaaaactcttgttaccaggactcaggggacgaagatcgcaagtgatggcttaaaagggagggtgtttgaggtgtcactggccgatttgcaaaatgatgaagtggctttccgcaaatttaagctgatcacagaagacgtgcaaggcaaaaactgtctgactaactttcacggaatggacctaacacgggacaaaatgtgcagcatggttaaaaagtggcaaaccatgattgaggcgcatgtagatgtgaagaccactgacggataccttttaaggctgttttgcgtgggcttcaccaaaaaacggaacaatcagattcggaaaacatcctacgcccagcaccagcaggtccggcagatcaggaagaagatgatggagatcatgacgcgagaagtgcagacaaatgacctcaaagaagtggtgaacaagctgtag

SEQ ID NO: 18092 - DNA, 684 bp, Artificial Sequence
  derived and/or modified sequence
atgtttaacattaggaacattggtaagaccctagtgaccaggactcagggcactaagattgcgtcagacgggcttaaaggccgtgttttcgaggtgtctcttgctgatcttcagaacgacgaggtggccttccgaaaatttaagctgattacagaagatgtgcaggggaaaaactgcctaactaacttccacggcatggacctcaccagggacaaaatgtgtagtatggtgaaaaagtggcagaccatgatagaagcccatgtggacgtgaaaaccaccgacggatacctcctgaggctcttttgtgtgggatttaccaagaagcgaaacaaccagatccgcaagacatcctatgcacaacatcaacaagtgcgtcagattcggaagaagatgatggagataatgactagagaagtgcagaccaacgacctgaaggaggtggttaacaaacttatacctgactcaattggtaaggacattgagaaggcctgtcagagcatttaccccctgcatgacgtgttcgtgcgtaaggtgaagatgctcaaaaagccaaagtttgaactcgggaaactcatggaactgcacggcgagggaagttcaagcggaaaggcaacaggggacgagacaggtgccaaagtcgagcgagctgatggatacgagcctccggtgcaggaatctgtgtag

SEQ ID NO: 18093 - DNA, 438 bp, Artificial Sequence
  derived and/or modified sequence
atgatcgaagcacatgtggatgtgaagaccacggacggttatttactcaggctgttctgtgtgggttttaccaagaaacgcaacaatcagattcgcaaaacgtcctatgctcaacatcagcaggtgcggcagatcaggaagaaaatgatggaaatcatgacgcgggaggttcagacaaacgatctgaaagaagtagtgaataaattgatcccagattctatagggaaggatattgagaaggcttgccagtccatctatcccctgcatgatgtcttcgttagaaaggtcaagatgctcaaaaagcctaagttcgagttgggaaaactcatggagctccatggggaaggttcaagctcaggaaaagccactggggatgagaccggcgcaaaggtggagagagcggatgggtacgagcccccagtgcaggagtctgtgtag

SEQ ID NO: 18094 - DNA, 684 bp, Artificial Sequence
  derived and/or modified sequence
atgttcaatatacgaaatatcggcaagacacttgtaacgagaacccaaggaaccaagattgcttctgacggactgaaaggtcgggtcttcgaagtcagtctagccgaccttcagaatgacgaggtcgccttcaggaaattcaagctgatcacagaagacgtgcagggcaaaaattgtctgaccaattttcacggaatggatctgacccgggataagatgtgcagtatggtcaagaaatggcagacaatgatcgaggctcacgtcgacgtgaaaacgaccgacggctatctgctgcgtctgttctgcgtcggctttaccaaaaagcggaacaaccagatcagaaagactagctatgcccaacaccaacaggtcaggcagatacgcaaaaagatgatggaaattatgactcgcgaagtgcagaccaacgacctgaaagaagtcgtcaacaagctgatccctgactcgattggcaaggatatcgagaaggcttgccagtctatttaccctttacacgatgtgttcgttaggaaagttaaaatgttgaaaaagcctaagttcgagttgggaaaactcatggaacttcacggggagggctccagcagtggcaaggcaaccggagacgaaaccggggctaaggtggagcgtgcggatggctacgaacctccagtgcaggaaagtgtgtag

SEQ ID NO: 18095 - DNA, 627 bp, Artificial Sequence
  derived and/or modified sequence
aaaaggttgaccaaggggggaaagaaaggggctaaaaagaaagttgtggaccctttctcaaagaaggactggtacgatgtgaaggctcctgcaatgttcaatattcggaacattgggaagactctggtgactcgaacacagggtaccaagattgcttccgacgggctcaaaggccgagtattcgaaactatgatcgaggcccacgtagatgtgaagaccactgatggatacctccttcgcctgttctgcgtcggatttactaagaaaaggaataatcagattagaaagacctcatacgctcagcaccagcaggtgcgccagattaggaagaaaatgatggagatcatgactcgggaggtccagaccaacgatctgaaggaagtagtgaacaagctgattcccgacagtatcggtaaggacattgagaaagcctgtcagtccatttatccacttcatgatgtattcgtgagaaaagttaaaatgcttaagaagcctaaattcgaactgggtaagcttatggagctgcatggagagggctctagctcagggaaagctacaggagatgagaccggcgcaaaggtcgagcgcgcagacgggtacgagccacctgtgcaagagagcgtctag

SEQ ID NO: 18096 - DNA, 934 bp, Artificial Sequence
  derived and/or modified sequence
tagacggcgcgccccgcccccgtacgcctaagttctcgcgcgactcccacttccgcccttttggctctctgaccagcaccatggcggttggcaagaacaagcgccttacgaaaggcggcaaaaagggagccaagaagaaagtggttgatccattttctaagaaagattggtatgatgtgaaagcacctgctatgttcaatataagaaatattggaaagacgctcgtcaccaggacccaaggaaccaaaattgcatctgatggtctcaagggtcgtgtgtttgaagtgagtcttgctgatttgcagaatgatgaagttgcatttagaaaattcaagctgattactgaagatgttcagggtaaaaactgcctgactaacttccatggcatggatcttacccgtgacaaaatgtgttccatggtcaaaaaatggcagacaatgattgaagctcacgttgatgtcaagactaccgatggttacttgcttcgtctgttctgtgttggttttactaaaaaacgcaacaatcagatacggaagacctcttatgctcagcaccaacaggtccgccaaatccggaagaagatgatggaaatcatgacccgagaggtgcagacaaatgacttgaaagaagtggtcaataaattgattccagacagcattggaaaagacatagaaaaggcttgccaatctatttatcctctccatgatgtcttcgttagaaaagtaaaaatgctgaagaagcccaagtttgaattgggaaagctcatggagcttcatggtgaaggcagtagttctggaaaagccactggggacgagacaggtgctaaagttgaacgagctgatggatatgaaccaccagtccaagaatctgtttaaagttcagacttcaaatagtggcaaataaaaagtgctatttgtgatggtttgcttctgaa

SEQ ID NO: 18097 - DNA, 1386 bp, Artificial Sequence
  derived and/or modified sequence
ccttttggctctctgaccagcaccatggcggttgccaagaagaaagtggttgatccattttctaagaaagattggtatgatgtgaaagcacctgctatgttcaatataagaaatattggaaagacgctcgtcaccaggacccaaggaaccaaaattgcatctgatggtctcaagggtcgtgtgtttgaagtgagtcttgctgatttgcagaatgatgaagttgcatttagaaaattcaagctgattactgaagatgttcagggtaaaaactgcctgactaacttccatggcatggatcttacccgtgacaaaatgtgttccatggtcaaaaaatggcagacaatgattgaagctcacgttgatgtcaagactaccgatggttacttgcttcgtctgttctgtgttggttttactaaaaaacgcaacaatcagatacggaagacctcttatgctcagcaccaacaggtccgccaaatccggaagaagatgatggaaatcatgacccgagaggtgcagacaaatgacttgaaagaagtggtcaataaattgtaagtgtttctttgcttcctcacacaacacaaccttgagtattggattattcctgagatgagagaacgcatatgagacaaggtaaaggtctgttgaaatcctgtctgtgaatccttctagctatatctctttaagtgaaagagtgttaagtactcagtaaatatgattattattactattattatttgagtcagagtcttgctctgttgcccaggctcgagtgcagtattgtgatcctccttggctcactgtaaccactgcttcctgggttcaagcagttcttgagcctcagcctcctgagtatctgggaatacaggggactgccaccatacccagctaatttttttaaatttttagtagagatggggtttcatcatgttggccaggctggtcttgaactcctgacttcaggtgatctgccagtactctaaatgataacagttttttcgtgtttatttattttgaatgaagctgtctcacagtagatggagttgaaggacaggaaatgtttttcccctacttggaaaatacactgaataagttgagtggggtgggatgtgcctggagtcccagctactcaggaggctgaggtggtaggattgtttgagcccaggagtttgaggccagcctgggcaatatagggagaccctgtcccaaaaaataaaaaatatacgtatatatatatacacacacaaagaaaaaatacactgaatagacaaaacctttcatgattaatgatgcacgggaataagtgatgaaaaaagtttcggtcccagatgatggccagtgataacaacatttttctgatgttcccatgcaatatacagttagctaaga

SEQ ID NO: 18098 - DNA, 862 bp, Artificial Sequence
  derived and/or modified sequence
cgccttacgaaaggcggcaaaaagggagccaagaagaaagttgaaaaatacagtaagaattgatctgcaatggaacttaagcatcttcttaaaatccagggttgatccattttctaagaaagattggtatgatgtgaaagcacctgctatgttcaatataagaaatattggaaagacgctcgtcaccaggacccaaggaaccaaaattgcatctgatggtctcaagggtcgtgtgtttgaagtgagtcttgctgatttgcagaatgatgaagttgcatttagaaaattcaagctgattactgaagatgttcagggtaaaaactgcctgactaacttccatggcatggatcttacccgtgacaaaatgtgttccatggtcaaaaaatggcagacaatgattgaagctcacgttgatgtcaagactaccgatggttacttgcttcgtctgttctgtgttggttttactaaaaaacgcaacaatcagatacggaagacctcttatgctcagcaccaacaggtccgccaaatccggaagaagatgatggaaatcatgacccgagaggtgcagacaaatgacttgaaagaagtggtcaataaattgattccagacagcattggaaaagacatagaaaaggcttgccaatctatttatcctctccatgatgtcttcgttagaaaagtaaaaatgctgaagaagcccaagtttgaattgggaaagctcatggagcttcatggtgaaggcagtagttctggaaaagccactggggacgagacaggtgctaaagttgaacgagctgatggatatgaaccaccagtccaagaatctgtttaaagttcagacttcaaatagtggcaaataaaa

SEQ ID NO: 18099 - DNA, 576 bp, Artificial Sequence
  derived and/or modified sequence
tccgcccttttggctctctgaccagcaccatggcggttggcaagaacaagcgccttacgaaaggcggcaaaaagggagccaagaagaaagtacaatgattgaagctcacgttgatgtcaagactaccgatggttacttgcttcgtctgttctgtgttggttttactaaaaaacgcaacaatcagatacggaagacctcttatgctcagcaccaacaggtccgccaaatccggaagaagatgatggaaatcatgacccgagaggtgcagacaaatgacttgaaagaagtggtcaataaattgattccagacagcattggaaaagacatagaaaaggcttgccaatctatttatcctctccatgatgtcttcgttagaaaagtaaaaatgctgaagaagcccaagtttgaattgggaaagctcatggagcttcatggtgaaggcagtagttctggaaaagccactggggacgagacaggtgctaaagttgaacgagctgatggatatgaaccaccagtccaagaatctgtttaaagttcagacttcaaatagtggcaaataaaaagtgctatttgtga

SEQ ID NO: 18100 - DNA, 985 bp, Artificial Sequence
  derived and/or modified sequence
ccttttggctctctgaccagcaccatggcggttggcaagaacaagcgccttacgaaaggcggcaaaaagggagccaagaagaaagtgtaagtcgcgactgtcgtggcgtcttgctttttgggggtctgctggaatcggcgggctggtcctagatcgcggcgtaggccggatggcgaggattccagtcggattgtgcgggccgtggcggggttgatccattttctaagaaagattggtatgatgtgaaagcacctgctatgttcaatataagaaatattggaaagacgctcgtcaccaggacccaaggaaccaaaattgcatctgatggtctcaagggtcgtgtgtttgaagtgagtcttgctgatttgcagaatgatgaagttgcatttagaaaattcaagctgattactgaagatgttcagggtaaaaactgcctgactaacttccatggcatggatcttacccgtgacaaaatgtgttccatggtcaaaaaatggcagacaatgattgaagctcacgttgatgtcaagactaccgatggttacttgcttcgtctgttctgtgttggttttactaaaaaacgcaacaatcagatacggaagacctcttatgctcagcaccaacaggtccgccaaatccggaagaagatgatggaaatcatgacccgagaggtgcagacaaatgacttgaaagaagtggtcaataaattgattccagacagcattggaaaagacatagaaaaggcttgccaatctatttatcctctccatgatgtcttcgttagaaaagtaaaaatgctgaagaagcccaagtttgaattgggaaagctcatggagcttcatggtgaaggcagtagttctggaaaagccactggggacgagacaggtgctaaagttgaacgagctgatggatatgaaccaccagtccaagaatctgtttaaagttcagacttcaaatagtggcaaataaaaagtgctatttgtga

SEQ ID NO: 18101 - DNA, 671 bp, Artificial Sequence
  derived and/or modified sequence
aagcgccttacgaaaggcggcaaaaagggagccaagaagaaagtggttgatccattttctaagaaagattggtatgatgtgaaagcacctgctatgttcaatataagaaatattggaaagacgctcgtcaccaggacccaaggaaccaaaattgcatctgatggtctcaagggtcgtgtgtttgaaacaatgattgaagctcacgttgatgtcaagactaccgatggttacttgcttcgtctgttctgtgttggttttactaaaaaacgcaacaatcagatacggaagacctcttatgctcagcaccaacaggtccgccaaatccggaagaagatgatggaaatcatgacccgagaggtgcagacaaatgacttgaaagaagtggtcaataaattgattccagacagcattggaaaagacatagaaaaggcttgccaatctatttatcctctccatgatgtcttcgttagaaaagtaaaaatgctgaagaagcccaagtttgaattgggaaagctcatggagcttcatggtgaaggcagtagttctggaaaagccactggggacgagacaggtgctaaagttgaacgagctgatggatatgaaccaccagtccaagaatctgtttaaagttcagacttcaaatagtggcaaataaaaagtgctatttgtga

SEQ ID NO: 18102 - DNA, 795 bp, Artificial Sequence
  derived and/or modified sequence
atggccgtgggcaagaacaagagactgaccaagggcggcaagaagggcgccaagaagaaggtggtggaccccttcagcaagaaggactggtacgacgtgaaggcccccgccatgttcaacatcagaaacatcggcaagaccctggtgaccagaacccagggcaccaagatcgccagcgacggcctgaagggcagagtgttcgaggtgagcctggccgacctgcagaacgacgaggtggccttcagaaagttcaagctgatcaccgaggacgtgcagggcaagaactgcctgaccaacttccacggcatggacctgaccagagacaagatgtgcagcatggtgaagaagtggcagaccatgatcgaggcccacgtggacgtgaagaccaccgacggctacctgctgagactgttctgcgtgggcttcaccaagaagagaaacaaccagatcagaaagaccagctacgcccagcaccagcaggtgagacagatcagaaagaagatgatggagatcatgaccagagaggtgcagaccaacgacctgaaggaggtggtgaacaagctgatccccgacagcatcggcaaggacatcgagaaggcctgccagagcatctaccccctgcacgacgtgttcgtgagaaaggtgaagatgctgaagaagcccaagttcgagctgggcaagctgatggagctgcacggcgagggcagcagcagcggcaaggccaccggcgacgagaccggcgccaaggtggagagagccgacggctacgagccccccgtgcaggagagcgtgtag

SEQ ID NO: 18103 - DNA, 528 bp, Artificial Sequence
  derived and/or modified sequence
atggccgtggccaagaagaaggtggtggaccccttcagcaagaaggactggtacgacgtgaaggcccccgccatgttcaacatcagaaacatcggcaagaccctggtgaccagaacccagggcaccaagatcgccagcgacggcctgaagggcagagtgttcgaggtgagcctggccgacctgcagaacgacgaggtggccttcagaaagttcaagctgatcaccgaggacgtgcagggcaagaactgcctgaccaacttccacggcatggacctgaccagagacaagatgtgcagcatggtgaagaagtggcagaccatgatcgaggcccacgtggacgtgaagaccaccgacggctacctgctgagactgttctgcgtgggcttcaccaagaagagaaacaaccagatcagaaagaccagctacgcccagcaccagcaggtgagacagatcagaaagaagatgatggagatcatgaccagagaggtgcagaccaacgacctgaaggaggtggtgaacaagctgtag

SEQ ID NO: 18104 - DNA, 684 bp, Artificial Sequence
  derived and/or modified sequence
atgttcaacatcagaaacatcggcaagaccctggtgaccagaacccagggcaccaagatcgccagcgacggcctgaagggcagagtgttcgaggtgagcctggccgacctgcagaacgacgaggtggccttcagaaagttcaagctgatcaccgaggacgtgcagggcaagaactgcctgaccaacttccacggcatggacctgaccagagacaagatgtgcagcatggtgaagaagtggcagaccatgatcgaggcccacgtggacgtgaagaccaccgacggctacctgctgagactgttctgcgtgggcttcaccaagaagagaaacaaccagatcagaaagaccagctacgcccagcaccagcaggtgagacagatcagaaagaagatgatggagatcatgaccagagaggtgcagaccaacgacctgaaggaggtggtgaacaagctgatccccgacagcatcggcaaggacatcgagaaggcctgccagagcatctaccccctgcacgacgtgttcgtgagaaaggtgaagatgctgaagaagcccaagttcgagctgggcaagctgatggagctgcacggcgagggcagcagcagcggcaaggccaccggcgacgagaccggcgccaaggtggagagagccgacggctacgagccccccgtgcaggagagcgtgtag

SEQ ID NO: 18105 - DNA, 438 bp, Artificial Sequence
  derived and/or modified sequence
atgatcgaggcccacgtggacgtgaagaccaccgacggctacctgctgagactgttctgcgtgggcttcaccaagaagagaaacaaccagatcagaaagaccagctacgcccagcaccagcaggtgagacagatcagaaagaagatgatggagatcatgaccagagaggtgcagaccaacgacctgaaggaggtggtgaacaagctgatccccgacagcatcggcaaggacatcgagaaggcctgccagagcatctaccccctgcacgacgtgttcgtgagaaaggtgaagatgctgaagaagcccaagttcgagctgggcaagctgatggagctgcacggcgagggcagcagcagcggcaaggccaccggcgacgagaccggcgccaaggtggagagagccgacggctacgagccccccgtgcaggagagcgtgtag

SEQ ID NO: 18106 - DNA, 627 bp, Artificial Sequence
  derived and/or modified sequence
aagagactgaccaagggcggcaagaagggcgccaagaagaaggtggtggaccccttcagcaagaaggactggtacgacgtgaaggcccccgccatgttcaacatcagaaacatcggcaagaccctggtgaccagaacccagggcaccaagatcgccagcgacggcctgaagggcagagtgttcgagaccatgatcgaggcccacgtggacgtgaagaccaccgacggctacctgctgagactgttctgcgtgggcttcaccaagaagagaaacaaccagatcagaaagaccagctacgcccagcaccagcaggtgagacagatcagaaagaagatgatggagatcatgaccagagaggtgcagaccaacgacctgaaggaggtggtgaacaagctgatccccgacagcatcggcaaggacatcgagaaggcctgccagagcatctaccccctgcacgacgtgttcgtgagaaaggtgaagatgctgaagaagcccaagttcgagctgggcaagctgatggagctgcacggcgagggcagcagcagcggcaaggccaccggcgacgagaccggcgccaaggtggagagagccgacggctacgagccccccgtgcaggagagcgtgtag

SEQ ID NO: 18107 - protein, 263 aa, Artificial Sequence [sequence omitted]

SEQ ID NO: 18108 - protein, 122 aa, Artificial Sequence
  derived and/or modified sequence
MARGPKKHLKRVAAPKHWMLDKLTGVFAPRPSTGPHKLRECLPLIIFLRNRLKYALTGDEVKKICMQRFIKIDGKVRTDITYPAGFMDVISIDKTGENFRLIYDTKGRFAVHRITPEEAKPC

SEQ ID NO: 18109 - DNA, 792 bp, Artificial Sequence
  derived and/or modified sequence
atggccaggggccccaagaagcacctcaagagagtggccgcccccaaacattggatgctcgacaagctgaccggcgtgtttgctcccagaccttcaaccgggcctcataagctgagagagtgccttccactgatcattttcctgaggaatcgattgaaatacgcgcttaccggagatgaagtgaagaagatctgcatgcagaggtttataaaaatcgatgggaaggttaggaccgacataacctaccccgcaggctttatggacgtcatcagtattgacaaaacgggcgaaaacttcagactaatatatgacaccaaagggcgatttgctgtccaccggattactccagaggaggctaagtataaattgtgtaaagttagaaaaatctttgttggaacgaagggtatcccccacctggtgactcatgatgctaggacaatccgttatcctgacccgctcatcaaagtcaacgatacaatccaaatagatttggagaccggcaaaatcacagatttcatcaagtttgatactggtaatctttgtatggtgacaggaggtgccaacctgggccggatcggtgtgatcacaaatcgagagaggcacccagggagttttgatgttgtccacgttaaggacgccaacgggaacagctttgcgacccgactcagcaatattttcgtgattgggaaagggaacaagccatggatcagtctgccacggggcaagggtattcgcctgactattgctgaggaacgggataagcggctcgcagcaaaacagtccagtggctag

SEQ ID NO: 18110 - DNA, 369 bp, Artificial Sequence
  derived and/or modified sequence
atggcacgggggcccaagaagcatttgaagagagtggccgctcccaaacactggatgttagataagttaactggcgttttcgcgcctaggccttccacaggtcctcacaaacttcgcgagtgcctgccgttgatcatttttctccgcaacagactgaaatatgctttaaccggcgatgaagtgaagaagatctgcatgcagcgatttatcaagattgacggaaaagtacggacagatattacctaccctgccgggttcatggatgtcatttctatcgataagactggcgaaaactttcgtctgatttacgacacaaaggggaggtttgcggtgcaccgtatcactcctgaggaagcgaaaccctgttag

SEQ ID NO: 18111 - DNA, 792 bp, Artificial Sequence
  derived and/or modified sequence
atggcccggggccccaagaagcacctgaagagggtggccgcccccaagcactggatgctggacaagctgactggagtgtttgccccccggcccagcacaggcccccacaagctgcgggagtgcctgcccctcatcatcttcctgaggaaccggctgaagtatgccctgactggagatgaggtgaagaagatctgcatgcagcgcttcatcaagattgatggcaaggtgaggacagacatcacctacccagctggcttcatggatgtgatcagcattgacaagacaggagagaacttccgcctcatctatgacaccaagggccgctttgctgtgcaccgcatcaccccagaggaggccaagtacaagctgtgcaaggtgaggaagatctttgtgggcaccaagggcatcccccacctggtgacccatgatgcccggaccatccgctacccagaccccctcatcaaggtgaatgacaccatccagattgacctggagaccgggaagatcacagacttcatcaagtttgacaccggcaacctgtgcatggtgactggaggagccaacctgggccgcatcggggtcatcaccaaccgggagcggcaccctggcagctttgatgtggtgcacgtgaaggatgccaacggcaacagctttgccacccggctgagcaacatcttcgtcatcggcaagggcaacaagccctggatcagcctgccccggggcaagggcatccggctgaccatcgccgaggagcgggacaagaggctggccgccaagcagagcagcggctag

SEQ ID NO: 18112 - DNA, 369 bp, Artificial Sequence
  derived and/or modified sequence
atggcccggggccccaagaagcacctgaagagggtggccgcccccaagcactggatgctggacaagctgactggagtgtttgccccccggcccagcacaggcccccacaagctgcgggagtgcctgcccctcatcatcttcctgaggaaccggctgaagtatgccctgactggagatgaggtgaagaagatctgcatgcagcgcttcatcaagattgatggcaaggtgaggacagacatcacctacccagctggcttcatggatgtgatcagcattgacaagacaggagagaacttccgcctcatctatgacaccaagggccgctttgctgtgcaccgcatcaccccagaggaggccaagccctgctag

SEQ ID NO: 18113 - DNA, 792 bp, Artificial Sequence
  derived and/or modified sequence
atggcccggggccccaagaagcacctgaagcgggtggccgcccccaaacattggatgttggacaaactgactggcgtcttcgcacccagaccttcaacaggaccacacaaactaagagaatgcctccctctaatcatattcttgcggaataggctaaagtatgcactgactggagacgaggtgaaaaaaatttgcatgcagcggttcatcaagattgatgggaaggtgcgaaccgacatcacctacccggctggcttcatggacgtaattagcatagacaaaacaggtgagaatttcaggttaatatacgacactaaggggagatttgccgtgcatcggattacccccgaagaggctaagtataaactgtgtaaagtgcgaaaaatttttgtgggtacaaaggggatcccgcatctggttactcacgacgccagaaccatccgctatccagatcctcttatcaaagtgaatgacaccatccaaattgatttggaaacaggaaagataacagactttattaaattcgacacaggtaatttatgtatggttactggcggggccaatttgggccgcatcggagtgattacaaaccgcgaaagacaccccggtagctttgatgtcgtccacgtaaaggacgccaatggaaattctttcgccaccagactatccaatatttttgttattggtaaaggaaataaaccttggatatcgctccccagaggtaagggaatcaggctgacaatcgctgaagagagagacaagaggctcgcggccaagcaaagtagcggatag

SEQ ID NO: 18114 - DNA, 369 bp, Artificial Sequence
  derived and/or modified sequence
atggcccggggccccaagaagcacctgaagcgggtggccgcccccaagcattggatgctggacaaactgaccggagtgttcgcgccacgcccctctacagggccccacaagcttcgggagtgcctacccctcattatcttccttcgcaaccgactgaaatacgccttaacaggggacgaggtcaaaaaaatttgtatgcaacgcttcataaaaattgacggtaaggttcgtactgacataacataccccgctggctttatggacgtgattagcatcgataagacaggagaaaacttccggctgatctacgataccaagggtcggtttgccgtccaccggattacccctgaggaggctaaaccctgctag

SEQ ID NO: 18115 - DNA, 792 bp, Artificial Sequence
  derived and/or modified sequence
atggctcggggacctaagaagcacctgaagagggtggccgcaccaaagcactggatgttagataaactgactggcgtttttgctcctcgaccaagcactggaccccacaaattgcgggaatgcttgccactgatcatctttctgcggaaccgactgaaatacgcactgacaggagatgaggtgaaaaaaatctgcatgcagcggtttatcaagattgacggcaaagtgaggaccgacattacttaccctgctggcttcatggacgtgatctcaattgataagaccggcgagaactttcgcttaatatatgacacgaagggcaggttcgctgtgcacaggattacgccagaagaagccaagtacaagctttgcaaagttaggaagatctttgtcggaactaagggaatacctcacctggtgactcacgacgctcggacaattaggtaccctgatccgctcatcaaagtgaacgataccatccaaattgatctggaaaccggaaagattacagacttcattaaattcgacacagggaacttatgcatggtcacgggcggagccaacctgggtcgcattggagtgatcaccaaccgtgaacgccaccctgggtcttttgatgtggtgcacgtgaaggacgcaaatggcaacagctttgcaacccgcctgtccaatatcttcgtgatcggcaagggtaacaaaccttggatcagtctgccccgtgggaaaggcattcgcctaacaattgcagaggaacgagacaaacgattggcagccaagcagtccagcggatag

SEQ ID NO: 18116 - DNA, 369 bp, Artificial Sequence
  derived and/or modified sequence
atggcacgtggccctaagaaacacctgaagcgcgttgcagctcctaaacactggatgctggacaaactcactggggtgttcgctcctcggccaagtacaggcccacataagctcagggagtgcctgcccctcattattttcctgcgcaatcggttgaagtacgcactgactggcgacgaggtgaagaagatttgcatgcagaggtttatcaagatagatggtaaggttcgcacagatatcacctatcctgccggatttatggacgtcattagcatcgacaagactggggagaactttaggctaatttacgataccaagggaagatttgccgtccaccggatcacgccagaggaggctaagccctgctag

SEQ ID NO: 18117 - DNA, 1526 bp, Artificial Sequence
  derived and/or modified sequence
ggctgagctgggcggagcagctgaaaatccggcgcgcgcagtctccagccccaatttctacgcgcaccggaagacggaggtcctctttccttgcctaacgcagccatggctcgtggtcccaagaagcatctgaagcgggtggcagctccaaagcattggatgctggataaattgaccggtgtgtttgctcctcgtccatccaccggtccccacaagttgagagagtgtctccccctcatcattttcctgaggaacagacttaagtatgccctgacaggagatgaagtaaagaagatttgcatgcagcggttcattaaaatcgatggcaaggtccgaactgatataacctaccctgctggattcatggatgtcatcagcattgacaagacgggagagaatttccgtctgatctatgacaccaagggtcgctttgctgtacatcgtattacacctgaggaggccaagtacaagttgtgcaaagtgagaaagatctttgtgggcacaaaaggaatccctcatctggtgactcatgatgcccgcaccatccgctaccccgatcccctcatcaaggtgaatgataccattcagattgatttggagactggcaagattactgatttcatcaagttcgacactggtaacctgtgtatggtgactggaggtgctaacctaggaagaattggtgtgatcaccaacagagagaggcaccctggatcttttgacgtggttcacgtgaaagatgccaatggcaacagctttgccactcgactttccaacatttttgttattggcaagggcaacaaaccatggatttctcttccccgaggaaagggtatccgcctcaccattgctgaagagagagacaaaagactggcggccaaacagagcagtgggtgaaatgggtccctgggtgacatgtcagatctttgtacgtaattaaaaatattgtggcaggattaatagcattttggttttgtgggttgtttttttttttaattcagtttcctgctattttactgtataacatgaacagtgattaagttctcaggcaggcttaggcagtctgttattggctgggcttagttagtggtgggaagtagaagataccagacttgggaaaggaacagcaactaaccaaggagtagaaagagccaagaaatcccggagtatttatctcccccgccttgacttggccaagaacttctctacacagtggacccctctgccctgttaagttcccttggctttctaaaaatctgccctcattttcttctccagtctgtattgcactagcccatccacaagcctggctcatctgtttttcccactcctgtgcccatcttgccaaacgcaggatgaaaatctccagttgccattaaaggtggtcataaatgggctgttgatgttgcaaagcattgcagttccttggacttagtgcccttattctccagctgccgctgcagtcctcaactctgtttttcagaggacagagatgtagaacataaacttgttcttgcttgtccaaa

SEQ ID NO: 18118 - DNA, 594 bp, Artificial Sequence
  derived and/or modified sequence
aatttctacgcgcaccggaagacggaggtcctctttccttgcctaacgcagccatggctcgtggtcccaagaagcatctgaagcgggtggcagctccaaagcattggatgctggataaattgaccggtgtgtttgctcctcgtccatccaccggtccccacaagttgagagagtgtctccccctcatcattttcctgaggaacagacttaagtatgccctgacaggagatgaagtaaagaagatttgcatgcagcggttcattaaaatcgatggcaaggtccgaactgatataacctaccctgctggattcatggatgtcatcagcattgacaagacgggagagaatttccgtctgatctatgacaccaagggtcgctttgctgtacatcgtattacacctgaggaggccaagccttgttaacagcagactggagggcacgtccagtgggatctgtgattatttgatttacttcaaggatatcagggagtagagatccaaaattgaaatgctatgtgaagtatttgttgattggatgaactggtaatgtaattgctgtttgtgagacaaaactcagtcgtgatgtacagggagc

SEQ ID NO: 18119 - DNA, 792 bp, Artificial Sequence
  derived and/or modified sequence
atggccagaggccccaagaagcacctgaagagagtggccgcccccaagcactggatgctggacaagctgaccggcgtgttcgcccccagacccagcaccggcccccacaagctgagagagtgcctgcccctgatcatcttcctgagaaacagactgaagtacgccctgaccggcgacgaggtgaagaagatctgcatgcagagattcatcaagatcgacggcaaggtgagaaccgacatcacctaccccgccggcttcatggacgtgatcagcatcgacaagaccggcgagaacttcagactgatctacgacaccaagggcagattcgccgtgcacagaatcacccccgaggaggccaagtacaagctgtgcaaggtgagaaagatcttcgtgggcaccaagggcatcccccacctggtgacccacgacgccagaaccatcagataccccgaccccctgatcaaggtgaacgacaccatccagatcgacctggagaccggcaagatcaccgacttcatcaagttcgacaccggcaacctgtgcatggtgaccggcggcgccaacctgggcagaatcggcgtgatcaccaacagagagagacaccccggcagcttcgacgtggtgcacgtgaaggacgccaacggcaacagcttcgccaccagactgagcaacatcttcgtgatcggcaagggcaacaagccctggatcagcctgcccagaggcaagggcatcagactgaccatcgccgaggagagagacaagagactggccgccaagcagagcagcggctag

SEQ ID NO: 18120 - DNA, 369 bp, Artificial Sequence
  derived and/or modified sequence
atggccagaggccccaagaagcacctgaagagagtggccgcccccaagcactggatgctggacaagctgaccggcgtgttcgcccccagacccagcaccggcccccacaagctgagagagtgcctgcccctgatcatcttcctgagaaacagactgaagtacgccctgaccggcgacgaggtgaagaagatctgcatgcagagattcatcaagatcgacggcaaggtgagaaccgacatcacctaccccgccggcttcatggacgtgatcagcatcgacaagaccggcgagaacttcagactgatctacgacaccaagggcagattcgccgtgcacagaatcacccccgaggaggccaagccctgctag

SEQ ID NO: 18121 - protein, 263 aa, Artificial Sequence
  derived and/or modified sequence
MARGPKKHLKRVAAPKHWMLDKLTGVFAPRPSTGPHKLRECLPLIVFLRNRLKYALTGDEVKKICMQRFIKIDGKVRVDVTYPAGFMDVISIEKTGEHFRLVYDTKGRFAVHRITVEEAKYKLCKVRKITVGVKGIPHLVTHDARTIRYPDPVIKVNDTVQIDLGTGKIINFIKFDTGNLCMVIGGANLGRVGVITNRERHPGSFDVVHVKDANGNSFATRLSNIFVIGNGNKPWISLPRGKGIRLTVAEERDKRLATKQSSG

SEQ ID NO: 18122 - protein, 262 aa, Artificial Sequence
  derived and/or modified sequence
MLGRPAKFSKARGPKKHLKRVAAPKHWMLDKLTGVFAPRPSTGPHKLRECLPLIVFLRNRLKYALTGDEVKKICMQRFIKIDGKVRVDVTYPAGFMDVISIEKTGEHFRLVYDTKGRFAVHRITVEEAKYKLCKVRKITVGVKGIPHLVTHDARTIRYPDPVIKVNDTVQIDLGTGKIINFIKFDTGNLCMVIGGANLGRVGVITNRERHPGSFDVVHVKDANGNSFATRLSNIFVIGNGNKPWISLPRGKGIRLTVAEERD

SEQ ID NO: 18123 - DNA, 792 bp, Artificial Sequence
  derived and/or modified sequence
atggcccgcggacccaagaagcacctcaagcgggtcgccgctcctaaacactggatgttagacaaattgactggagtgttcgcgcccaggccgagtacaggcccccacaaacttagggagtgcttacctctgatcgttttcctgagaaatagattaaagtatgcactcaccggcgatgaggtgaaaaaaatctgcatgcagaggtttatcaagattgacgggaaggtacgcgtcgatgttacctatcccgccggctttatggacgttatcagcattgagaagacaggggagcactttcggctagtgtatgacacaaagggaagatttgccgtgcatcgcatcacagtggaggaggccaagtacaagctgtgtaaagtcaggaagattactgtcggtgtcaagggtattcctcaccttgttacccatgacgcgcgtaccatacgttacccagacccagtgataaaagtgaacgacaccgtgcagattgatcttggtacaggtaagattatcaactttatcaaattcgataccggtaatctgtgcatggtgataggcggcgctaacttgggccgagttggagtgatcactaatcgggaacgtcatcctggtagctttgatgtagttcacgtcaaggacgccaacggaaactcctttgccacaaggctgagcaacatctttgtcatcggtaacggcaacaagccatggatatctctcccgcgtgggaaggggatccgcctcacggtcgccgaggaaagggacaaacgcctcgcaactaagcaatcgtcagggtag

SEQ ID NO: 18124 - DNA, 789 bp, Artificial Sequence
  derived and/or modified sequence
atgctaggcagaccagccaaattcagcaaggcccggggaccaaagaaacatcttaaaagagttgccgcgcctaagcactggatgcttgataagctgaccggagtctttgcaccacgtccttcgactgggcctcacaaactgagagaatgcctgcctctcatcgtgtttctacggaacaggttgaagtatgcactcacaggcgatgaggtcaaaaaaatttgcatgcagaggtttatcaagatagacgggaaagtgcgcgtggatgttacctaccccgcaggattcatggacgtgattagcattgagaagactggagaacattttaggctggtgtatgacactaagggaagatttgctgttcacaggatcaccgtcgaagaagcaaaatacaaactctgcaaggtccgcaaaatcacagttggcgtaaagggtatcccccatctcgtgactcacgatgctaggacaatccgttatccggaccccgtcatcaaggtgaatgataccgtgcagattgatctcgggacgggtaaaatcatcaattttatcaaatttgataccgggaatctttgtatggtgatagggggtgccaacctggggcgggtgggtgttataaccaatcgagagcgccacccgggatctttcgacgtggttcatgtgaaggacgccaacgggaactccttcgcaacgcggctgagtaatatattcgtaatcggcaacggaaacaagccttggatcagtttacctcgcggaaagggaattcgtcttactgtggctgaggagagggattag

SEQ ID NO: 18125 - DNA, 792 bp, Artificial Sequence
  derived and/or modified sequence
atggcccggggccccaagaagcacctgaagagggtggccgcccccaagcactggatgctggacaagctgactggagtgtttgccccccggcccagcacaggcccccacaagctgcgggagtgcctgcccctgattgtgttcctgaggaaccggctgaagtatgccctgactggagatgaggtgaagaagatctgcatgcagcgcttcatcaagattgatggcaaggtgcgggtggatgtgacctacccagctggcttcatggatgtgatcagcattgagaagacaggagagcacttccggctggtgtatgacaccaagggccgctttgctgtgcaccgcatcaccgtggaggaggccaagtacaagctgtgcaaggtgaggaagatcaccgtgggcgtgaagggcatcccccacctggtgacccatgatgcccggaccatccgctacccagaccccgtcatcaaggtgaatgacacagtgcagattgacctgggcaccgggaagatcatcaacttcatcaagtttgacaccggcaacctgtgcatggtgattggaggagccaacctgggccgggtgggcgtcatcaccaaccgggagcggcaccctggcagctttgatgtggtgcacgtgaaggatgccaacggcaacagctttgccacccggctgagcaacatctttgtgattggaaatggaaacaagccctggatcagcctgccccggggcaagggcatccggctgactgtggccgaggagcgggacaagaggctggccaccaagcagagcagcggctag

SEQ ID NO: 18126 - DNA, 789 bp, Artificial Sequence
  derived and/or modified sequence
atgctgggccgcccagccaagttcagcaaggcccggggccccaagaagcacctgaagagggtggccgcccccaagcactggatgctggacaagctgactggagtgtttgccccccggcccagcacaggcccccacaagctgagagaatgtctgcccctcatcgtgttcctgaggaaccggctgaagtatgccctgactggagatgaggtgaagaagatctgcatgcagcgcttcatcaagattgatggcaaggtgcgggtggatgtgacctacccagctggcttcatggatgtgatcagcattgagaagacaggagagcacttccggctggtgtatgacaccaagggccgctttgctgtgcaccgcatcaccgtggaggaggccaagtacaagctgtgcaaggtgaggaagatcaccgtgggcgtgaagggcatcccccacctggtgacccatgatgcccggaccatccgctacccagaccctgtgatcaaggtgaatgacacagtgcagattgacctgggcaccgggaagatcatcaacttcatcaagtttgacaccggcaacctgtgcatggtgattggaggagccaacctgggccgggtgggcgtcatcaccaaccgggagcggcaccctggcagctttgatgtggtgcacgtgaaggatgccaatggaaacagctttgccacccggctgagcaacatctttgtgattggaaatggaaacaagccctggatcagcctgccccggggcaagggcatccggctgactgtggccgaggagcgggactag

SEQ ID NO: 18127 - DNA, 792 bp, Artificial Sequence
  derived and/or modified sequence
atggcccggggccccaagaagcacctgaagcgggtggccgcccccaagcattggatgctagataaattaacaggagtctttgcgccccgacctagcacaggcccgcacaagctgcgtgagtgtctgcccctgatagtttttctgcgcaaccgccttaaatatgcgctaaccggggacgaggtcaagaaaatatgtatgcagcggttcattaaaatagatgggaaagtgcgggttgacgttacttacccggccggatttatggacgtgatctccatagaaaagactggtgaacatttccgcctcgtgtatgataccaaaggtcgttttgccgtacatcgaattaccgtggaggaggccaagtacaaactctgtaaggtaagaaaaattacagtgggggtgaagggcatcccacacctcgtgacacacgacgcacgcaccattagatacccagatcctgtaatcaaagtgaacgacacggtccagatcgatctgggtacaggtaaaattattaattttattaagttcgacacaggaaacctgtgcatggtcataggaggggccaacctggggagagtcggtgtgataactaatcgcgagaggcaccctgggtcctttgatgtggtgcatgttaaagacgctaatggaaattcatttgctacccggctgagtaatatcttcgtcattggcaacggcaataaaccttggatctcgctcccccgtggcaaggggatcaggctgactgtggcagaggaacgggacaaacgtttagcgacgaagcagagttctgggtag

SEQ ID NO: 18128 - DNA, 789 bp, Artificial Sequence
  derived and/or modified sequence
atgctgggccggcccgccaagttcagcaaggcccggggccccaagaagcatttgaagcgggttgctgctcctaagcactggatgttagacaaactgacgggagtgtttgcaccacggccaagtacgggcccacataaattacgggaatgtttgccgcttatcgtgtttctgagaaaccgtttgaaatacgccctcactggcgacgaagttaagaagatctgtatgcagcgctttataaagatagatggtaaggtcagagtcgatgtgacataccccgccggctttatggacgtgatttccatcgagaaaaccggggagcactttagactcgtctacgataccaaaggaagattcgctgttcacagaattactgtggaggaagcaaagtacaaattgtgtaaagtcagaaaaattaccgttggggtgaagggcataccacatctagtcacgcacgacgcgcgcacaattcgctaccccgacccagtcattaaggttaacgataccgtgcaaatcgaccttgggaccggaaaaattatcaattttataaaattcgatacaggcaatctctgtatggttattgggggggctaacctgggccgtgtcggcgtcatcacaaatcgcgagaggcatcctggttcgtttgacgtggtccacgtgaaggatgccaacgggaacagcttcgcaacaagactgagtaatattttcgtgatcggaaatggtaataaaccctggattagcctgcctaggggcaagggaataaggttgacagtggcggaggagagggactag

SEQ ID NO: 18129 - DNA, 792 bp, Artificial Sequence
  derived and/or modified sequence
atggcgaggggaccaaagaagcatctgaagcgcgtggccgcaccgaagcactggatgctggacaaactgacaggggtatttgcccctcgcccaagcacagggcctcataagctgcgagagtgtctccccctcattgtgttcctgcggaataggcttaagtacgcgcttaccggagacgaagtgaagaagatatgcatgcagcgattcatcaaaatagacggtaaggtgagggtcgatgtcacctaccctgctggctttatggacgttattagtatcgaaaagactggagagcacttccgtcttgtttatgacacaaagggcagatttgcagtgcacaggataacggtggaggaagccaaatataagctttgcaaggtgcgtaagattactgtcggtgttaaggggatcccccacctggtgactcatgatgcacgaacaatcaggtatcctgacccggtgatcaaagtcaatgatactgtgcagattgacttgggcactggcaagatcatcaacttcatcaagttcgatactggcaatctgtgtatggtgattggaggtgccaacctgggtcgtgtcggggtaatcaccaaccgggagaggcaccctgggagctttgacgtggtgcacgtaaaagatgccaacggaaattctttcgccaccagactctccaacatctttgtgatcggaaatggaaacaaaccttggatcagtcttccaagagggaaaggaatccgacttacggtggcggaggagcgggacaaacgtttggcgacgaaacagtcctcggggtag

SEQ ID NO: 18130 - DNA, 789 bp, Artificial Sequence
  derived and/or modified sequence
atgcttggccgtcctgccaagtttagcaaggctaggggacccaaaaaacacctcaagcgcgtcgccgcacctaagcattggatgttagataaactgacaggcgtgtttgcccctcgtccctctaccgggcctcataaactgagggagtgcctgcctttaattgtgttcctgagaaaccgcctcaagtatgccctcacaggggatgaagttaagaaaatctgcatgcagcgcttcattaaaatagacggcaaggttagagttgatgtgacttatcctgctgggtttatggatgtcattagtatcgagaaaacaggagagcacttccggttagtgtatgataccaagggaagatttgcggtgcatcgcatcaccgtagaagaggctaaatacaagttgtgtaaagtgaggaagatcaccgtgggcgttaaaggcatcccccacttagtcactcacgatgctcgcactataaggtaccccgatccagtgattaaggtgaatgacaccgtgcagatcgatctcggtacaggtaagatcattaacttcatcaaattcgataccggtaatctttgtatggtgattggcggagctaacctgggacgggtgggagtaattactaaccgggagcgtcaccctggcagtttcgatgtggtacacgtgaaggacgcaaacgggaactcttttgcaaccagattaagtaacatatttgtcattgggaacgggaataagccctggatatcactgccacgtggtaagggcattagattgaccgtcgccgaggagagagactag

SEQ ID NO: 18131 - DNA, 993 bp, Artificial Sequence
  derived and/or modified sequence
ttccaggatatgaactctacagcggaagaataagaaaccggaactaaacttctcactcatctgacttcctgcggtttacgacaacagactttggttgcaccggaaaagaacagattctcttccgtcgcagagtttcgccatggcccggggccccaagaagcacttaaagcgtgttgcagcgccgaagcattggatgcttgacaaactaacgggtgtatttgcacctcgtccatcgacaggtccccacaagctgagggaatgtcttcctctgatcgtcttcctcaggaatagactcaagtatgcgttgactggagatgaggtaaagaagatatgtatgcaacgtttcatcaaaattgatggcaaggttcgagtggatgtcacataccctgctggattcatggatgtcatcagcatcgagaagacaggtgaacatttccgcctggtctatgacaccaagggccgttttgctgttcaccgcatcacagtggaagaggcaaagtacaagttgtgcaaagtgaggaagattactgtgggagtgaagggaatccctcacctggtgactcatgatgctcgaaccatccgctacccagatcctgtcatcaaggtgaacgatactgtgcagattgatttagggactggcaagataatcaactttatcaaatttgatacaggcaatttgtgtatggtgattggtggagccaacctcggtcgtgttggtgtgatcaccaacagggaaagacatcctggttcttttgatgtggtgcatgtgaaggatgccaatggcaacagctttgccacgaggctttccaacatttttgtcattggcaatggcaataaaccttggatttccctgcccaggggaaagggcattcgacttactgttgctgaagagagagataagaggctggccaccaaacagagcagtggctaaattgcagtagcagcatatctttttttctttgcacaaataaacagtgaattctcgtttcttaa

SEQ ID NO: 18132 - DNA, 811 bp, Artificial Sequence
  derived and/or modified sequence
gcactgtggacgctctcttgacggatgctagggagacccgccaagttttcaaaggcccggggccccaagaagcacttaaagcgtgttgcagcgccgaagcattggatgcttgacaaactaacgggtgtatttgcacctcgtccatcgacaggtccccacaagctgagggaatgtcttcctctgatcgtcttcctcaggaatagactcaagtatgcgttgactggagatgaggtaaagaagatatgtatgcaacgtttcatcaaaattgatggcaaggttcgagtggatgtcacataccctgctggattcatggatgtcatcagcatcgagaagacaggtgaacatttccgcctggtctatgacaccaagggccgttttgctgttcaccgcatcacagtggaagaggcaaagtacaagttgtgcaaagtgaggaagattactgtgggagtgaagggaatccctcacctggtgactcatgatgctcgaaccatccgctacccagatcctgtcatcaaggtgaacgatactgtgcagattgatttagggactggcaagataatcaactttatcaaatttgatacaggcaatttgtgtatggtgattggtggagccaacctcggtcgtgttggtgtgatcaccaacagggaaagacatcctggttcttttgatgtggtgcatgtgaaggatgccaatggcaacagctttgccacgaggctttccaacatttttgtcattggcaatggcaataaaccttggatttccctgcccaggggaaagggcattcgacttactgttgctgaagagagagata

SEQ ID NO: 18133 - DNA, 792 bp, Artificial Sequence
  derived and/or modified sequence
atggccagaggccccaagaagcacctgaagagagtggccgcccccaagcactggatgctggacaagctgaccggcgtgttcgcccccagacccagcaccggcccccacaagctgagagagtgcctgcccctgatcgtgttcctgagaaacagactgaagtacgccctgaccggcgacgaggtgaagaagatctgcatgcagagattcatcaagatcgacggcaaggtgagagtggacgtgacctaccccgccggcttcatggacgtgatcagcatcgagaagaccggcgagcacttcagactggtgtacgacaccaagggcagattcgccgtgcacagaatcaccgtggaggaggccaagtacaagctgtgcaaggtgagaaagatcaccgtgggcgtgaagggcatcccccacctggtgacccacgacgccagaaccatcagataccccgaccccgtgatcaaggtgaacgacaccgtgcagatcgacctgggcaccggcaagatcatcaacttcatcaagttcgacaccggcaacctgtgcatggtgatcggcggcgccaacctgggcagagtgggcgtgatcaccaacagagagagacaccccggcagcttcgacgtggtgcacgtgaaggacgccaacggcaacagcttcgccaccagactgagcaacatcttcgtgatcggcaacggcaacaagccctggatcagcctgcccagaggcaagggcatcagactgaccgtggccgaggagagagacaagagactggccaccaagcagagcagcggctag

SEQ ID NO: 18134 - DNA, 789 bp, Artificial Sequence
  derived and/or modified sequence
atgctgggcagacccgccaagttcagcaaggccagaggccccaagaagcacctgaagagagtggccgcccccaagcactggatgctggacaagctgaccggcgtgttcgcccccagacccagcaccggcccccacaagctgagagagtgcctgcccctgatcgtgttcctgagaaacagactgaagtacgccctgaccggcgacgaggtgaagaagatctgcatgcagagattcatcaagatcgacggcaaggtgagagtggacgtgacctaccccgccggcttcatggacgtgatcagcatcgagaagaccggcgagcacttcagactggtgtacgacaccaagggcagattcgccgtgcacagaatcaccgtggaggaggccaagtacaagctgtgcaaggtgagaaagatcaccgtgggcgtgaagggcatcccccacctggtgacccacgacgccagaaccatcagataccccgaccccgtgatcaaggtgaacgacaccgtgcagatcgacctgggcaccggcaagatcatcaacttcatcaagttcgacaccggcaacctgtgcatggtgatcggcggcgccaacctgggcagagtgggcgtgatcaccaacagagagagacaccccggcagcttcgacgtggtgcacgtgaaggacgccaacggcaacagcttcgccaccagactgagcaacatcttcgtgatcggcaacggcaacaagccctggatcagcctgcccagaggcaagggcatcagactgaccgtggccgaggagagagactag

SEQ ID NO: 18135 - DNA, 3663 bp, Artificial Sequence
  derived and/or modified sequence
atggctcaatttcccacaccgttcggcgggtctctggatatatgggccatcacagtcgaagagagagccaaacacgatcaacagtttcattctctaaagccaatcagcggcttcatcacaggcgatcaagccaggaacttcttcttccagtccggactccctcagcccgtgctggctcagatctgggccctggcagatatgaataacgatgggaggatggatcaggtggagtttagcattgctatgaagcttatcaaactcaagttgcagggctaccagctcccttcagccttgccccccgtcatgaagcagcaacctgttgcaattagctctgctccagcatttggtatggggggcatcgcatccatgcccccactgaccgctgttgctcccgtgccgatgggctccatcccggtggtgggaatgagcccaacactagtgtcctcggtgccgactgcagcggtccctccattggcaaatggcgcccctccagtcattcaacccctgccggcctttgcccatccagccgccactctgcccaaaagtagctccttctcccggtctggccccgggagccagttaaacaccaaactgcaaaaagcacagtctttcgacgtagcaagcgtgccccccgtggccgaatgggccgtgcctcaatccagtcgattgaagtatcggcagctctttaatagtcacgataaaacaatgtccggtcacctgacagggccacaagctcggaccatcctgatgcaatcctcattgccccaggctcagctggcctccatctggaatctgagcgacatcgaccaggacggtaaactaaccgcagaggagttcatcctcgctatgcatctgattgatgtggccatgagcgggcagcctctgcctcccgtgcttcctcctgagtacataccaccctctttcaggcgagtgcggtccggtagcggcattagtgttattagcagcacatctgtggaccagaggctgcctgaggagcctgtgcttgaggatgaacagcaacaactcgagaagaaactgccagtaacgttcgaagataaaaaacgggaaaacttcgaacggggcaatctcgagctggagaagcgtcgccaggcactcttggagcaacagcggaaggagcaggaaagattggcacagttggaacgggccgagcaagaaagaaaggaacgcgagcgccaggagcaagagcggaagcgccagctggagctggagaaacagctggagaaacagcgggagcttgagcggcagcgggaagaggagagacgtaaggagatagagcggcgtgaggcggccaagcgggagctggagcggcagaggcagttggagtgggagagaaaccgacgccaagaacttttgaaccagcgaaataaagagcaagaggatatagttgtcttgaaagctaagaagaagactctggagtttgaattggaggccctgaatgacaaaaaacatcagctcgagggcaaactgcaggatattcgctgtagactgactactcagagacaggagatcgaatccactaataaaagccgtgagttgcgaatcgccgagatcacacacctacagcaacagctgcaggagtcgcaacagatgttgggtcgcctgatcccagaaaaacagattctgaacgatcaactgaagcaggtgcagcagaacagtcttcatagagattctctagtcactctcaaacgagccttggaggccaaagagctggcacgacagcacttgcgagaccaactggacgaggtagagaaggagacgcgctctaaattacaggaaatcgacattttcaacaatcagctgaaagaactgcgcgagatacacaacaaacagcagctgcagaaacaaaagtccatggaggctgagaggttgaagcagaaagagcaagaaaggaagataatcgaacttgagaagcagaaggaggaggctcagcgccgggcccaggagcgggataagcagtggctcgagcacgtgcaacaagaggacgaacatcagaggccacggaagctccatgaggaagagaaactgaagagagaggagtctgtcaagaaaaaagatggagaagagaaaggcaagcaggaagcgcaggataaactgggtagactttttcatcagcaccaggaaccggccaaaccagctgtgcaggcgccctggagcaccgcggagaaagggcccttaacgatcagcgcccaggaaaatgtcaaggtggtatattacagggccttataccctttcgaatcacgctcccacgatgagattacaatccagccaggagatatagttatggtaaagggcgagtgggtcgatgaatcccagaccggcgaaccagggtggctcggtggcgagttgaagggtaagactggttggtttccagccaattatgctgaaaaaattcctgagaacgaagtccctgctcctgtgaagcctgtcactgattcaaccagcgcaccagcccctaaactggctctgcgggagacccccgcccccctggcagtcacaagctccgagcccagtaccacacccaataactgggctgatttctccagtacctggcctacgtctaccaacgagaaacctgagacagataactgggacgcatgggctgcccaaccttcattgaccgtgccctctgcaggtcagctgaggcagcgttcagccttcacgcctgctaccgctacgggatcaagcccctcccctgtgctgggccagggggagaaagtagaagggttgcaggctcaagccctttatccctggcgagccaaaaaggacaatcaccttaacttcaataagaatgatgtgattactgtcttggaacagcaggacatgtggtggttcggcgaagtgcaggggcagaagggatggtttcccaagtcttatgttaagctcatttccggtccaattagaaaatctacctccatggattctgggagctccgagagcccagcctcgctgaagagagtggcatctcccgcagcaaaaccagtggtttctggcgaagagtttattgctatgtatacttatgagagttcagagcagggtgacctcacatttcagcaaggagacgtgatcttggtcactaaaaaagatggcgattggtggactggcactgtgggggataaggctggggtgtttccaagtaactacgttaggctcaaggattctgaaggaagtgggaccgctggcaaaacaggctctctgggaaaaaagcccgaaattgcccaagtgatagccagttacactgcgaccgggccagagcagctgactctcgcccctggccagctgatcttgattcgcaaaaaaaatcctggaggctggtgggaaggagagttgcaggcaagagggaagaagcgacagattgggtggttccccgccaattacgtgaagctgctctcgccaggaacatctaagattaccccaactgagccacccaagagtacagccttggcagcagtgtgtcaggttatcggaatgtacgactataccgcccagaacgacgacgagctagccttcaataagggacaaatcatcaacgtgttgaacaaagaggaccccgactggtggaaaggggaagtcaatgggcaggtgggcctcttcccatccaattatgtgaagcttaccaccgacatggacccctcacaacagtag

SEQ ID NO: 18136 - DNA, 5437 bp, Artificial Sequence
  derived and/or modified sequence
gagcgagggagggagcgaaggaggtagagaagagtggaggcgccaggggagggagcgtagcttggttgctccgtagtacggcggctcgcgaggaagaatcccgagcgggctccgggacggacagagaggcgggcggggatggtgtgcggggctgcggctcctgcgtccctcccagcggcgcgtgagcggcactgatttgtccctggggcggcagcgcggacccgcccggagatgaggcgtcgattagcaaggtaaaagtaacagaaccatggctcagtttccaacaccttttggtggcagcctggatatctgggccataactgtagaggaaagagcgaagcatgatcagcagttccatagtttaaagccaatatctggattcattactggtgatcaagctagaaactttttttttcaatctgggttacctcaacctgttttagcacagatatgggcactagctgacatgaataatgatggaagaatggatcaagtggagttttccatagctatgaaacttatcaaactgaagctacaaggatatcagctaccctctgcacttccccctgtcatgaaacagcaaccagttgctatttctagcgcaccagcatttggtatgggaggtatcgccagcatgccaccgcttacagctgttgctccagtgccaatgggatccattccagttgttggaatgtctccaaccctagtatcttctgttcccacagcagctgtgccccccctggctaacggggctccccctgttatacaacctctgcctgcatttgctcatcctgcagccacattgccaaagagttcttcctttagtagatctggtccagggtcacaactaaacactaaattacaaaaggcacagtcatttgatgtggccagtgtcccaccagtggcagagtgggctgttcctcagtcatcaagactgaaatacaggcaattattcaatagtcatgacaaaactatgagtggacacttaacaggtccccaagcaagaactattcttatgcagtcaagtttaccacaggctcagctggcttcaatatggaatctttctgacattgatcaagatggaaaacttacagcagaggaatttatcctggcaatgcacctcattgatgtagctatgtctggccaaccactgccacctgtcctgcctccagaatacattccaccttcttttagaagagttcgatctggcagtggtatatctgtcataagctcaacatctgtagatcagaggctaccagaggaaccagttttagaagatgaacaacaacaattagaaaagaaattacctgtaacgtttgaagataagaagcgggagaactttgaacgtggcaacctggaactggagaaacgaaggcaagctctcctggaacagcagcgcaaggagcaggagcgcctggcccagctggagcgggcggagcaggagaggaaggagcgtgagcgccaggagcaagagcgcaaaagacaactggaactggagaagcaactggaaaagcagcgggagctagaacggcagagagaggaggagaggaggaaagaaattgagaggcgagaggctgcaaaacgggaacttgaaaggcaacgacaacttgagtgggaacggaatcgaaggcaagaactactaaatcaaagaaacaaagaacaagaggacatagttgtactgaaagcaaagaaaaagactttggaatttgaattagaagctctaaatgataaaaagcatcaactagaagggaaacttcaagatatcagatgtcgattgaccacccaaaggcaagaaattgagagcacaaacaaatctagagagttgagaattgccgaaatcacccatctacagcaacaattacaggaatctcagcaaatgcttggaagacttattccagaaaaacagatactcaatgaccaattaaaacaagttcagcagaacagtttgcacagagattcacttgttacacttaaaagagccttagaagcaaaagaactagctcggcagcacctacgagaccaactggatgaagtggagaaagaaactagatcaaaactacaggagattgatattttcaataatcagctgaaggaactaagagaaatacacaataagcaacaactccagaagcaaaagtccatggaggctgaacgactgaaacagaaagaacaagaacgaaagatcatagaattagaaaaacaaaaagaagaagcccaaagacgagctcaggaaagggacaagcagtggctggagcatgtgcagcaggaggacgagcatcagagaccaagaaaactccacgaagaggaaaaactgaaaagggaggagagtgtcaaaaagaaggatggcgaggaaaaaggcaaacaggaagcacaagacaagctgggtcggcttttccatcaacaccaagaaccagctaagccagctgtccaggcaccctggtccactgcagaaaaaggtccacttaccatttctgcacaggaaaatgtaaaagtggtgtattaccgggcactgtacccctttgaatccagaagccatgatgaaatcactatccagccaggagacatagtcatggttaaaggggaatgggtggatgaaagccaaactggagaacccggctggcttggaggagaattaaaaggaaagacagggtggttccctgcaaactatgcagagaaaatcccagaaaatgaggttcccgctccagtgaaaccagtgactgattcaacatctgcccctgcccccaaactggccttgcgtgagacccccgcccctttggcagtaacctcttcagagccctccacgacccctaataactgggccgacttcagctccacgtggcccaccagcacgaatgagaaaccagaaacggataactgggatgcatgggcagcccagccctctctcaccgttccaagtgccggccagttaaggcagaggtccgcctttactccagccacggccactggctcctccccgtctcctgtgctaggccagggtgaaaaggtggaggggctacaagctcaagccctatatccttggagagccaaaaaagacaaccacttaaattttaacaaaaatgatgtcatcaccgtcctggaacagcaagacatgtggtggtttggagaagttcaaggtcagaagggttggttccccaagtcttacgtgaaactcatttcagggcccataaggaagtctacaagcatggattctggttcttcagagagtcctgctagtctaaagcgagtagcctctccagcagccaagccggtcgtttcgggagaagaatttattgccatgtacacttacgagagttctgagcaaggagatttaacctttcagcaaggggatgtgattttggttaccaagaaagatggtgactggtggacaggaacagtgggcgacaaggccggagtcttcccttctaactatgtgaggcttaaagattcagagggctctggaactgctgggaaaacagggagtttaggaaaaaaacctgaaattgcccaggttattgcctcatacaccgccaccggccccgagcagctcactctcgcccctggtcagctgattttgatccgaaaaaagaacccaggtggatggtgggaaggagagctgcaagcacgtgggaaaaagcgccagataggctggttcccagctaattatgtaaagcttctaagccctgggacgagcaaaatcactccaacagagccacctaagtcaacagcattagcggcagtgtgccaggtgattgggatgtacgactacaccgcgcagaatgacgatgagctggccttcaacaagggccagatcatcaacgtcctcaacaaggaggaccctgactggtggaaaggagaagtcaatggacaagtggggctcttcccatccaattatgtgaagctgaccacagacatggacccaagccagcaatgaatcatatgttgtccatccccccctcaggcttgaaagtcctcaaagagacccactatcccatatcactgcccagagggatgatgggagatgcagccttgatcatgtgacttccagcatgatcacctactgccttctgagtagaagaactcactgcagagcagtttacctcattttaccttagttgcatgtgatcgcaatgtttgagttattacttgcagagataggagcaaaaattacaaaaacacacagggtagtgggtccttttgtggctttcctagttactcaaattgactttcccccacctttgcacaggtgctttcaatagttttaaaattatttttaaatatatattttagctttttaataaacaaaataaataaatgacttctttgctattttggttttgcaaaaagacccactatcaaggaatgctgcatgtgctattaaaaattgttccaaatgtccataaatctgagacttgatgtattttttcattttgtccagtgttaccaactaaattgtgcagtttggggcttttcccccttaccatagaagtgcagaggagttcagtatctctgttttaaagacgtatagaatgagcccaattaaagcgaaggtgtttgtgcttgtttgtgtgtatcagctgtaccttgttgagcatgtaatacatcctgtacataagaaattagttctttccatggcaaagctattaccttgtacgatgctctaatcatattgcatttaattttattttgcacagtgaccttgtagccacatgagaaagcactctgtgtttttgttcggtctcagatttatctggttgagttggtgttttgtttggggtttttaattttgcgtgtttgcatagcataaaatcagtagacaacaccactgaggtcgttacgatcaacgatatccacagtctctttttagtctctgttacatgaagttttattccagttacttttcatggaatgacctattttgaacaagtaattttcttgacaagaaagaatgtatagaagtctccctgcaattaatttccaatgtttacattttttaactagactgtggaatttctacagattaatatgaaatggagctcatggtccgtttgtgtgttagatatgctgtagctgaagccctgtttgtcttttaaacactagttggaagctctcaataaaaatgcctgctgctcacagcacagaaaatggggcagggggagcctcaagcacaatctagctgtcctcctaaagactctgtaatgctcactcccctcgcgttctcccggcgctgtcgggaggctgtgctggtggtcgtgtagaggtccttctcctttcacatggtgcagagagcgaggacctctcctcctcgttcagttgcacttcagtattttcacggatatgaatgtaaaatatataaatatataaacctgcggctttaacaactgtaatacaaccttttgaattagttccgtgtatagataattaaattcttcatacaaaa

SEQ ID NO: 18137 - DNA, 3663 bp, Artificial Sequence
  derived and/or modified sequence
atggcccagttccccaccccatttggaggcagcctggacatctgggccatcaccgtggaggagcgggccaagcatgaccagcagttccacagcctgaagcccatcagcggcttcatcaccggggaccaggccaggaacttcttcttccagagcggcctgccccagcctgtgctggcccagatctgggccctggccgacatgaacaatgatggccgcatggaccaggtggagttcagcatcgccatgaagctgatcaagctgaagctgcagggctaccagctgcccagcgccctgccccctgtgatgaagcagcagcctgtggccatcagcagcgccccagccttcggcatgggcggcatcgcctccatgccacccctgacagctgtggcccctgtgcccatgggcagcatccctgtggtgggcatgagccccaccctggtgtcctctgtgcccacagctgctgtgccccccctggccaacggggcccctcctgtgatccagcccctgcctgcctttgcccaccctgctgccaccctgcccaagagcagcagcttcagccgcagcggccctggcagccagctgaacaccaagctgcagaaggcccagagctttgatgtggcctctgtgccccctgtggccgagtgggccgtgccccagagcagccggctgaagtaccggcagctgttcaacagccatgacaagaccatgagcggccacctgaccggcccccaggcccggaccatcctgatgcagagcagcctgccccaggcccagctggccagcatctggaacctgagtgacatcgaccaggacggcaagctgacagctgaggagttcatcctggccatgcacctgattgatgtggccatgagcggccagcccctgccccctgtgctgcccccagagtacatccccccatccttcagaagagtgcgcagcggcagcggcatcagcgtcatcagcagcacctctgtggaccagaggctgcctgaggagcctgtgctggaggatgagcagcagcagctggagaagaagctgcctgtgacctttgaggacaagaagcgggagaactttgagcggggcaacctggagctggagaagaggcggcaggccctgctggagcagcagaggaaggagcaggagcggctggcccagctggagagagctgagcaggagaggaaggagcgggagcggcaggagcaggagaggaagaggcagctggagctggagaagcagctggagaagcagcgggagctggagcggcagcgggaggaggagaggaggaaggagattgaaagaagagaggccgccaagcgggagctggagcggcagaggcagctggagtgggagaggaacagacggcaggagctgctgaaccagaggaacaaggagcaggaggacatcgtggtgctgaaggccaagaagaagaccctggagtttgagctggaggccctgaatgacaagaagcaccagctggagggcaagctgcaggacatccgctgccgcctgaccacccagaggcaggagattgagagcaccaacaagagccgggagctgagaattgctgagatcacccacctgcagcagcagctgcaggagagccagcagatgctgggccgcctcatccctgagaagcagatcctgaatgaccagctgaagcaggtgcagcagaacagcctgcaccgggacagcctggtgaccctgaagagggccctggaggccaaggagctggcccggcagcacctgcgggaccagctggatgaggtggagaaggagaccaggagcaagctgcaggagattgacatcttcaacaaccagctgaaggagctgcgggagatccacaacaagcagcagctgcagaagcagaagtccatggaggccgagcggctgaagcagaaggagcaggagaggaagatcatcgagctggagaagcagaaggaggaggcccagaggcgggcccaggagcgggacaagcagtggctggagcacgtgcagcaggaggatgagcaccagaggcccaggaagctgcacgaggaggagaagctgaagcgggaggagagcgtgaagaagaaggatggagaggagaagggcaagcaggaggcccaggacaagctgggccgcctcttccaccagcaccaggagcccgccaagccagctgtgcaggccccctggagcacagctgagaagggccccctgaccatcagcgcccaggagaatgtgaaggtggtgtactaccgggccctgtacccctttgagagccgcagccatgatgagatcaccatccagcccggggacatcgtgatggtgaagggggagtgggtggatgagagccagacaggagagcccggctggctgggcggggagctgaagggcaagacaggctggttccctgccaactatgcagagaagatcccagaaaatgaggtgcctgcccctgtgaagcctgtgacagacagcaccagcgccccagcccccaagctggccctgcgggagaccccagcccccctggccgtgaccagcagcgagcccagcaccacccccaacaactgggccgacttcagcagcacctggcccaccagcaccaatgagaagccagagacagacaactgggatgcctgggccgcccagcccagcctgactgtgcccagcgctggccagctgcggcagaggtctgccttcaccccagccacagccaccggcagcagccccagccctgtgctgggccagggcgagaaggtggagggcctgcaggcccaggccctgtacccctggagggccaagaaggacaaccacctgaacttcaacaagaatgatgtgatcaccgtgctggagcagcaggacatgtggtggtttggagaggtgcagggccagaagggctggttccccaagagctatgtgaagctgatcagcggccccatcaggaagagcacctccatggattctggcagcagcgagagccctgccagcctgaagagggtggccagccctgctgccaagcctgtggtgtctggagaggagttcatcgccatgtacacctatgagagcagcgagcagggcgacctgaccttccagcagggagatgtgatcctggtgaccaagaaggatggagactggtggacaggcaccgtgggggacaaggccggggtcttccccagcaactacgtgcggctgaaggacagcgagggcagcggcacagctgggaagacaggcagcctgggcaagaagccagagatcgcccaggtgattgccagctacacagccaccggccctgagcagctgaccctggcccctggccagctgatcctgatcaggaagaagaaccctgggggctggtgggagggggagctgcaggcccggggcaagaagaggcagatcggctggttccctgccaactacgtgaagctgctgagccctggcaccagcaagatcacccccacagagccccccaagagcacagccctggccgctgtgtgccaggtgattggcatgtatgactacacagcccagaatgatgatgagctggccttcaacaagggccagatcatcaacgtgctgaacaaggaggaccctgactggtggaagggggaggtgaatggccaggtgggcctcttccccagcaactacgtgaagctgaccacagacatggaccccagccagcagtag

SEQ ID NO: 18138 - DNA, 3663 bp, Artificial Sequence
  derived and/or modified sequence
atggcccagttccccacccccttcggcggcagcctggacatctgggctatcactgttgaagaacgtgctaagcacgatcagcagttccatagcctcaagcccatttctggtttcatcactggggaccaagcccgaaactttttttttcagtccggtctcccgcagcctgtgctcgcccagatttgggcattggccgatatgaataacgacgggcggatggaccaggtcgaattctcgattgccatgaagttgatcaaacttaagctccaggggtaccagttgcctagcgctctgccccccgtgatgaaacagcagcctgtggcgatcagctctgcccccgcgttcggcatgggaggaatcgcttccatgcctccccttacagcggtggctcccgtgcctatgggctccattccagtcgtggggatgagcccaaccctggtcagtagcgtcccaaccgcagccgtcccacctttggcaaatggcgcgccccccgtcatccagccactgcccgcgttcgcccaccccgcagccacacttccgaaaagttcttccttcagccggagcggaccaggctctcagcttaacacaaagttacagaaggcccagtcattcgatgttgcctccgttccacctgtggccgagtgggccgtccctcagtctagccggctgaaatatcgccagctcttcaatagccatgataaaaccatgtccggccacctgactggtcctcaggcaaggactattctgatgcagagctccctgccccaggcccagcttgcaagtatctggaacctgagtgatattgaccaagacggaaagttgactgcagaggagttcatattggcgatgcatctgattgatgttgcaatgagcgggcagcccctacccccagtcctgcctcccgaatacataccacccagtttccgacgagtgcgcagtggcagcggaatttccgtcatcagcagtactagcgtggatcaaagattgcccgaggaacctgtgctcgaggacgaacagcagcagctggaaaaaaagttgccggtgacctttgaagataagaaacgggaaaatttcgagagaggaaatctcgaactggagaagcggcgccaggctcttctggagcagcagcgaaaggagcaggagagacttgcccagctggagcgcgcagaacaggagcggaaggaacgggaaaggcaggaacaagaaagaaaacggcagctggagctcgagaagcaactcgaaaagcagcgagagctggaacgccaaagggaggaggagcggcggaaggaaatcgagaggagggaggcagcaaagagggagctggagcgtcagcgccagctggaatgggaacgcaacaggcggcaggaacttctaaaccaacgaaacaaagagcaggaagacatcgttgtattaaaggccaagaaaaagaccctggagttcgagctggaggcgctcaacgataaaaaacaccagctcgagggtaaactgcaggacatcaggtgtcgcttaactactcaaagacaagagatagaatccacaaataagtctcgggagttgaggattgccgaaattactcacttacagcagcagttacaggaaagccagcaaatgttagggcggttgatcccggaaaaacaaatcctcaacgaccagctgaaacaagtgcaacaaaattcattgcatagagattctcttgttaccctgaagcgggctctggaggctaaagaactagcccgccagcacctacgtgaccaactggatgaagtcgaaaaagaaacaaggtcaaaattgcaggagatagatatatttaacaaccagctgaaggagctgagggaaatccataataagcagcagctgcaaaagcaaaaaagcatggaggccgagaggctcaagcagaaggagcaggaaaggaagattatcgaactagaaaagcaaaaggaggaagcacagcgaagagcacaagagagggacaaacaatggcttgaacatgtgcagcaggaagatgagcaccagcgccctcggaaactccacgaggaggagaagctgaagagagaagaaagcgtcaaaaagaaagatggtgaggagaagggaaagcaggaggcccaggacaagctgggcaggctcttccatcagcaccaagaacccgccaagcccgccgtgcaagccccatggtccactgccgagaaggggcccttaactatcagcgcacaagaaaatgttaaggtggtgtattatagagcactatatccctttgaatcccggtcccacgacgagataactatccagcccggagacatcgtcatggtgaagggtgagtgggtcgacgaatcacagacaggtgaaccaggatggttgggtggcgaattgaaaggcaaaacgggctggttccccgccaactacgctgaaaagatccctgagaatgaagtgcctgctcctgtgaagccagtgacggattctacgagcgcccctgcgcccaagcttgctctgcgggagacccccgctccactggcagttactagctccgagccaagtacaacaccgaataattgggccgacttctcctcgacatggcccacaagcactaacgagaagcctgagactgacaattgggatgcatgggcagcacagccaagtttgaccgtgcccagcgccggtcagctccgacagagatccgcgtttacccctgccactgccactgggagttccccgtcccccgtgcttggtcagggggagaaggtagagggactgcaagctcaggctctgtacccatggagggcaaagaaagataatcacttgaacttcaataagaacgacgtaataacagtgcttgaacagcaggatatgtggtggtttggggaggttcagggacaaaaaggatggttccccaaaagctatgttaagctgatcagcggtcctatccggaaaagcacttcaatggattccgggtcctcagagtctcctgcctctctgaagagagtagccagtccagccgccaagcccgtggtgagtggggaagagttcatcgccatgtatacttatgagtccagcgagcaaggggacctgactttccagcagggggacgttatcctggtgacgaagaaagacggcgattggtggaccgggacggtgggcgacaaggccggcgtctttccatcgaattatgtccggctgaaggactccgaggggagcggaacggccgggaagacaggtagcttaggaaaaaagcctgaaatcgcacaggttatcgcctcatatactgcgaccggacccgaacaactgactttggctcccggtcagctgatcttaattaggaagaagaaccctgggggttggtgggaaggcgaactccaagctcggggtaagaagcggcaaatcggctggtttcctgctaattacgtgaagctcctgtctcccggcacctccaagatcacaccaactgaacctcccaagtccactgccctcgccgccgtttgccaggtcattggtatgtatgactacacggcccagaacgatgacgagctcgctttcaacaaagggcagatcatcaacgtgctgaacaaagaagaccccgactggtggaaaggcgaggtcaacggccaggttggcttgttcccgagcaattatgttaagctaaccactgatatggatccctcccagcagtag

SEQ ID NO: 18139 - DNA, 3663 bp, Artificial Sequence
  derived and/or modified sequence
atggcacagtttccaactccctttggaggcagcctcgacatatgggcaattaccgtggaagaaagggccaaacacgatcagcagtttcacagcctgaaaccaatctccggcttcatcacaggcgaccaggctcgaaattttttttttcagtcggggctcccccagccagtgctggcgcaaatctgggccctggcggatatgaacaacgacgggagaatggaccaggtggagttctccatcgctatgaaactcattaagttgaaactgcagggataccagctcccctccgctcttccccctgttatgaaacagcagccagtcgcaatttctagcgcacccgcttttggcatgggtgggattgcttccatgccccctctgacagcagtcgcccctgtgcctatgggctcaattccagtagtgggaatgtcacccacactggtctctagcgtaccaacagccgctgttcctccactggctaacggggctcccccagtgatacagccccttcccgcatttgcacaccctgccgctacactgcccaaatctagcagcttctcgcgatccggtcccggtagccagctgaataccaaattgcagaaagctcaatcttttgatgtggcctcagttccccctgtggcagagtgggctgtgccccagtcatcgcggctgaagtatcgacaattattcaactcccatgataaaacaatgtctgggcatctgaccgggccacaagctcgcacaatactgatgcagtcctctttaccccaagctcagctggcctccatttggaatttatcggacatagaccaagatggtaaactgactgcagaggagttcattctggctatgcatttgatcgatgtggcaatgagcgggcagccactcccacccgttctccctccagaatatataccgccttcgtttagacgcgtaagaagcggttccgggatctccgtaataagcagcaccagtgtggaccagcgactcccggaggaacctgtcctggaggatgagcagcagcaattggagaagaagctgcctgtaaccttcgaggacaagaagcgtgaaaattttgagcgcggtaacctcgaactggaaaaacggaggcaggccttgctggagcagcagcgtaaggagcaggagcgattggcccaactggagcgcgctgagcaggagcgcaaagagagggaacggcaagagcaggaaagaaagcgacagttggagcttgaaaagcagcttgaaaagcagcgggagctggagaggcaacgggaagaagagcggcgaaaggaaatcgagagaagagaggccgcaaagcgggagttagaacggcagcgccagcttgaatgggaacgcaaccgtcggcaggagttgcttaatcagcgaaataaggagcaggaggatattgtggtcctaaaagccaaaaagaaaactttagaattcgaactggaggcccttaatgacaagaaacaccagttggagggcaaattgcaggatattcggtgccggctcaccacacagaggcaggaaatcgagagcacgaataaaagccgtgaacttaggattgccgagataacacatcttcagcaacaattgcaagaatcccagcagatgctgggacggctgatcccagagaaacagattttaaacgatcagctgaagcaggttcagcagaattcacttcaccgcgatagtttggtgaccttaaagcgggctttagaggcaaaggaacttgcacgccagcacttacgcgatcagttggacgaagtggagaaggaaacaaggagcaaactgcaggagatcgatattttcaacaatcagttgaaagagttacgcgagatccataacaaacagcagctccagaagcaaaagtcaatggaggccgagaggctgaaacagaaggaacaggagaggaagattattgaactggagaagcagaaggaagaggcacagcggagggcccaagaaagggataaacagtggctggagcacgttcagcaggaagacgaacaccagaggccgaggaaactccatgaggaagagaaattaaagcgggaggaatctgtgaaaaaaaaagatggcgaggaaaaaggaaaacaggaggcccaggacaagctcgggagactgttccatcagcaccaagaaccagctaagccggcagtgcaggccccatggtcaaccgccgagaaagggcctctcactatctcagcccaggaaaatgtgaaggtggtctactatcgagctctctatccattcgaaagccgctcacatgatgagattacaatacaaccaggcgacatcgtcatggtgaagggtgagtgggtggacgaaagtcagacaggcgagccgggatggttgggaggagagctgaaaggcaagacgggttggttccctgcgaattacgcggagaaaattcctgaaaatgaggtgccggcacccgtcaaacctgtgactgactcaacctccgcgccagctccaaaactcgccttgcgcgagacccctgcccctcttgccgtcacctccagcgagcctagcactacaccgaacaactgggccgattttagtagcacttggccaacaagtaccaacgaaaaaccagaaaccgacaattgggatgcctgggccgcacagccttctctcacagtgccttcggctggtcaactgagacaaaggtccgctttcaccccagcaaccgccaccggatccagccctagccccgttttgggacagggtgaaaaggtggaaggtcttcaggctcaagctctgtatccctggcgggctaaaaaggacaaccacttaaattttaacaagaatgatgtgattaccgtcctggaacagcaggacatgtggtggttcggcgaggtccaaggacaaaagggctggttccctaagtcgtacgtcaagctaatctctggccctattcgtaaatcaacatcaatggactcagggtcatcggagagccctgcctccctcaagcgggtggcctctccagcggctaaacccgtagtgtccggcgaagagttcatcgctatgtatacatacgaatcctccgagcaaggagacctcacgttccagcaaggagatgtaatccttgtcaccaagaaagacggagactggtggacgggcacggttggcgacaaggccggtgtgtttccctctaactacgtgaggcttaaggattccgaaggctcaggtaccgctggtaaaaccgggtccctgggaaaaaaacccgagatcgcccaggtcatcgctagctacaccgcgacaggccctgagcagctgaccctagcgcctggacagctcatcttgatccggaaaaaaaaccctggtggctggtgggaaggtgaactccaggctcgtggaaagaaaaggcagataggttggtttccagctaactacgtgaagttgctgagccccggtacctccaaaatcacacccaccgagccccctaaaagtacggccctcgctgcagtatgccaggtgatcggcatgtatgattacaccgctcagaatgacgacgagttagctttcaataagggccagatcatcaatgtgctgaataaggaagatcccgactggtggaaaggtgaagtgaacgggcaggtcgggctcttccctagcaactacgttaaacttacaactgatatggacccatcccagcaatag

SEQ ID NO: 18140 - DNA, 3663 bp, Artificial Sequence
  derived and/or modified sequence
atggcccagttccccacccccttcggcggcagcctggacatctgggccatcaccgtggaggagagagccaagcacgaccagcagttccacagcctgaagcccatcagcggcttcatcaccggcgaccaggccagaaacttcttcttccagagcggcctgccccagcccgtgctggcccagatctgggccctggccgacatgaacaacgacggcagaatggaccaggtggagttcagcatcgccatgaagctgatcaagctgaagctgcagggctaccagctgcccagcgccctgccccccgtgatgaagcagcagcccgtggccatcagcagcgcccccgccttcggcatgggcggcatcgccagcatgccccccctgaccgccgtggcccccgtgcccatgggcagcatccccgtggtgggcatgagccccaccctggtgagcagcgtgcccaccgccgccgtgccccccctggccaacggcgccccccccgtgatccagcccctgcccgccttcgcccaccccgccgccaccctgcccaagagcagcagcttcagcagaagcggccccggcagccagctgaacaccaagctgcagaaggcccagagcttcgacgtggccagcgtgccccccgtggccgagtgggccgtgccccagagcagcagactgaagtacagacagctgttcaacagccacgacaagaccatgagcggccacctgaccggcccccaggccagaaccatcctgatgcagagcagcctgccccaggcccagctggccagcatctggaacctgagcgacatcgaccaggacggcaagctgaccgccgaggagttcatcctggccatgcacctgatcgacgtggccatgagcggccagcccctgccccccgtgctgccccccgagtacatcccccccagcttcagaagagtgagaagcggcagcggcatcagcgtgatcagcagcaccagcgtggaccagagactgcccgaggagcccgtgctggaggacgagcagcagcagctggagaagaagctgcccgtgaccttcgaggacaagaagagagagaacttcgagagaggcaacctggagctggagaagagaagacaggccctgctggagcagcagagaaaggagcaggagagactggcccagctggagagagccgagcaggagagaaaggagagagagagacaggagcaggagagaaagagacagctggagctggagaagcagctggagaagcagagagagctggagagacagagagaggaggagagaagaaaggagatcgagagaagagaggccgccaagagagagctggagagacagagacagctggagtgggagagaaacagaagacaggagctgctgaaccagagaaacaaggagcaggaggacatcgtggtgctgaaggccaagaagaagaccctggagttcgagctggaggccctgaacgacaagaagcaccagctggagggcaagctgcaggacatcagatgcagactgaccacccagagacaggagatcgagagcaccaacaagagcagagagctgagaatcgccgagatcacccacctgcagcagcagctgcaggagagccagcagatgctgggcagactgatccccgagaagcagatcctgaacgaccagctgaagcaggtgcagcagaacagcctgcacagagacagcctggtgaccctgaagagagccctggaggccaaggagctggccagacagcacctgagagaccagctggacgaggtggagaaggagaccagaagcaagctgcaggagatcgacatcttcaacaaccagctgaaggagctgagagagatccacaacaagcagcagctgcagaagcagaagagcatggaggccgagagactgaagcagaaggagcaggagagaaagatcatcgagctggagaagcagaaggaggaggcccagagaagagcccaggagagagacaagcagtggctggagcacgtgcagcaggaggacgagcaccagagacccagaaagctgcacgaggaggagaagctgaagagagaggagagcgtgaagaagaaggacggcgaggagaagggcaagcaggaggcccaggacaagctgggcagactgttccaccagcaccaggagcccgccaagcccgccgtgcaggccccctggagcaccgccgagaagggccccctgaccatcagcgcccaggagaacgtgaaggtggtgtactacagagccctgtaccccttcgagagcagaagccacgacgagatcaccatccagcccggcgacatcgtgatggtgaagggcgagtgggtggacgagagccagaccggcgagcccggctggctgggcggcgagctgaagggcaagaccggctggttccccgccaactacgccgagaagatccccgagaacgaggtgcccgcccccgtgaagcccgtgaccgacagcaccagcgcccccgcccccaagctggccctgagagagacccccgcccccctggccgtgaccagcagcgagcccagcaccacccccaacaactgggccgacttcagcagcacctggcccaccagcaccaacgagaagcccgagaccgacaactgggacgcctgggccgcccagcccagcctgaccgtgcccagcgccggccagctgagacagagaagcgccttcacccccgccaccgccaccggcagcagccccagccccgtgctgggccagggcgagaaggtggagggcctgcaggcccaggccctgtacccctggagagccaagaaggacaaccacctgaacttcaacaagaacgacgtgatcaccgtgctggagcagcaggacatgtggtggttcggcgaggtgcagggccagaagggctggttccccaagagctacgtgaagctgatcagcggccccatcagaaagagcaccagcatggacagcggcagcagcgagagccccgccagcctgaagagagtggccagccccgccgccaagcccgtggtgagcggcgaggagttcatcgccatgtacacctacgagagcagcgagcagggcgacctgaccttccagcagggcgacgtgatcctggtgaccaagaaggacggcgactggtggaccggcaccgtgggcgacaaggccggcgtgttccccagcaactacgtgagactgaaggacagcgagggcagcggcaccgccggcaagaccggcagcctgggcaagaagcccgagatcgcccaggtgatcgccagctacaccgccaccggccccgagcagctgaccctggcccccggccagctgatcctgatcagaaagaagaaccccggcggctggtgggagggcgagctgcaggccagaggcaagaagagacagatcggctggttccccgccaactacgtgaagctgctgagccccggcaccagcaagatcacccccaccgagccccccaagagcaccgccctggccgccgtgtgccaggtgatcggcatgtacgactacaccgcccagaacgacgacgagctggccttcaacaagggccagatcatcaacgtgctgaacaaggaggaccccgactggtggaagggcgaggtgaacggccaggtgggcctgttccccagcaactacgtgaagctgaccaccgacatggaccccagccagcagtag

SEQ ID NO: 18141 - protein, 511 aa, Artificial Sequence
  derived and/or modified sequence
MKLSKKDRGEDEESDSAKKKLDWSCSLLVASLAGAFGSSFLYGYNLSVVNAPTPYIKAFYNESWERRHGRPIDPDTLTLLWSVTVSIFAIGGLVGTLIVKMIGKVLGRKHTLLANNGFAISAALLMACSLQAGAFEMLIVGRFIMGIDGGVALSVLPMYLSEISPKEIRGSLGQVTAIFICIGVFTGQLLGLPELLGKESTWPYLFGVIVVPAVVQLLSLPFLPDSPRYLLLEKHNEARAVKAFQTFLGKADVSQEVEEVLAESRVQRSIRLVSVLELLRAPYVRWQVVTVIVTMACYQLCGLNAIWFYTNSIFGKAGIPPAKIPYVTLSTGGIETLAAVFSGLVIEHLGRRPLLIGGFGLMGLFFGTLTITLTLQDHAPWVPYLSIVGILAIIASFCSGPGGIPFILTGEFFQQSQRPAAFIIAGTVNWLSNFAVGLLFPFIQKSLDTYCFLVFATICITGAIYLYFVLPETKNRTYAEISQAFSKRNKAYPPEEKIDSAVTDGKINGRP

SEQ ID NO: 18142 - DNA, 1536 bp, Artificial Sequence
  derived and/or modified sequence
atgaaattgagtaaaaaggacaggggcgaggacgaggagtccgactcagctaaaaagaaactcgattggtcgtgctcgttactggtggctagcttggccggagccttcgggagttcatttttgtacggctacaacctgagtgttgtcaacgcgcccaccccatacataaaggcattctacaacgagtcatgggagcgaaggcacgggcgtcccatcgaccctgacaccctcacactgctttggtcagttacggtgtcaatttttgccatcggtggactagtcggaaccttaattgttaaaatgattgggaaagttttaggccgcaaacacacactgcttgctaacaacggcttcgcaatctctgctgccctgttaatggcctgttcgcttcaggcaggagcgtttgaaatgctcattgtgggccgcttcattatgggcatcgatgggggagttgccctgagcgtgctccccatgtatctttccgagatttcaccaaaggaaatcagaggatccctggggcaagttaccgccatatttatctgtatcggggtgttcacgggccagctcctgggcctacctgaactgctcggtaaagagtctacatggccctacctcttcggtgtgattgtggtgccggcagtggttcagctgctctccctgccgtttttgccagactcgccccggtacctcctgctggagaaacataatgaggcacgagccgtgaaggcttttcaaacctttctggggaaggccgatgttagccaagaagtcgaggaggtgctggcggagtccagagtacaacgatccattcgcttggtaagcgtattggagctactacgggcgccatatgtccggtggcaggtcgttaccgtgatcgtgaccatggcgtgctatcagctgtgtggactcaacgctatttggttctatactaatagcatttttggtaaagctggaatccctccagctaagatcccctacgtgacactgtccacggggggtattgaaactctcgccgcagtattttccggtctggtaattgagcatctggggcgccgccccttgctcattggtgggtttggcctgatgggcctgttctttggaaccttaacaattactctcacccttcaggaccacgcaccctgggtgccttaccttagtattgtggggatcctggcaattattgcatcattctgttccggccctgggggaattccatttatcctgacgggcgagttctttcagcagagccagaggcccgccgcatttattatagctggaactgtaaactggcttagcaacttcgccgttggactgctgttcccatttatacagaaatccctggatacatattgttttctggttttcgccacaatatgtatcacaggcgccatttacctgtacttcgtgctccctgagacaaaaaatcgcacgtatgccgagatttcccaggccttctctaaaaggaacaaggcctatcctcccgaagagaagatagacagcgcagtcacggacggcaaaatcaatggaagaccctag

SEQ ID NO: 18143 - DNA, 1536 bp, Artificial Sequence
  derived and/or modified sequence
atgaaactgtcaaagaaagaccgcggagaagacgaggaatccgattccgctaagaagaaactcgattggagctgttccctcctggtcgcttcgctggcgggggcatttggatcaagtttcctgtatggatataacctctctgtggtgaatgcaccgacaccctacatcaaagccttctacaacgagtcatgggagcggcgacacggccggccgatcgacccagatacgctgactctgctgtggagcgtcactgttagtatcttcgctatcggtggtctagtcggcactctgatagtgaagatgatcggaaaagtgctgggccggaagcacactctacttgctaataacggcttcgcaatcagcgcggctctgctcatggcttgctctctgcaagctggggcctttgagatgctgatcgtcggacgtttcatcatgggaatcgacggcggagttgccctgtccgtgttgccgatgtatctgtccgagattagcccaaaggagatccggggatctctcggacaggtgactgctatctttatctgcatcggagtgttcacaggacagctactcggcctgcctgagctgcttggtaaggagtccacctggccttatttgtttggggtgattgtcgtcccagccgttgttcaactgctctctctgcctttcctgccggacagccctagatatctcttgctggagaagcataacgaagctcgagcagtcaaagccttccaaacctttcttggaaaagcagatgtgtcccaggaggtggaagaagttttggcagagagcagagtgcaacgcagcatccgtctggtgtccgttctcgagctgcttcgagcgccatatgttcgatggcaggttgtaaccgttattgtgaccatggcctgctaccagctgtgtgggcttaacgccatctggttttacactaattcaatttttggcaaggcgggaataccacctgccaagattccctacgtgaccttgtctacgggagggatcgaaacactggccgctgtgttcagtgggctggtgattgaacacttggggaggcggcccctgctgattgggggatttggcctgatgggcttgttcttcggtacattaacaatcacacttacactccaggatcacgcgccctgggtaccctacctgagtatcgtgggcattcttgctattattgcgtctttttgttccgggcctggtggaattccctttatcctgaccggcgaattcttccaacaatctcagcgtcccgctgcattcataatagcaggcaccgttaactggctttcgaatttcgccgtcggactcctatttccattcatccagaaatccctggatacctactgcttcttggtttttgcaactatatgtataaccggagcaatctatctttacttcgtattgcccgagaccaagaatcggacctacgccgaaatttcccaggccttttccaaaaggaacaaggcttatcctcccgaggagaaaatcgacagcgcggtgacggacggaaagataaatgggagaccttag

SEQ ID NO: 18144 - DNA, 1536 bp, Artificial Sequence
  derived and/or modified sequence
atgaagctgagcaagaaggacagaggagaagatgaggagagtgacagcgccaagaagaagctggactggagctgcagcctgctggtggccagcctggccggggccttcggcagcagcttcctgtatggctacaacctgtctgtggtgaatgcccccaccccctacatcaaggccttctacaatgaatcctgggagcggcggcacggccggcccatcgaccctgacaccctgaccctgctgtggagcgtgacagtgtccatctttgccatcggcggcctggtgggcaccctcatcgtgaagatgattggcaaggtgctgggcaggaagcacaccctgctggccaacaacggctttgccatctctgctgccctgctgatggcctgcagcctgcaggccggggcctttgagatgctgattgtgggccgcttcatcatgggcattgatggcggcgtggccctgtctgtgctgcccatgtacctgtctgagatcagccccaaggagatccggggcagcctgggccaggtgacagccatcttcatctgcatcggggtcttcaccggccagctgctgggcctgcctgagctgctgggcaaggagagcacctggccctacctgtttggagtgattgtggtgcctgctgtggtgcagctgctgagcctgcccttcctgcctgacagcccccgctacctgctgctggagaagcacaatgaggcccgggctgtgaaggccttccagaccttcctgggcaaggcagatgtgtcccaggaggtggaggaggtgctggccgagagccgggtgcagaggagcatccggctggtgtctgtgctggagctgctgcgggccccctacgtgcgctggcaggtggtgaccgtcatcgtgaccatggcctgctaccagctgtgtggcctgaatgccatctggttctacaccaacagcatctttgggaaggccggcatccccccagccaagatcccctacgtgaccctgagcactggaggcatcgagaccctggccgctgtgttcagcggcctggtgattgagcacctgggcagaagacccctgctgattggaggcttcggcctgatgggcctcttcttcggcaccctgaccatcaccctgaccctgcaggaccacgccccctgggtgccctacctgagcatcgtgggcatcctggccatcatcgccagcttctgcagcggccctgggggcatccccttcatcctgactggagagttcttccagcagagccagaggcctgctgccttcatcatcgccggcaccgtgaactggctgagcaactttgctgtgggcctgctcttccccttcatccagaagagcctggacacctactgcttcctggtgtttgccaccatctgcatcactggagccatctacctgtactttgtgctgcctgagaccaagaacagaacctatgcagagatcagccaggccttcagcaagaggaacaaggcctacccacctgaggagaagattgacagcgctgtgacagatggcaagatcaatggccggccctag

SEQ ID NO: 18145 - DNA, 1536 bp, Artificial Sequence
  derived and/or modified sequence
atgaagctgagcaagaaggaccggggcgaggacgaggagagcgactccgctaagaagaagctcgattggagttgctccttgctggtcgcttccttggccggcgccttcggtagtagctttctgtatggctataacttgtccgttgtgaacgctcccactccatatattaaggcgttttataacgagtcctgggagcggcgccacggcagaccaattgaccctgacaccctcaccttattgtggtccgtgactgttagcatctttgccattggtggattggttggaacactgattgttaagatgatcggaaaggtactaggccgaaagcatacgttgttagccaataacgggttcgctatttccgcagcacttctgatggcctgctcgctgcaagcgggcgcgttcgagatgctgatcgtggggagattcatcatgggaatcgacggcggggttgccttgagcgtactgccgatgtacttgagtgagatcagtccaaaggagatccgggggagtctggggcaagtgaccgccatttttatctgtatcggtgttttcacaggtcagttgctcggactgccagaacttctgggcaaagaaagcacatggccttacctcttcggcgtaatcgtggtgcctgctgttgtccagctgctgtcccttccttttctgcccgactcccccaggtatcttttgctggaaaagcacaacgaagctagggccgttaaggcattccagacgttcctggggaaggcagatgtgtcacaagaggtggaagaggtgctggctgaatctcgcgttcagaggagcatccgcctcgtaagcgtcctggagcttcttagggccccctatgtgcggtggcaggtcgttaccgtgattgtgaccatggcttgctatcagctgtgcggcttgaatgctatttggttctacacgaattcaatattcggaaaggcggggatccccccagccaaaattccctacgtcaccctgagcacagggggaattgagactctggccgcagtgttttccggccttgttatagaacacttggggcgaaggcccctgttaatcggcggttttggcctcatgggactgtttttcgggaccctgaccatcactctcaccttacaggaccatgctccgtgggtgccctacctttcaatcgtgggtattctcgccataatcgcatccttttgttctgggcctggaggcataccgtttattctgactggggagttctttcaacaaagccaacgacccgcagctttcatcatagcagggacagtcaactggctgtcaaacttcgcagtgggcctgctgttcccattcatacagaagagccttgacacctactgttttctggtgtttgctacgatttgcataaccggagctatctacctgtacttcgtgctgcctgagactaagaacagaacgtacgccgagatatctcaggcattctccaagcgtaacaaagcttaccctccggaagagaagattgacagcgcggtcactgacggcaagattaatgggcgcccatag

SEQ ID NO: 18146 - DNA, 1536 bp, Artificial Sequence
  derived and/or modified sequence
atgaagctgagcaagaaggaccggggcgaggacgaggagagcgactccgcaaaaaaaaagctggactggtcttgctcactgttggtggcctcactggccggggccttcgggagtagttttctctacggctataacttgagtgtagtgaatgcgcctacaccctatatcaaagcgttttataatgagagctgggagagacgtcacggtcggccaatcgatcctgacactctgacactgttgtggtccgtaactgtcagtattttcgctattggcggtctggtcgggaccctgattgtgaagatgataggcaaagtccttggacgcaaacacactctgttggcaaataatggattcgctatctctgccgcactgctgatggcctgttccctgcaagccggcgcattcgaaatgctgatcgtcggtcggttcatcatgggtattgacggcggggtggctctgagcgtactcccaatgtacctgagtgagatctccccaaaggagattagggggagtctgggccaagtgactgcaatcttcatctgtatcggcgtttttacagggcagctcctggggctcccggaactgctcggaaaagagagcacgtggccttatctgttcggagttatcgtggttcctgccgtcgtgcagcttctctcactgccatttcttccggactcacctagatatctcctgctggaaaagcataacgaggcacgtgccgttaaagcattccaaacattcttgggtaaggctgatgtgagccaggaggtggaggaggttctcgcggagtcgagagtccagaggtccattcggttggtcagtgtgctcgaactactccgagccccctatgtacggtggcaagtggtcacagtgattgtcacaatggcatgctaccaactttgcggcctgaatgcgatctggttttacactaattctatttttggaaaggccggaataccccccgcgaagatcccatacgttactctctccacgggaggcatcgaaacactcgccgccgtgttctctggactggtgatcgaacacctgggccggcgtcctcttcttattggcggcttcgggctgatgggcttgtttttcgggacccttactattactctgaccctacaggatcacgccccctgggttccatacttgtctatcgttggtattcttgctataattgcgagtttctgcagtggtccaggcgggattcctttcatcctgacgggagagttttttcagcaatctcagcggcccgctgccttcataatcgcgggtacggtgaattggctttccaacttcgcagtgggccttctgttcccatttatccagaagtcgctcgatacgtactgttttttggtgtttgctacaatatgtattaccggggccatttacctctacttcgtactgcccgagaccaagaacaggacatacgcagagatttcccaggccttcagtaagcgcaacaaggcatacccccctgaagagaaaattgatagcgcagttaccgacggtaagataaatggtcggccctag

SEQ ID NO: 18147 - DNA, 1536 bp, Artificial Sequence
  derived and/or modified sequence
atgaaattgtccaagaaagatcgcggtgaggatgaggaaagtgattcagccaagaagaagctggactggagctgcagtctgctggtcgcgagtttggcaggagctttcggttccagcttcctttacggttacaatctgagtgtggttaacgcaccgaccccttatattaaagcattctataatgaatcatgggaaaggcgtcatggtcgaccgatcgacccagacacactgacactgctgtggagcgttacggtttccatctttgccatcgggggattagtgggaactttgatcgtgaaaatgattggcaaagtgttgggcaggaaacacacactgctggccaacaatggctttgcaatatctgctgcgctgctcatggcttgtagtttgcaggccggtgcgttcgagatgttgattgtcggccgtttcatcatgggtatcgatgggggagtggccctgagcgtgctccccatgtatctgagcgaaatttcgcctaaggaaattcggggttccctcggtcaggtcacagccatatttatttgtatcggagtgtttaccggacagttgctgggcctgcccgaactgctgggcaaagagagcacttggccttacctgtttggcgtgatcgtggtgcccgctgtcgtgcagctgctgtccctcccattcctccccgacagtcctcgctacctgctcctcgagaagcataatgaggcacgcgctgtgaaggcctttcagactttcctaggcaaggccgatgtaagccaggaagtggaagaagtgttagcggagtcgagggtccagaggtctattcgactggtctccgtccttgagctgctgcgagctccttatgttaggtggcaagtggtaacggtgatcgtcactatggcctgctatcagctgtgcgggctgaatgccatctggttttacaccaattccatctttggaaaggctgggatcccccctgccaagattccttacgtaaccctctctaccggcggaatcgaaaccctggcggctgtgttctccggcctagttattgaacacctgggcaggagacctttgctcatcggcggttttggcctgatgggcctattttttggtactctcacaattactctcacactccaagaccatgccccatgggtaccatacctctcgattgtggggattttggccatcatcgcctccttttgcagcggtcccggtggaatcccatttattctcacaggcgagtttttccagcagtcccaacggccagccgcttttattattgccggtaccgtgaactggctgtcaaatttcgccgtaggtctcctcttccccttcatacagaaatcccttgacacatactgttttctggtattcgccacaatttgtattaccggcgcaatatatctttatttcgtgctacctgaaaccaagaaccggacgtatgcagaaatttcccaggcttttagcaagcgaaataaagcttatcctccggaggagaaaattgactcagctgtgactgatggaaagatcaacggcaggccgtag

SEQ ID NO: 18148 - DNA, 1536 bp, Artificial Sequence
  derived and/or modified sequence
atgaagttaagtaaaaaggaccgcggtgaagacgaagaatctgactctgctaagaagaagctagactggtcttgcagtttactcgtggcgagtctggcaggggcatttggctccagctttctgtacgggtacaatttgtccgtcgttaacgctcccacaccttacatcaaagctttctataacgagtcttgggagagaagacacgggcgaccgatagaccccgatacactcactctcctttggtccgtgacagtttcaatctttgccattggaggtctcgtcggcacactgatcgtaaagatgatcgggaaggtcctaggcaggaagcacacattgctggcgaataacgggttcgcaatctccgcagctttacttatggcctgctccctgcaagctggagcattcgagatgcttattgtcggaagattcataatggggattgacggaggcgtagcattgagtgtgttacccatgtatctttctgagatcagtccgaaggaaatacggggatctttgggccaggtgactgccatcttcatctgtattggtgtttttacagggcagctgctcggcctgcccgaactcctgggaaaagagtccacctggccctatctctttggcgtcatagtggtgcctgctgtggtccagctcctgagtctgccattcttacctgattcaccaaggtatctccttttggaaaaacacaacgaggccagagcagtgaaagcgttccagacctttctgggaaaggccgatgtctcccaggaggttgaagaagtgctggccgaaagtagagtgcaacgctccatccgcctggtttccgtcctcgagctgctgagagccccttacgttcgctggcaggtggtgacagtcattgtcaccatggcctgttatcagctgtgcggactaaacgccatttggttctatacgaattcaattttcggcaaagccggaatcccaccggctaagataccttacgtgactctgtccacgggaggcatcgagaccctcgcggctgtgttctccggtctggtgatcgaacatttaggaaggagaccactgttgatcggcggattcggtctgatgggcctgttctttggaacattgacaatcaccctgaccctccaggaccatgccccttgggtgccatacctgtccattgttggaattctcgccataattgcatcattttgcagtggtccgggaggcatccctttcatacttactggcgagttcttccagcaaagccagagacctgctgcttttattattgctggcacagttaattggctcagcaactttgcggtggggctcttgttcccattcattcagaaatccctcgacacgtactgctttctggtgttcgcaacgatatgtataactggcgctatatatctgtatttcgtgcttcctgagacaaagaatcgtacctacgcagaaattagtcaggcgttctccaagcggaacaaagcatatcctccagaggagaagattgattccgccgtgaccgatggcaagatcaatggccgtccatag

SEQ ID NO: 18149 - DNA, 1866 bp, Artificial Sequence
  derived and/or modified sequence
gttggctctagggctggcaccaggcactggaattaaacattctggactccagaggggcatgaaaactcttcctgaaggagatgcagaggaagattcgaactggaggaaaaccctaaaataaacaataacaacaaaagttcaaaacctgaaaagtgaaccatgaagctcagtaaaaaggaccgaggagaagatgaagaaagtgattcagcgaaaaagaaattggactggtcctgctcgctcctcgtggcctccctcgcgggcgccttcggctcctccttcctctacggctacaacctgtcggtggtgaatgcccccaccccgtacatcaaggccttttacaatgagtcatgggaaagaaggcatggacgtccaatagacccagacactctgactttgctctggtctgtgactgtgtccatattcgccatcggtggacttgtggggacgttaattgtgaagatgattggaaaggttcttgggaggaagcacactttgctggccaataatgggtttgcaatttctgctgcattgctgatggcctgctcgctccaggcaggagcctttgaaatgctcatcgtgggacgcttcatcatgggcatagatggaggcgtcgccctcagtgtgctccccatgtaccttagtgagatctcacccaaggagatccgtggctctctggggcaggtgactgccatctttatctgcattggcgtgttcactgggcagcttctgggcctgcccgagctgctgggaaaggagagtacctggccatacctgtttggagtgattgtggtccctgccgttgtccagctgctgagccttccctttctcccggacagcccacgctacctgctcttggagaagcacaacgaggcaagagctgtgaaagccttccaaacgttcttgggtaaagcagacgtttcccaagaggtagaggaggtcctggctgagagccgcgtgcagaggagcatccgcctggtgtccgtgctggagctgctgagagctccctacgtccgctggcaggtggtcaccgtgattgtcaccatggcctgctaccagctctgtggcctcaatgcaatttggttctataccaacagcatctttggaaaagctgggatccctccggcaaagatcccatacgtcaccttgagtacagggggcatcgagactttggctgccgtcttctctggtttggtcattgagcacctgggacggagacccctcctcattggtggctttgggctcatgggcctcttctttgggaccctcaccatcacgctgaccctgcaggaccacgccccctgggtcccctacctgagtatcgtgggcattctggccatcatcgcctctttctgcagtgggccaggtggcatcccgttcatcttgactggtgagttcttccagcaatctcagcggccggctgccttcatcattgcaggcaccgtcaactggctctccaactttgctgttgggctcctcttcccattcattcagaaaagtctggacacctactgtttcctagtctttgctacaatttgtatcacaggtgctatctacctgtattttgtgctgcctgagaccaaaaacagaacctatgcagaaatcagccaggcattttccaaaaggaacaaagcatacccaccagaagagaaaatcgactcagctgtcactgatggtaagataaatggaaggccttaacaagtttcctcctccacgttggacaattatgtcaaaaacaggattgtctacatggatgatctcacttttcaggaaacttaaaatttacccattattgggaagcttaaatgaattgaagctatgcaagtcttttatattattaaatatttaaaagtaaacctgtactaatct

SEQ ID NO: 18150 - DNA, 1927 bp, Artificial Sequence
  derived and/or modified sequence
ccatgaagagttctagcaccaagtcagtgcaagacccgaggtgttcctgttggctgagtgttggctctagggctggcaccaggcactggaattaaacattctggactccagaggggcatgaaaactcttcctgaaggagatgcagaggaagattcgaactggaggaaaaccctaaaataaacaataacaacaaaagttcaaaacctgaaaagtgaaccatgaagctcagtaaaaaggaccgaggagaagatgaagaaagtgattcagcgaaaaagaaattggactggtcctgctcgctcctcgtggcctccctcgcgggcgccttcggctcctccttcctctacggctacaacctgtcggtggtgaatgcccccaccccgtacatcaaggccttttacaatgagtcatgggaaagaaggcatggacgtccaatagacccagacactctgactttgctctggtctgtgactgtgtccatattcgccatcggtggacttgtggggacgttaattgtgaagatgattggaaaggttcttgggaggaagcacactttgctggccaataatgggtttgcaatttctgctgcattgctgatggcctgctcgctccaggcaggagcctttgaaatgctcatcgtgggacgcttcatcatgggcatagatggaggcgtcgccctcagtgtgctccccatgtaccttagtgagatctcacccaaggagatccgtggctctctggggcaggtgactgccatctttatctgcattggcgtgttcactgggcagcttctgggcctgcccgagctgctgggaaaggagagtacctggccatacctgtttggagtgattgtggtccctgccgttgtccagctgctgagccttccctttctcccggacagcccacgctacctgctcttggagaagcacaacgaggcaagagctgtgaaagccttccaaacgttcttgggtaaagcagacgtttcccaagaggtagaggaggtcctggctgagagccgcgtgcagaggagcatccgcctggtgtccgtgctggagctgctgagagctccctacgtccgctggcaggtggtcaccgtgattgtcaccatggcctgctaccagctctgtggcctcaatgcaatttggttctataccaacagcatctttggaaaagctgggatccctccggcaaagatcccatacgtcaccttgagtacagggggcatcgagactttggctgccgtcttctctggtttggtcattgagcacctgggacggagacccctcctcattggtggctttgggctcatgggcctcttctttgggaccctcaccatcacgctgaccctgcaggaccacgccccctgggtcccctacctgagtatcgtgggcattctggccatcatcgcctctttctgcagtgggccaggtggcatcccgttcatcttgactggtgagttcttccagcaatctcagcggccggctgccttcatcattgcaggcaccgtcaactggctctccaactttgctgttgggctcctcttcccattcattcagaaaagtctggacacctactgtttcctagtctttgctacaatttgtatcacaggtgctatctacctgtattttgtgctgcctgagaccaaaaacagaacctatgcagaaatcagccaggcattttccaaaaggaacaaagcatacccaccagaagagaaaatcgactcagctgtcactgatggtaagataaatggaaggccttaacaagtttcctcctccacgttggacaattatgtcaaaaacaggattgtctacatggatgatctcacttttcaggaaacttaaaatttacccattattgggaagcttaaatgaattgaagctatgcaagtcttttatattattaaatatttaaaagtaaacctgtactaatctaa

SEQ ID NO: 18151 - DNA, 1536 bp, Artificial Sequence
  derived and/or modified sequence
atgaagctgagcaagaaggacagaggcgaggacgaggagagcgacagcgccaagaagaagctggactggagctgcagcctgctggtggccagcctggccggcgccttcggcagcagcttcctgtacggctacaacctgagcgtggtgaacgcccccaccccctacatcaaggccttctacaacgagagctgggagagaagacacggcagacccatcgaccccgacaccctgaccctgctgtggagcgtgaccgtgagcatcttcgccatcggcggcctggtgggcaccctgatcgtgaagatgatcggcaaggtgctgggcagaaagcacaccctgctggccaacaacggcttcgccatcagcgccgccctgctgatggcctgcagcctgcaggccggcgccttcgagatgctgatcgtgggcagattcatcatgggcatcgacggcggcgtggccctgagcgtgctgcccatgtacctgagcgagatcagccccaaggagatcagaggcagcctgggccaggtgaccgccatcttcatctgcatcggcgtgttcaccggccagctgctgggcctgcccgagctgctgggcaaggagagcacctggccctacctgttcggcgtgatcgtggtgcccgccgtggtgcagctgctgagcctgcccttcctgcccgacagccccagatacctgctgctggagaagcacaacgaggccagagccgtgaaggccttccagaccttcctgggcaaggccgacgtgagccaggaggtggaggaggtgctggccgagagcagagtgcagagaagcatcagactggtgagcgtgctggagctgctgagagccccctacgtgagatggcaggtggtgaccgtgatcgtgaccatggcctgctaccagctgtgcggcctgaacgccatctggttctacaccaacagcatcttcggcaaggccggcatcccccccgccaagatcccctacgtgaccctgagcaccggcggcatcgagaccctggccgccgtgttcagcggcctggtgatcgagcacctgggcagaagacccctgctgatcggcggcttcggcctgatgggcctgttcttcggcaccctgaccatcaccctgaccctgcaggaccacgccccctgggtgccctacctgagcatcgtgggcatcctggccatcatcgccagcttctgcagcggccccggcggcatccccttcatcctgaccggcgagttcttccagcagagccagagacccgccgccttcatcatcgccggcaccgtgaactggctgagcaacttcgccgtgggcctgctgttccccttcatccagaagagcctggacacctactgcttcctggtgttcgccaccatctgcatcaccggcgccatctacctgtacttcgtgctgcccgagaccaagaacagaacctacgccgagatcagccaggccttcagcaagagaaacaaggcctacccccccgaggagaagatcgacagcgccgtgaccgacggcaagatcaacggcagaccctag

SEQ ID NO: 18152 - protein, 241 aa, Artificial Sequence
  derived and/or modified sequence
MKFILLWALLNLTVALAFNPDYTVSSTPPYLVYLKSDYLPCAGVLIHPLWVITAAHCNLPKLRVILGVTIPADSNEKHLQVIGYEKMIHHPHFSVTSIDHDIMLIKLKTEAELNDYVKLANLPYQTISENTMCSVSTWSYNVCDIYKEPDSLQTVNISVISKPQCRDAYKTYNITENMLCVGIVPGRRQPCKEVSAAPAICNGMLQGILSFADGCVLRADVGIYAKIFYYIPWIENVIQNN

SEQ ID NO: 18153 - DNA, 726 bp, Artificial Sequence
  derived and/or modified sequence
atgaagttcatcctgctgtgggccctgctgaacctgaccgtggccctcgctttcaaccccgactatacggtgtcctccacccccccatacttagtgtatttgaaatcagattacctcccctgtgccggcgtactgattcatccactttgggttatcacagcagcccactgtaacctcccaaagctgcgggttatcctaggcgtcaccattcccgccgactctaatgaaaaacacctgcaggtgatcggctacgagaagatgatccaccatccacatttttctgtcacctcaatcgatcacgacattatgctcattaagctgaagactgaggctgagctgaatgactatgttaagctggccaatctaccctaccagacaattagcgaaaacacaatgtgctcagttagtacttggtcatataatgtgtgtgacatatacaaggagcccgacagcctgcagacagtgaacataagtgtgatttccaagccgcagtgccgagatgcatataaaacttacaatatcaccgagaacatgctctgcgtgggaatcgtccccggcagacggcagccttgcaaagaggtctccgctgcccctgccatttgtaatggaatgcttcagggcattctcagctttgccgacggatgtgttttacgagccgacgtgggcatatacgccaaaattttttactatataccctggatcgaaaacgtgattcagaacaactag

SEQ ID NO: 18154 - DNA, 726 bp, Artificial Sequence
  derived and/or modified sequence
atgaagttcatcctgctgtgggccctgctgaacctgaccgtggccctcgcctttaatcctgattatacagtgtcctccacccccccgtacttggtgtacctcaaatccgactacctgccttgcgctggggtcttgatccatcccctgtgggttatcacggctgcccactgtaatctccctaaattgagagtgattttaggtgttactataccagctgacagcaacgagaagcacctccaagtgataggctatgagaagatgatacaccacccacacttctcagtgactagcattgaccacgatataatgctcattaagctcaaaactgaggccgagctaaatgattacgttaaacttgccaatctgccataccagactatttctgagaacactatgtgctccgtctcgacctggtcatataacgtctgcgatatctacaaagagccagactccctgcagacagtgaacatatctgttatttctaagcctcagtgtcgtgacgcctacaagacttataatattacagagaacatgctgtgcgtaggcatcgtgcccggtcgtaggcagccttgcaaggaggtctccgcggcaccagcaatttgtaatggaatgctgcaaggaattctgtcattcgctgacggctgtgtacttcgagctgacgtaggcatctacgccaagattttttactatatcccctggatagaaaacgttatccagaacaattag

SEQ ID NO: 18155 - DNA, 726 bp, Artificial Sequence
  derived and/or modified sequence
atgaaatttatactcctgtgggcactcctgaacctcactgtcgcgcttgctttcaatcccgactataccgtgtcatccacgcccccttacctcgtgtacttgaaaagtgactacttgccctgtgcaggtgttctgattcaccccctatgggtgattactgcagcccactgcaaccttccaaagctgcgcgtaattctgggggtcacaataccagcagatagcaatgagaagcacctccaagtcatcgggtacgaaaagatgatccaccacccccacttttccgtgacttctattgaccatgatataatgcttatcaaacttaaaaccgaagcggagcttaatgactatgtgaaattggcaaatctcccttatcagaccatatccgaaaacactatgtgctcagtgtcaacttggtcctataacgtgtgtgacatatataaagaaccagactcattgcagacggttaacatcagtgttataagcaagccgcagtgtcgcgatgcgtacaagacatataacataacagaaaatatgctgtgtgtcggaattgtgcccggaagaagacagccatgtaaggaggtgtcagcagcaccagctatctgcaacggaatgcttcagggaatactcagctttgccgacggttgtgtcctccgcgcagacgtgggaatctacgcaaaaatattctattacataccttggattgaaaacgtcatacagaacaattag

SEQ ID NO: 18156 - DNA, 726 bp, Artificial Sequence
  derived and/or modified sequence
atgaagtttatcctgttgtgggcactgcttaacctgaccgtcgccttagctttcaatccagactatacagttagctctactcctccttatctggtctatctgaaatccgactacctgccttgcgcgggtgtgcttatccatccactgtgggtgattaccgccgcacactgtaatctgccaaaactgagggtgatactaggtgtgacgatccccgctgactccaatgagaagcacctgcaggtcatcggttacgagaaaatgatccatcatccgcacttctcagtgacgtccatcgaccacgacataatgctcatcaagctgaagaccgaggccgagctaaatgactacgtcaagctggccaacctcccatatcagaccatctccgagaacacaatgtgttctgtctcaacatggtcgtacaacgtctgcgacatctataaggagcccgattcgctgcagacggtgaatatcagcgtgattagcaagccacaatgcagggatgcatacaagacgtacaatattacagagaacatgctctgcgttggcattgtgcctggacggcgacagccatgcaaagaagttagcgccgctccggcaatctgtaacggcatgttacagggcatcctgtcctttgctgatggctgcgttctcagagccgacgtcggcatttacgccaagattttttactacatcccctggatcgaaaacgtcattcagaataattag

SEQ ID NO: 18157 - DNA, 726 bp, Artificial Sequence
  derived and/or modified sequence
atgaaatttatactcttgtgggctctgttaaatctgactgtcgcactcgcttttaatcctgactacactgtatcatcaacaccaccttaccttgtatatcttaagagcgattatctgccatgcgccggggtcctgattcaccccctgtgggttataaccgctgctcattgtaacttgccgaagctgcgagtcatcctgggcgtgactattccagctgattcgaacgagaaacatcttcaggtaatcggctatgaaaagatgattcaccacccccacttcagtgttacttcaattgaccacgatatcatgctgattaaactcaaaacggaagctgaactgaacgactatgtgaaactcgccaacttaccttatcagacgatcagtgaaaacactatgtgcagcgtgtcaacttggagttacaatgtatgcgacatctacaaggaacctgattccctccagacagtcaatatatccgttatcagtaaaccacagtgccgagatgcctataagacttacaacatcacagagaacatgctgtgtgtcggcattgttcctggtagaagacagccttgcaaggaagtcagcgccgcacctgcgatatgcaatggtatgttacaaggaattttaagttttgctgacggatgtgtgctcagagcagacgtcggtatctatgccaaaatcttctactatattccatggattgaaaacgtcatacagaataattag

SEQ ID NO: 18158 - DNA, 726 bp, Artificial Sequence
  derived and/or modified sequence
atgaaattcattcttctttgggctcttttgaatttaacagtcgctctggcctttaacccggattatacagtttcctccacccctccttaccttgtctatcttaaaagcgattatctgccctgcgccggcgtcctcatacaccccttatgggtaatcaccgctgcccactgcaacctcccaaagctaagagtgattttaggcgtgactatccctgccgactctaacgagaaacatttacaagtaatcggctatgagaagatgattcaccacccgcacttctccgtcaccagtattgaccacgatatcatgcttattaagctcaaaacagaagcagagttgaacgattatgtgaagctggctaatctgccatatcagaccatatccgagaacacaatgtgctcggtcagtacatggtcttacaacgtttgcgacatctataaagaacccgattcactccagactgtcaacattagtgtgattagcaaaccgcaatgcagagacgcctataaaacctataatattaccgagaacatgctgtgcgtaggaattgtgcccggccgacgccagccctgtaaagaggtgagcgctgctccggctatttgtaacggcatgctgcaaggcattttgtctttcgccgacggttgtgtgttgcgggccgatgtgggaatatatgcaaaaatcttctattatattccttggattgaaaacgtgattcagaataactag

SEQ ID NO: 18159 - DNA, 726 bp, Artificial Sequence
  derived and/or modified sequence
atgaaattcatcctgctctgggcacttttaaatttgacggtggccttggcattcaatcccgattatacagtctcctctacgccaccctaccttgtttatctcaaatctgattaccttccctgtgccggcgtattgattcatccactgtgggtgattactgcagcccattgcaatcttccgaagctgcgcgttattctgggtgtaaccatacctgccgacagtaatgagaaacatctccaagtgataggatatgaaaagatgatacatcaccctcatttttccgtgaccagtattgaccacgacattatgctaatcaaactgaagaccgaagcagaattgaacgactacgtgaaactggccaatctcccctaccagactatttcagaaaacactatgtgtagcgtgtccacctggtcttacaacgtttgtgatatctataaggaaccagacagtctccaaacagtgaatatcagtgtcattagcaagccccaatgtagggatgcttacaaaacttacaacatcacggaaaatatgttatgtgtcggaatcgtgccgggcaggcggcagccatgtaaagaggtatcagcagcaccggctatctgcaatggcatgctacaaggcatcctctcatttgccgacggttgcgttctaagagcagacgtaggaatttacgcaaaaattttttattacatcccctggattgaaaacgttatacagaataactag

SEQ ID NO: 18160 - DNA, 726 bp, Artificial Sequence
  derived and/or modified sequence
atgaaattcattcttctttgggctcttttgaatttaacagtcgctctggcctttaacccggattatacagtttcctccacccctccttaccttgtctatcttaaaagcgattatctgccctgcgccggcgtcctcatacaccccttatgggtaatcaccgctgcccactgcaacctcccaaagctaagagtgattttaggcgtgactatccctgccgactctaacgagaaacatttacaagtaatcggctatgagaagatgattcaccacccgcacttctccgtcaccagtattgaccacgatataatgctgattaaactgaagacagaagccgagcttaacgactatgtaaaattagcgaatctgccctaccagacaatcagtgaaaacaccatgtgcagtgtatcaacttggtcatataatgtgtgcgatatatacaaagaacctgattccctgcagaccgtaaatattagcgtgatctcaaagccacagtgcagagatgcttataaaacctacaacatcacagaaaatatgctttgcgtcgggattgtgcctggccgaaggcagccttgcaaggaggtctccgccgctcccgcgatctgcaacgggatgttacaagggattctctctttcgctgatgggtgcgttctgcgggcggacgtcggaatttacgctaaaattttctattatataccctggattgagaatgtgattcagaataactag

SEQ ID NO: 18161 - DNA, 913 bp, Artificial Sequence
  derived and/or modified sequence
aaggctggcaaaaaggagaccagacaggaggcgtctgtagagatatcatgaacttcaacttagctttgttttccagagactggagctaaactgggctttcaacatcatcatgaagtttatcctcctctgggctctcttgaatctgactgttgctttggcctttaatccagattacacagtcagctccactcccccttacttggtctatttgaaatctgactacttgccctgcgctggagtcctgatccacccgctttgggtgatcacagctgcacactgcaatttaccaaagcttcgggtgatattgggggttacaatcccagcagactctaatgaaaagcatctgcaagtgattggctatgagaagatgattcatcatccacacttctcagtcacttctattgatcatgacatcatgctaatcaagctgaaaacagaggctgaactcaatgactatgtgaaattagccaacctgccctaccaaactatctctgaaaataccatgtgctctgtctctacctggagctacaatgtgtgtgatatctacaaagagcccgattcactgcaaactgtgaacatctctgtaatctccaagcctcagtgtcgcgatgcctataaaacctacaacatcacggaaaatatgctgtgtgtgggcattgtgccaggaaggaggcagccctgcaaggaagtttctgctgccccggcaatctgcaatgggatgcttcaaggaatcctgtcttttgcggatggatgtgttttgagagccgatgttggcatctatgccaaaattttttactatataccctggattgaaaatgtaatccaaaataactgagctgtggcagttgtggaccatatgacacagcttgtccccatcgttcacctttagaattaaatataaattaactcctca

SEQ ID NO: 18162 - DNA, 1123 bp, Artificial Sequence
  derived and/or modified sequence
cgtctgtagagatatcatgaacttcaacttagctttggtactttcttccctgaagacagagggcagaactctgagttccagaaccattttcaactgtattggggaccaatcacttgactctattcttgtctctctgacagatgacgctacactctcctctgaataatggacaccatttctaaaactgaatcctgctactaaaataattcagatgatatatttttccaattctacaatcttgctttgttttatttagttgttttctctctctcttcccagttttccagagactggagctaaactgggctttcaacatcatcatgaagtttatcctcctctgggctctcttgaatctgactgttgctttggcctttaatccagattacacagtcagctccactcccccttacttggtctatttgaaatctgactacttgccctgcgctggagtcctgatccacccgctttgggtgatcacagctgcacactgcaatttaccaaagcttcgggtgatattgggggttacaatcccagcagactctaatgaaaagcatctgcaagtgattggctatgagaagatgattcatcatccacacttctcagtcacttctattgatcatgacatcatgctaatcaagctgaaaacagaggctgaactcaatgactatgtgaaattagccaacctgccctaccaaactatctctgaaaataccatgtgctctgtctctacctggagctacaatgtgtgtgatatctacaaagagcccgattcactgcaaactgtgaacatctctgtaatctccaagcctcagtgtcgcgatgcctataaaacctacaacatcacggaaaatatgctgtgtgtgggcattgtgccaggaaggaggcagccctgcaaggaagtttctgctgccccggcaatctgcaatgggatgcttcaaggaatcctgtcttttgcggatggatgtgttttgagagccgatgttggcatctatgccaaaattttttactatataccctggattgaaaatgtaatccaaaataactgagctgtggcagttgtggaccatatgacacagcttgtccccatcgttcacctttagaattaaatataaattaactcctc

SEQ ID NO: 18163 - DNA, 726 bp, Artificial Sequence
  derived and/or modified sequence
atgaagttcatcctgctgtgggccctgctgaacctgaccgtggccctggccttcaaccccgactacaccgtgagcagcacccccccctacctggtgtacctgaagagcgactacctgccctgcgccggcgtgctgatccaccccctgtgggtgatcaccgccgcccactgcaacctgcccaagctgagagtgatcctgggcgtgaccatccccgccgacagcaacgagaagcacctgcaggtgatcggctacgagaagatgatccaccacccccacttcagcgtgaccagcatcgaccacgacatcatgctgatcaagctgaagaccgaggccgagctgaacgactacgtgaagctggccaacctgccctaccagaccatcagcgagaacaccatgtgcagcgtgagcacctggagctacaacgtgtgcgacatctacaaggagcccgacagcctgcagaccgtgaacatcagcgtgatcagcaagccccagtgcagagacgcctacaagacctacaacatcaccgagaacatgctgtgcgtgggcatcgtgcccggcagaagacagccctgcaaggaggtgagcgccgcccccgccatctgcaacggcatgctgcagggcatcctgagcttcgccgacggctgcgtgctgagagccgacgtgggcatctacgccaagatcttctactacatcccctggatcgagaacgtgatccagaacaactag

SEQ ID NO: 18164 - DNA, 726 bp, Artificial Sequence
  derived and/or modified sequence
atgaagttcatacttctctgggcccttcttaatctgactgtggctctggcgttcaatccagattataccgtgagttccacgcccccgtacctggtctatttaaagagcgactacctcccctgcgcgggcgtcctgatacaccctctttgggtgatcaccgcagcccattgcaacctgccgaagctgagagttattcttggcgtgactatccctgccgactccaacgaaaaacacctgcaggtgatcggctacgagaaaatgatccatcaccctcacttctctgttacgtcaatcgatcatgatatcatgctaatcaagctgaaaaccgaggccgagcttaacgactatgtgaagctcgccaatttgccctatcaaaccatcagtgaaaacaccatgtgttctgtgtctacctggagctacaacgtatgtgacatttataaagagccggattcccttcagacagtgaatatctccgtcatcagcaaacctcagtgtcgggacgcctacaagacatacaacatcactgaaaacatgctctgcgtggggattgtccccgggaggcgccagccgtgtaaggaggtgagtgctgcccctgcaatctgcaacggcatgctgcagggcatactcagcttcgcagatggttgcgtcctgagggctgatgtcggcatatatgccaaaatcttctactatattccttggattgagaatgttatccagaacaattag

SEQ ID NO: 18165 - DNA, 726 bp, Artificial Sequence
  derived and/or modified sequence
atgaagttcatcctgttatgggccctgttaaatttgacagtcgctctggcttttaatccagactatactgtgtcttcaacccccccttatctggtgtatctgaaatctgactacttgccctgcgctggcgttctaatccatccattatgggtgattactgccgcgcactgcaatttgcccaaactgagggtgatattaggagtgactatccccgctgattccaacgagaagcacctgcaggtgattggctacgagaaaatgatccaccacccccacttttcggtgactagtatagatcacgacatcatgctaattaaattgaaaactgaagcagagctgaacgactacgtaaaactggcaaacctaccttatcaaactatttccgaaaacaccatgtgttcagtgagcacctggagctataacgtttgcgacatctataaagagcctgattcactgcagaccgtgaatataagcgtgatttctaagcctcagtgtcgcgatgcctacaaaacatacaacattaccgaaaacatgctgtgcgtgggcattgtgcctgggcgtcggcagccctgcaaagaggtatcggcagcacccgccatatgcaacggtatgctgcagggaattctgtctttcgccgatgggtgcgtgctgcgagctgatgtcggtatttatgcaaagatattctattacatcccatggatcgagaatgtgatccagaacaactag

SEQ ID NO: 18166 - DNA, 726 bp, Artificial Sequence
  derived and/or modified sequence
atgaagttcatcctgctgtgggccctgctgaacctgactgtggccctggccttcaacccagactacacagtgagcagcaccccaccctacctggtgtacctgaagagtgactacctgccctgtgccggcgtgctgatccaccccctgtgggtgatcacagctgcccactgcaacctgcccaagctgcgggtcatcctgggcgtgaccatcccagctgacagcaatgagaagcacctgcaggtgattggctatgagaagatgatccaccacccccacttctctgtgaccagcattgaccatgacatcatgctgatcaagctgaagacagaagctgagctgaatgactatgtgaagctggccaacctgccctaccagaccatcagcgagaacaccatgtgcagcgtgtccacctggagctacaacgtgtgtgacatctacaaggagccagacagcctgcagacagtgaacatcagcgtcatcagcaagccccagtgcagagatgcctacaagacctacaacatcacagagaacatgctgtgtgtgggcatcgtgcctggaagacggcagccctgcaaggaggtgtctgctgccccagccatctgcaatggcatgctgcagggcatcctgagctttgctgatggctgtgtgctgcgggcagatgtgggcatctatgccaagatcttctactacatcccctggattgaaaatgtcatccagaacaactag

SEQ ID NO: 18167 - DNA, 726 bp, Artificial Sequence
  derived and/or modified sequence
atgaagttcatcttgctttgggctctgcttaacctgaccgtggctcttgcgttcaaccctgattacactgtgagctctacacctccgtatttagtgtacctcaaaagtgactacctgccctgcgccggagtgctcattcatcccttgtgggtaatcacagcagcccactgcaatctgcccaagctcagggttatactgggggtgacaattcctgcggatagcaacgagaagcatctccaggtgatcggatacgaaaagatgattcaccacccccacttttccgtgaccagcatcgatcacgatatcatgctgatcaaacttaagaccgaggccgaattgaatgactacgtgaaactcgccaatcttccttatcagaccatcagcgagaacacaatgtgttctgtctctacttggtcctataatgtatgtgatatttacaaagagcccgactccctgcagactgtgaacatctcggtcataagcaagccccaatgcagagatgcctataaaacctacaatataaccgaaaacatgctatgtgtgggcatcgtgcctggacgcagacagccctgtaaggaagtcagcgccgcccctgccatatgtaatggcatgctccagggcatacttagcttcgccgacggatgtgttttgcgtgctgacgtgggcatctacgctaagatcttctactacatcccatggatagagaacgtaatccagaataattag

SEQ ID NO: 18168 - DNA, 726 bp, Artificial Sequence
  derived and/or modified sequence
atgaagttcatcctgctgtgggccctgctgaacctgaccgtggccctggccttcaaccccgattatacagtgtcttcaactccaccatatctagtctacctcaagagtgactacctcccttgtgccggggtgctgattcacccgctttgggttatcacagcagctcactgcaacctcccaaaactaagagttattctgggggtcacaatccctgcggattctaatgagaagcacctccaggtgattggttacgaaaagatgattcaccacccacacttctctgtgacctcaatcgaccacgatattatgctgatcaagctgaagacggaggccgaattaaacgactatgtgaagttggcaaaccttccatatcagaccattagcgaaaacacaatgtgcagcgtgtcgacctggtcctataacgtgtgtgacatttataaggaacccgactctcttcaaacggtgaacatcagcgtaatcagcaaaccccaatgcagggatgcctacaagacctataatatcaccgaaaacatgctctgtgtgggcatcgtcccaggacggcgccagccatgcaaggaagtgagtgcagcaccggctatttgtaacgggatgttacagggcatcctgtcctttgcggatggatgtgtgctgcgggcagatgtgggaatctacgcaaagatcttttattatataccttggatagagaacgtcattcagaacaattag

SEQ ID NO: 18169 - DNA, 726 bp, Artificial Sequence
  derived and/or modified sequence
atgaagtttatcctgctgtgggcattgcttaatctgacagtggccctcgcctttaacccagactacactgtctctagtacaccaccctaccttgtgtatttgaagagcgattatttaccctgtgccggagttctcatacaccccctctgggtcatcacggccgcacactgtaatctaccaaagttgagagtcatcttgggcgtgaccatccctgctgactctaacgaaaaacacctgcaagtcattggctacgagaaaatgattcaccaccctcacttcagcgtcaccagtatcgaccatgatatcatgctgataaaattgaaaaccgaggcggaactgaatgactacgttaagctggccaacctcccttatcaaaccatatcggagaacaccatgtgctccgttagtacctggtcatataacgtgtgcgatatctataaggaacccgactccctccagaccgttaacatatcagtcattagcaagccccaatgtagggacgcctacaaaacttacaatattaccgagaatatgctgtgcgtcgggattgtgcctggaagacgccagccctgcaaggaggttagcgcagcgccagctatctgtaatggtatgctgcagggcattctctccttcgcagatggatgtgtgttgagggcagacgtcggaatttacgcgaaaatcttttattacattccctggatcgagaacgtcatccagaacaattag

SEQ ID NO: 18170 - RNA, 726 nt, Artificial Sequence
  derived and/or modified sequence
augaaauuuauacucuugugggcucuguuaaaucugacugucgcacucgcuuuuaauccugacuacacuguaucaucaacaccaccuuaccuuguauaucuuaagagcgauuaucugccaugcgccgggguccugauucacccccuguggguuauaaccgcugcucauuguaacuugccgaagcugcgagucauccugggcgugacuauuccagcugauucgaacgagaaacaucuucagguaaucggcuaugaaaagaugauucaccacccccacuucaguguuacuucaauugaccacgauaucaugcugauuaaacucaaaacggaagcugaacugaacgacuaugugaaacucgccaacuuaccuuaucagacgaucagugaaaacacuaugugcagcgugucaacuuggaguuacaauguaugcgacaucuacaaggaaccugauucccuccagacagucaauauauccguuaucaguaaaccacagugccgagaugccuauaagacuuacaacaucacagagaacaugcugugugucggcauuguuccugguagaagacagccuugcaaggaagucagcgccgcaccugcgauaugcaaugguauguuacaaggaauuuuaaguuuugcugacggaugugugcucagagcagacgucgguaucuaugccaaaaucuucuacuauauuccauggauugaaaacgucauacagaauaauuag

SEQ ID NO: 18171 - RNA, 726 nt, Artificial Sequence
  derived and/or modified sequence
augaaauucauucuucuuugggcucuuuugaauuuaacagucgcucuggccuuuaacccggauuauacaguuuccuccaccccuccuuaccuugucuaucuuaaaagcgauuaucugcccugcgccggcguccucauacaccccuuauggguaaucaccgcugcccacugcaaccucccaaagcuaagagugauuuuaggcgugacuaucccugccgacucuaacgagaaacauuuacaaguaaucggcuaugagaagaugauucaccacccgcacuucuccgucaccaguauugaccacgauaucaugcuuauuaagcucaaaacagaagcagaguugaacgauuaugugaagcuggcuaaucugccauaucagaccauauccgagaacacaaugugcucggucaguacauggucuuacaacguuugcgacaucuauaaagaacccgauucacuccagacugucaacauuagugugauuagcaaaccgcaaugcagagacgccuauaaaaccuauaauauuaccgagaacaugcugugcguaggaauugugcccggccgacgccagcccuguaaagaggugagcgcugcuccggcuauuuguaacggcaugcugcaaggcauuuugucuuucgccgacgguuguguguugcgggccgaugugggaauauaugcaaaaaucuucuauuauauuccuuggauugaaaacgugauucagaauaacuag

SEQ ID NO: 18172 - RNA, 726 nt, Artificial Sequence
  derived and/or modified sequence
augaaauucauccugcucugggcacuuuuaaauuugacgguggccuuggcauucaaucccgauuauacagucuccucuacgccacccuaccuuguuuaucucaaaucugauuaccuucccugugccggcguauugauucauccacugugggugauuacugcagcccauugcaaucuuccgaagcugcgcguuauucuggguguaaccauaccugccgacaguaaugagaaacaucuccaagugauaggauaugaaaagaugauacaucacccucauuuuuccgugaccaguauugaccacgacauuaugcuaaucaaacugaagaccgaagcagaauugaacgacuacgugaaacuggccaaucuccccuaccagacuauuucagaaaacacuauguguagcguguccaccuggucuuacaacguuugugauaucuauaaggaaccagacagucuccaaacagugaauaucagugucauuagcaagccccaauguagggaugcuuacaaaacuuacaacaucacggaaaauauguuaugugucggaaucgugccgggcaggcggcagccauguaaagagguaucagcagcaccggcuaucugcaauggcaugcuacaaggcauccucucauuugccgacgguugcguucuaagagcagacguaggaauuuacgcaaaaauuuuuuauuacauccccuggauugaaaacguuauacagaauaacuag

SEQ ID NO: 18173 - RNA, 726 nt, Artificial Sequence
  derived and/or modified sequence
augaaauucauucuucuuugggcucuuuugaauuuaacagucgcucuggccuuuaacccggauuauacaguuuccuccaccccuccuuaccuugucuaucuuaaaagcgauuaucugcccugcgccggcguccucauacaccccuuauggguaaucaccgcugcccacugcaaccucccaaagcuaagagugauuuuaggcgugacuaucccugccgacucuaacgagaaacauuuacaaguaaucggcuaugagaagaugauucaccacccgcacuucuccgucaccaguauugaccacgauauaaugcugauuaaacugaagacagaagccgagcuuaacgacuauguaaaauuagcgaaucugcccuaccagacaaucagugaaaacaccaugugcaguguaucaacuuggucauauaaugugugcgauauauacaaagaaccugauucccugcagaccguaaauauuagcgugaucucaaagccacagugcagagaugcuuauaaaaccuacaacaucacagaaaauaugcuuugcgucgggauugugccuggccgaaggcagccuugcaaggaggucuccgccgcucccgcgaucugcaacgggauguuacaagggauucucucuuucgcugaugggugcguucugcgggcggacgucggaauuuacgcuaaaauuuucuauuauauacccuggauugagaaugugauucagaauaacuag

SEQ ID NO: 18174 - protein, 240 aa, Artificial Sequence [sequence omitted]

SEQ ID NO: 18175 - protein, 255 aa, Artificial Sequence
  derived and/or modified sequence
MVSWMISRAVVLVFGMLYPAYYSYKAVKTKNVKEYVRWMMYWIVFALYTVIETVADQTVAWFPLYYELKIAFVIWLLSPYTKGASLIYRKFLHPLLSSKEREIDDYIVQAKERGYETMVNFGRQGLNLAATAAVTAAVKSQGAITERLRSFSMHDLTTIQGDEPVGQRPYQPLPEAKKKSKPAPSESAGYGIPLKDGDEKTDEEAEGPYSDNEMLTHKGLRRSQSMKSVKTTKGRKEVRYGSLKYKVKKRPQVYF

SEQ ID NO: 18176 - protein, 257 aa, Artificial Sequence
  derived and/or modified sequence
LMMWLLVERALIQLVFGMLYPAYYSYKAVKTKNVKEYVRWMMYWIVFALYTVIETVADQTVAWFPLYYELKIAFVIWLLSPYTKGASLIYRKFLHPLLSSKEREIDDYIVQAKERGYETMVNFGRQGLNLAATAAVTAAVKSQGAITERLRSFSMHDLTTIQGDEPVGQRPYQPLPEAKKKSKPAPSESAGYGIPLKDGDEKTDEEAEGPYSDNEMLTHKGLRRSQSMKSVKTTKGRKEVRYGSLKYKVKKRPQVYF

SEQ ID NO: 18177 - DNA, 723 bp, Artificial Sequence
  derived and/or modified sequence
atgttataccctgcctattacagttacaaggctgtcaagactaaaaatgtcaaagagtatgtgcgttggatgatgtactggattgtgtttgctctgtacaccgtcatcgaaaccgtagcggaccagactgtcgcctggtttcccctgtattatgaacttaaaattgctttcgtcatctggctactgagtccctataccaagggcgcaagcctgatttatcggaaattcctccacccactcctgtctagtaaagagagggaaatcgatgactatattgtccaagctaaagaacgtggatatgagacaatggtgaacttcgggcggcaggggctgaatctggccgccactgctgcagtaacggctgccgtgaaatcccaaggagctatcacggaacgcctccgtagtttctcaatgcatgatcttactactattcagggggacgagcctgtaggacagaggccctatcaaccgttacctgaagcaaagaaaaagagcaaacccgccccctctgagtcagctgggtacggcataccacttaaagacggagacgaaaaaaccgacgaggaagcagagggcccatatagtgataacgagatgctcacgcataaggggctgaggaggtcgcaatctatgaaatctgtcaagactacaaagggcaggaaggaagtccgctacggttccctaaagtataaagtgaagaaaagaccccaggtgtacttctag

SEQ ID NO: 18178 - DNA, 768 bp, Artificial Sequence
  derived and/or modified sequence
atggtatcctggatgatcagtagagcagtcgtcctggtttttggcatgctttatcctgcctattattcctataaagcggtgaaaacgaaaaatgttaaggaatatgtgagatggatgatgtactggatcgtgttcgcactgtatactgtaattgaaacagttgcggaccagacagttgcatggtttcccctgtactatgaactgaagatcgccttcgtcatttggttgctgtccccctacactaagggtgcgtctctaatttacaggaaattccttcaccccttactctccagcaaggagagggaaatcgacgactatatcgtgcaagcaaaagagcgtgggtacgagactatggtcaattttgggcggcagggcctgaacctggctgccaccgctgcagtgacagccgccgtgaaaagccaaggcgcaattaccgagcggctcagatcattcagcatgcacgatctcaccaccatccagggtgacgagccggtcgggcaaaggccgtatcagccactccctgaggcaaagaaaaagagcaagcctgctcccagcgagtcagctggttacggcatcccgctgaaggacggagacgagaagactgacgaagaagcagaagggccatatagcgacaacgaaatgttaacccataaggggctgcgccggagccagagtatgaagagcgtaaaaaccactaaaggtcggaaagaagtgcgctatggcagcctaaagtacaaagtcaagaaaagaccccaggtctacttttag

SEQ ID NO: 18179 - DNA, 774 bp, Artificial Sequence
  derived and/or modified sequence
ctcatgatgtggctcttggttgagagggccttaattcagttggtctttgggatgctatacccggcttactactcatacaaagccgttaagaccaagaacgttaaggaatatgtacggtggatgatgtactggatagtgtttgctctgtatacagtgatcgagacagtggcagaccaaaccgtggcctggtttcccctgtactatgaactgaagattgccttcgtcatctggttattgagcccctacaccaagggagcatcactcatctataggaaatttctacaccccctgctgtctagcaaggagagagaaatagacgactacatcgtacaggccaaagagagaggttatgagacaatggttaatttcgggaggcaaggactgaatctcgctgccactgctgccgtgaccgccgctgttaaaagtcaaggggccattacagaacgcctgagaagcttttcaatgcatgatctgactactatacagggcgatgagcctgtcggccaacgcccttatcagcccctcccggaagccaagaaaaagtccaaaccagctccatctgagtcggccgggtacggaattcccttaaaggacggagacgagaagaccgacgaggaggcagagggaccgtattccgacaacgagatgctaacgcacaaaggcctgcggcgatctcagagcatgaagtctgtcaaaacaaccaaagggcgaaaagaggtaagatacggttctctcaaatacaaagtaaaaaaacgcccccaggtctacttttag

SEQ ID NO: 18180 - DNA, 723 bp, Artificial Sequence
  derived and/or modified sequence
atgctgtacccagcctactacagctacaaggctgtgaagaccaagaatgtgaaggagtatgtgcgctggatgatgtactggatcgtgtttgccctgtacaccgtcatcgagaccgtggccgaccagacagtggcctggttccccctgtactatgagctgaagatcgcctttgtgatctggctgctgagcccctacaccaagggggccagcctcatctacaggaagttcctgcaccccctgctgagcagcaaggagcgggagattgatgactacatcgtgcaggccaaggagcggggctatgagaccatggtgaactttggccggcagggcctgaacctggccgccacagctgctgtgacagctgctgtgaagagccagggcgccatcacagagcggctgcgctccttctccatgcatgacctgaccaccatccagggagatgagcctgtgggccagaggccctaccagcccctgcctgaggccaagaagaagagcaagccagcccccagcgagagcgctggctacggcatccccctgaaggatggagatgagaagacagatgaggaggccgagggcccctacagcgacaatgagatgctgacccacaagggcctgcggcgcagccagagcatgaagtctgtgaagaccaccaagggcaggaaggaggtgcgctatggcagcctgaagtacaaggtgaagaagaggccccaggtgtacttctag

SEQ ID NO: 18181 - DNA, 768 bp, Artificial Sequence
  derived and/or modified sequence
atggtgtcctggatgatcagcagagctgtggtgctggtgtttggcatgctgtacccagcctactacagctacaaggctgtgaagaccaagaatgtgaaggagtatgtgcgctggatgatgtactggatcgtgtttgccctgtacacagtgattgaaacagtggccgaccagacagtggcctggttccccctgtactatgagctgaagatcgccttcgtcatctggctgctgagcccctacaccaagggggccagcctcatctacaggaagttcctgcaccccctgctgagcagcaaggagcgggagattgatgactacatcgtgcaggccaaggagcggggctatgagaccatggtgaactttggccggcagggcctgaacctggccgccacagctgctgtgacagctgctgtgaagagccagggcgccatcacagagcggctgcggagcttctccatgcatgacctgaccaccatccagggagatgagcctgtgggccagaggccctaccagcccctgcctgaggccaagaagaagagcaagccagcccccagcgagagcgctggctacggcatccccctgaaggatggagatgagaagacagatgaggaggccgagggcccctacagcgacaatgagatgctgacccacaagggcctgcggcgcagccagagcatgaagtctgtgaagaccaccaagggcaggaaggaggtgcgctatggcagcctgaagtacaaggtgaagaagaggccccaggtgtacttctag

SEQ ID NO: 18182 - DNA, 774 bp, Artificial Sequence
  derived and/or modified sequence
ctgatgatgtggctgctggtggagcgggccctgatccagctggtgtttggcatgctgtacccagcctactacagctacaaggctgtgaagaccaagaatgtgaaggagtatgtgcgctggatgatgtactggatcgtgtttgccctgtacacagtgattgaaacagtggccgaccagacagtggcctggttccccctgtactatgagctgaagatcgccttcgtcatctggctgctgagcccctacaccaagggggccagcctcatctacaggaagttcctgcaccccctgctgagcagcaaggagcgggagattgatgactacatcgtgcaggccaaggagcggggctatgagaccatggtgaactttggccggcagggcctgaacctggccgccacagctgctgtgacagctgctgtgaagagccagggcgccatcacagagcggctgcggagcttctccatgcatgacctgaccaccatccagggagatgagcctgtgggccagaggccctaccagcccctgcctgaggccaagaagaagagcaagccagcccccagcgagagcgctggctacggcatccccctgaaggatggagatgagaagacagatgaggaggccgagggcccctacagcgacaatgagatgctgacccacaagggcctgcggcgcagccagagcatgaagtctgtgaagaccaccaagggcaggaaggaggtgcgctatggcagcctgaagtacaaggtgaagaagaggccccaggtgtacttctag

SEQ ID NO: 18183 - DNA, 723 bp, Artificial Sequence
  derived and/or modified sequence
atgctgtaccccgcctactacagctacaaggccgtgaagaccaagaatgtgaaggaatatgtaaggtggatgatgtactggatcgtctttgcactgtatacagtaatagagaccgtagcggaccagaccgtcgcctggttccctctgtactacgaattgaagatcgcgtttgtgatctggctgctcagcccctatacaaaaggagcctcgctgatctatcgtaagttcctgcatcctctcctgtcgagcaaggagagggagattgatgactatattgtccaggctaaggaaagaggatatgaaaccatggttaactttggacgacagggtctaaacctggccgccacagctgctgttaccgcagccgttaagagccagggggccataaccgagaggctgcgctcgttcagcatgcatgacttaactaccatacagggagatgaaccagtcgggcagcgtccctaccagcctctcccggaggccaagaaaaagtctaaacctgccccatctgagagcgccggatacggcattcccttgaaggacggcgatgaaaaaactgacgaagaggctgaggggccttactctgacaacgagatgctcacacataaaggactgcggcgaagtcagagcatgaaatctgtgaagacgacgaaagggcgcaaggaggtgcggtacggctccctgaagtacaaggtgaagaagaggccacaggtatacttttag

SEQ ID NO: 18184 - DNA, 768 bp, Artificial Sequence
  derived and/or modified sequence
atggtgagctggatgatcagccgggccgtggtgctggtgttcggcatgttgtatccagcatattattcctacaaagccgtgaaaacaaaaaacgtgaaggaatacgtgaggtggatgatgtactggatcgtgtttgcactctatacggtgatagaaaccgtggcggatcaaacagtggcttggttccctctctactacgagctgaagattgcgtttgtcatttggttactgagcccttatacaaagggtgctagtctgatttaccgaaaatttctccacccattactgtcttctaaggagcgagaaatcgatgactacatcgttcaggccaaagaaagaggatatgagacaatggtgaactttggtagacagggcctcaacttagccgctaccgcagccgtcactgcagccgtgaaatctcagggagccatcaccgagagactgagatctttcagcatgcatgacttaaccacgattcagggagacgagcccgttggccagaggccctaccagccactgcctgaagcaaagaaaaaatccaaaccggctccgtccgagtccgccgggtatggcatcccactgaaagatggagatgagaaaaccgacgaggaagctgaagggccttattcagacaatgaaatgctcactcataaaggactaagacggtcgcagtccatgaagtctgtgaaaactactaaaggaaggaaggaagtacgctacgggtcattaaaatacaaggtcaagaagcggcctcaggtgtacttttag

SEQ ID NO: 18185 - DNA, 774 bp, Artificial Sequence
  derived and/or modified sequence
ctgatgatgtggctgctggtggagcgggccctgatccagctggtgttcggaatgctctaccctgcttactatagctacaaggcggtgaagacaaagaacgttaaagaatacgtaagatggatgatgtactggatcgttttcgccctctacaccgttatcgaaactgttgccgatcagactgtggcatggttccccctgtattatgaactgaagatcgcattcgtgatctggctgctgtctccttatacgaagggagcctccctgatttaccggaagttcctgcacccactactgtcaagcaaggagagagagatagacgattacatagtacaagctaaagagagaggctacgaaaccatggtgaattttggtcgacaaggtctgaacctcgctgcaacagctgcagttactgccgccgtcaagtctcagggggccattacagagcgacttcgatccttcagtatgcatgacctgacaacaattcagggagatgagcctgtcggccagaggccatatcagcctctgccagaagctaagaagaagtcgaaacccgcgccttctgagagcgcaggctatgggattcctctgaaagacggcgatgaaaaaacagatgaggaggcagaggggccttactcagacaacgaaatgctgacccacaagggactccggaggtcccagtccatgaagagtgtgaagaccacaaagggcaggaaagaggtcaggtatggctccttgaaatataaggtgaaaaagcggccccaggtatacttctag

SEQ ID NO: 18186 - DNA, 723 bp, Artificial Sequence
  derived and/or modified sequence
atgctgtatccagcgtactactcatacaaagccgtcaagaccaagaacgtgaaagagtatgtgcggtggatgatgtactggattgtttttgcactgtacaccgtcatcgagaccgtcgccgaccagactgtcgcctggttccccctttactatgagcttaagattgcctttgttatttggttgttgtcgccatatacaaagggcgcttccctaatttatcgcaagttcctgcatcccctgctgtcctctaaagaaagggagatcgacgattacattgtacaggcgaaagaacgcggttacgagactatggtcaatttcgggaggcagggtctcaacctggctgctaccgcagccgtaaccgccgctgtgaaaagccagggtgctataaccgagaggctccgtagcttctctatgcacgacctgaccactatccagggagacgagcctgtaggccagcggccatatcagccactgccagaagcaaaaaagaagagcaaacccgcaccatccgaatctgccggatatggcatacccctgaaggacggtgacgaaaaaactgatgaagaggccgaaggcccttactccgacaacgagatgctgactcataagggcctgcgacgatcccagagcatgaagtcggtcaaaaccactaaggggaggaaagaagtgcggtacggttccctgaaatacaaggtgaaaaagaggccacaggtctacttctag

SEQ ID NO: 18187 - DNA, 768 bp, Artificial Sequence
  derived and/or modified sequence
atggtttcctggatgatttctcgagccgtcgtgctcgtcttcggcatgttataccccgcatactacagctataaggccgttaaaactaagaatgttaaagaatatgtaaggtggatgatgtactggattgttttcgctctgtataccgtcatcgaaaccgttgctgatcagaccgtggcctggttccctttgtactatgaactgaagatcgccttcgtcatttggctcctaagcccatacaccaagggggcatccctgatctatcggaagtttcttcatccactcttgtcaagcaaagaacgggagattgatgactacatcgtccaggctaaagagcgcggatatgagaccatggtgaattttggtcggcaaggactgaacttggcagctactgctgccgtgaccgcagccgtcaagtctcagggggctattactgaaaggctacgatctttttccatgcacgacctgacaacgattcaaggagatgaaccggtgggccagcgtccgtatcagccactgccagaggctaaaaagaaaagcaaacccgcacccagtgaaagcgccggatacgggattccgctgaaggatggagatgagaaaactgacgaggaagccgaaggcccatactctgacaatgagatgctcactcacaaaggactgagacgcagccagagcatgaaatcggtcaagactaccaaagggaggaaagaagtccggtatggctccctgaagtacaaagtgaaaaagcggcctcaagtgtacttctag

SEQ ID NO: 18188 - DNA, 774 bp, Artificial Sequence
  derived and/or modified sequence
ctcatgatgtggctcctcgtagaacgagctctgatccagctggtattcggtatgctttatcccgcatactatagctataaggcagtcaaaactaagaacgtcaaggagtacgttcgctggatgatgtattggatagtatttgccctttacacggtgatcgagacagtcgcggatcagactgtggcgtggttcccgctgtattacgaactaaagattgccttcgttatatggctcctctccccttacaccaaaggggcttccctaatttaccggaagttcttacacccattgttaagttctaaggaaagggagattgatgactatattgtgcaagccaaagagagaggatatgagaccatggtgaatttcggccgacagggtctcaacctggcagcgacagcagcagtgaccgccgctgttaagtcgcagggcgcaattactgagagactgagaagcttctccatgcacgacctcaccacaatccaaggagacgaacctgttgggcagcgcccttatcagccattacctgaagcaaaaaaaaaaagtaaacctgccccaagtgagagcgccggatatgggattccactgaaggacggcgatgaaaagacggacgaggaggcagaagggccatacagtgacaatgaaatgctgacccacaaggggctgaggcgttcacagtccatgaaatccgttaagaccaccaagggcagaaaagaggtcaggtacgggagccttaagtataaggtgaagaagcgaccccaagtatatttttag

SEQ ID NO: 18189 - DNA, 5115 bp, Artificial Sequence
  derived and/or modified sequence
cggctcctgagggcgccagcgcggccccggggagcgcgaggagccggcgaagcgcgcggcctgccgttggcggcctggtccgcagcgccctgcgcccacccgccccggacgtggggcccaagcccccgctggtgtttggaatgctttatcctgcatattattcatacaaagctgtgaaaacaaaaaacgtgaaggaatatgttcgatggatgatgtactggattgtttttgctctctatactgtgattgaaacagtagccgatcaaacagttgcttggtttcccctgtactatgagctgaagattgcttttgtcatatggctgctttctccctataccaaaggagcaagtttaatatatagaaaattccttcatccacttctttcttcaaaggaaagggagattgatgattatattgtacaagcaaaggaacgaggctatgaaaccatggtaaactttggacggcaaggtttaaaccttgcagctactgctgctgttactgcagcagtaaagagccaaggagcaataactgaacgtttaagaagcttcagtatgcatgatttaacaactatccaaggtgatgagcctgtgggacaaagaccataccaacctctaccagaagcaaaaaagaaaagtaaaccagcccccagtgaatcagcaggttatggaattccactgaaagacggagatgagaaaacagatgaagaagcagaggggccatattcagataatgagatgttaacacacaaagggcttcgaagatcgcaaagcatgaaatctgtgaaaaccaccaaaggccgcaaagaggtgcggtacgggtcactaaaatacaaagtgaagaaacgaccacaagtgtatttttagtcatctacacgtcaaatatcccaagacagattatgctaaatacatcgacttcatcttctaacatgatatattcaggatttacacattaaaatgattatttaaattgtggcagtgatggggtttactttcatgaatttaaattgtttttatttctgtaacaattgcttccaaatattgactactaaaggcagttctgcaagatgtactaaatatgtatattagaaattatagaaaatcatgttgtccgttttcaaattcatcaacagcctagagtgcctgagatataagatgaaacacaaatccacagtatacttgaaaggagcctttttacggttcaggataaatcagcctttgtgatgtactgtgtttacctccttttgtgttgtatctggtaattaaataggcctcagattcagcagtgacataacaaggacataatgtaagataataaagtaggttttatatattctttaaatttttacttatataatactttctagtttttccaccatcagctgaaagtttttgaaacaaatatttgaaaaccaggtatccacacatagcacttttattcctgactagttttgcacacttgaaaattgtttacttattttacaactgttttactgatgctatctttattgtttttgccgtattctgacatgtcaaatctatgccttgaattatatcatctcttttcctgtgggtttcatttgttaaattcattggattttaataatataaaagtatagctaattgttcagttttaactatttttaattatcttcttaacaaataagaagttgctttaaacattaaccaattttctatatttagctatacagagtaattgaacttaacatgtttttgtcaacaccaattacattttcagcttttaaaaatggtagcttttgtgaaatagaatcagtgaccagtatagcacttagatcccttctaactcatataatttttctcagccaatccattcacaagcttggcattgacatgtgctgctagtttataaactggcattgacgaaaatcatttgaatctcttctggctgagataatttgccaatgcaaaatacagttgtcattaatcctgcacattagaaattattagaaacatattactttttaactttaaatctcaaagagattttgagttattgaattcttaaggctttcttagcttgaactgataactatgcattatgaaccctaagtcaatatatttttggtggttttagtgatcagtaatcaaatttgtacttattatgcttgttcaggtaatttacttgactgttctatttgtttgtccaaaagataaaatgatgagagagattcgagaggtctttgatctgtctcccttttaagaaatgaagccagctggtaatgtatattcaggacttcctcagagtattggccaagaacataatgtttacacaggagtaccttggtataatgcatacattgtctcatgatactagtcataaaatattttatggattatttcacattcttcatatataacaagtaaaattaattcagttttcttctcccaacgtttaattctgaataactctatctactttaccctaatttttagcctcttaatttctggaaggactctaatttctattccaaatttctatgaattctaattgtaaattatcggaacagagttttatttatatgacctggtactagacttcttaatataactgttacactgtccttgtctttcctactcaaagacagtatcatctgaagttgcctaataaggtcatgtgagtcaagaactttatctgtgggagctgatttgcaccattttaccttttttttttttttttttttgagacggagtcttgctctgtcaccaggctggagtgcagtggcgcgatctcggctcactacaacctctgcctcccgggttcgagcgattctcctgcctcggcctcccgagtaactgggtctacaggcccgtgctaccacgcccagctaatttttgtctttttagtagagacagggtttaaccatgttgcccaggatggtctccatctcttgacctcgtgatccgcccgcctcggcctcccaaacttctgggattacaggcgtgagccaccgcacccagccaccattttatctctctaaagtctggtcccagtattaaacctattctttagtaaactcatattactgttctaaattgaagaaattatttattactctgtacttctagactcaaaattctttatcaaagatagtctcaaagaggtagtacaagtcctgtttaactgcactttttcacattcacagtgcttcctctgatatctttccttacatcattatacactgttgatatcattttactcttctttctcttctacatttcttaaattttggttcttttcctgtacatgtgttttagcggggcccttttctttgaactttgtctaattagcctgtacatttttgtttcttttaaggtagaacagatctttttttgtttctccttttaagtctactggttttaaaagaggtaaatgtatccatagaccacagtgccttgctttttcctctgccagcacatggagcacgggattagatgcacaaacctatttagggaactattttggtagatgtttgagtttatacagaaattgcagctggtattttattttgctgtacatttactcaacttgtccattagtatttaactatttccagagtttgtttaggagtaagaattgacccattcgttagtttaccatattttttcctggtataaaaaggagccagaaataagccttattgctaaataattaattatgtaagcccacctaggtcctgcataagatccccctcacatacttcacaatatatatgtgtgtgtgtgtgtgtgtgtgtgtgtgtgtgtgtgtgtgtgtatttggctaaaaaattatactgccaaaattactgattataaatacttgactacactgattgatgggacaaaatgattaaagtattttcagggatcttattccatatgtcaccaccaaagatttctacagtgttataaagtatataaatattccaaatttctgtggttaaatatttttttcttttttttccttttttagaataacacagtctgtgctttccaaaaatgcttgaacttttatgttgttaagaaatatataatgatatcttacattaagcatgagtctaatttgtattaattgggatggactaaattttcatttgattatcaggaaaattaaggagttatatatttaaaagcaattttctgtgttttcttctttgtaagttgactcatttgtgaagcaattaggcaaattttgagaagatcattgttattgtggtttgcagtatatatttcttagtaaatatcacttaagattaaatttttcagaaagaaaattatagcttttttcccaaaatatttttaagatttaatctttttgtagtatgctacagatttaattatattaactcttttttaagacattgaccatgacttaacattttgccttctaacaccttttaaatctatgtactttaatagttaagagaaaataagtttgcagatttttaataatctgtttgtaaaaggctatctctaagcctagtatgtgggtaattttacaggtgtgttttttgataactttaatataaaataaactcattttatttgtggcaattcgcgtttctttttttatgccagagtacatatgttggattccatgaattggtattacttattattatgtgttgattaaatatatgcacacacttaggattacagatcacagagcaaattatgaaaatcataaacattctggtatggtcatccataggattatgaaaaagaaatactgaattgttaaatttggatgttagaaaggaaagataggaaaaacaatgagtacagaaatcctcaccatcaatttggatgggttagctgtctcaggcataaaatgtaacacaaaattcagatttatgtatcctggaaatgttctggggttccatctgttttaaagttagacgtctgtctgcctcacatttaagctttagagagaaatcctatgttttaagaagtttctttgtgttacttcattatgacacataatgcgtgttaaggtctttctagatagcattttaaatggaattattttcattttcattatgaggtatatacttgtaatgatctaaagaggttagaaatataaataaaaattcaaaag

SEQ ID NO: 18190 - DNA, 5205 bp, Artificial Sequence
  derived and/or modified sequence
gggggaccgacctctgcgcagcccaggccgccgcgcgcacacaccgggcccggctcctgagggcgccagcgcggccccggggagcgcgaggagccggcgaagcgcgcggcctgccgttggcggcctggtccgcagcgccctgcgcccacccgccccggacgtggggcccaagcccccgtgaagatggtgtcctggatgatctccagagccgtggtgctggtgtttggaatgctttatcctgcatattattcatacaaagctgtgaaaacaaaaaacgtgaaggaatatgttcgatggatgatgtactggattgtttttgctctctatactgtgattgaaacagtagccgatcaaacagttgcttggtttcccctgtactatgagctgaagattgcttttgtcatatggctgctttctccctataccaaaggagcaagtttaatatatagaaaattccttcatccacttctttcttcaaaggaaagggagattgatgattatattgtacaagcaaaggaacgaggctatgaaaccatggtaaactttggacggcaaggtttaaaccttgcagctactgctgctgttactgcagcagtaaagagccaaggagcaataactgaacgtttaagaagcttcagtatgcatgatttaacaactatccaaggtgatgagcctgtgggacaaagaccataccaacctctaccagaagcaaaaaagaaaagtaaaccagcccccagtgaatcagcaggttatggaattccactgaaagacggagatgagaaaacagatgaagaagcagaggggccatattcagataatgagatgttaacacacaaagggcttcgaagatcgcaaagcatgaaatctgtgaaaaccaccaaaggccgcaaagaggtgcggtacgggtcactaaaatacaaagtgaagaaacgaccacaagtgtatttttagtcatctacacgtcaaatatcccaagacagattatgctaaatacatcgacttcatcttctaacatgatatattcaggatttacacattaaaatgattatttaaattgtggcagtgatggggtttactttcatgaatttaaattgtttttatttctgtaacaattgcttccaaatattgactactaaaggcagttctgcaagatgtactaaatatgtatattagaaattatagaaaatcatgttgtccgttttcaaattcatcaacagcctagagtgcctgagatataagatgaaacacaaatccacagtatacttgaaaggagcctttttacggttcaggataaatcagcctttgtgatgtactgtgtttacctccttttgtgttgtatctggtaattaaataggcctcagattcagcagtgacataacaaggacataatgtaagataataaagtaggttttatatattctttaaatttttacttatataatactttctagtttttccaccatcagctgaaagtttttgaaacaaatatttgaaaaccaggtatccacacatagcacttttattcctgactagttttgcacacttgaaaattgtttacttattttacaactgttttactgatgctatctttattgtttttgccgtattctgacatgtcaaatctatgccttgaattatatcatctcttttcctgtgggtttcatttgttaaattcattggattttaataatataaaagtatagctaattgttcagttttaactatttttaattatcttcttaacaaataagaagttgctttaaacattaaccaattttctatatttagctatacagagtaattgaacttaacatgtttttgtcaacaccaattacattttcagcttttaaaaatggtagcttttgtgaaatagaatcagtgaccagtatagcacttagatcccttctaactcatataatttttctcagccaatccattcacaagcttggcattgacatgtgctgctagtttataaactggcattgacgaaaatcatttgaatctcttctggctgagataatttgccaatgcaaaatacagttgtcattaatcctgcacattagaaattattagaaacatattactttttaactttaaatctcaaagagattttgagttattgaattcttaaggctttcttagcttgaactgataactatgcattatgaaccctaagtcaatatatttttggtggttttagtgatcagtaatcaaatttgtacttattatgcttgttcaggtaatttacttgactgttctatttgtttgtccaaaagataaaatgatgagagagattcgagaggtctttgatctgtctcccttttaagaaatgaagccagctggtaatgtatattcaggacttcctcagagtattggccaagaacataatgtttacacaggagtaccttggtataatgcatacattgtctcatgatactagtcataaaatattttatggattatttcacattcttcatatataacaagtaaaattaattcagttttcttctcccaacgtttaattctgaataactctatctactttaccctaatttttagcctcttaatttctggaaggactctaatttctattccaaatttctatgaattctaattgtaaattatcggaacagagttttatttatatgacctggtactagacttcttaatataactgttacactgtccttgtctttcctactcaaagacagtatcatctgaagttgcctaataaggtcatgtgagtcaagaactttatctgtgggagctgatttgcaccattttaccttttttttttttttttttttgagacggagtcttgctctgtcaccaggctggagtgcagtggcgcgatctcggctcactacaacctctgcctcccgggttcgagcgattctcctgcctcggcctcccgagtaactgggtctacaggcccgtgctaccacgcccagctaatttttgtctttttagtagagacagggtttaaccatgttgcccaggatggtctccatctcttgacctcgtgatccgcccgcctcggcctcccaaacttctgggattacaggcgtgagccaccgcacccagccaccattttatctctctaaagtctggtcccagtattaaacctattctttagtaaactcatattactgttctaaattgaagaaattatttattactctgtacttctagactcaaaattctttatcaaagatagtctcaaagaggtagtacaagtcctgtttaactgcactttttcacattcacagtgcttcctctgatatctttccttacatcattatacactgttgatatcattttactcttctttctcttctacatttcttaaattttggttcttttcctgtacatgtgttttagcggggcccttttctttgaactttgtctaattagcctgtacatttttgtttcttttaaggtagaacagatctttttttgtttctccttttaagtctactggttttaaaagaggtaaatgtatccatagaccacagtgccttgctttttcctctgccagcacatggagcacgggattagatgcacaaacctatttagggaactattttggtagatgtttgagtttatacagaaattgcagctggtattttattttgctgtacatttactcaacttgtccattagtatttaactatttccagagtttgtttaggagtaagaattgacccattcgttagtttaccatattttttcctggtataaaaaggagccagaaataagccttattgctaaataattaattatgtaagcccacctaggtcctgcataagatccccctcacatacttcacaatatatatgtgtgtgtgtgtgtgtgtgtgtgtgtgtgtgtgtgtgtgtgtatttggctaaaaaattatactgccaaaattactgattataaatacttgactacactgattgatgggacaaaatgattaaagtattttcagggatcttattccatatgtcaccaccaaagatttctacagtgttataaagtatataaatattccaaatttctgtggttaaatatttttttcttttttttccttttttagaataacacagtctgtgctttccaaaaatgcttgaacttttatgttgttaagaaatatataatgatatcttacattaagcatgagtctaatttgtattaattgggatggactaaattttcatttgattatcaggaaaattaaggagttatatatttaaaagcaattttctgtgttttcttctttgtaagttgactcatttgtgaagcaattaggcaaattttgagaagatcattgttattgtggtttgcagtatatatttcttagtaaatatcacttaagattaaatttttcagaaagaaaattatagcttttttcccaaaatatttttaagatttaatctttttgtagtatgctacagatttaattatattaactcttttttaagacattgaccatgacttaacattttgccttctaacaccttttaaatctatgtactttaatagttaagagaaaataagtttgcagatttttaataatctgtttgtaaaaggctatctctaagcctagtatgtgggtaattttacaggtgtgttttttgataactttaatataaaataaactcattttatttgtggcaattcgcgtttctttttttatgccagagtacatatgttggattccatgaattggtattacttattattatgtgttgattaaatatatgcacacacttaggattacagatcacagagcaaattatgaaaatcataaacattctggtatggtcatccataggattatgaaaaagaaatactgaattgttaaatttggatgttagaaaggaaagataggaaaaacaatgagtacagaaatcctcaccatcaatttggatgggttagctgtctcaggcataaaatgtaacacaaaattcagatttatgtatcctggaaatgttctggggttccatctgttttaaagttagacgtctgtctgcctcacatttaagctttagagagaaatcctatgttttaagaagtttctttgtgttacttcattatgacacataatgcgtgttaaggtctttctagatagcattttaaatggaattattttcattttcattatgaggtatatacttgtaatgatctaaagaggttagaaatataaataaaaattcaaaagaa

SEQ ID NO: 18191 - DNA, 5028 bp, Artificial Sequence
  derived and/or modified sequence
ttaatgatgtggcttctagttgagagggccttaatccagctggtgtttggaatgctttatcctgcatattattcatacaaagctgtgaaaacaaaaaacgtgaaggaatatgttcgatggatgatgtactggattgtttttgctctctatactgtgattgaaacagtagccgatcaaacagttgcttggtttcccctgtactatgagctgaagattgcttttgtcatatggctgctttctccctataccaaaggagcaagtttaatatatagaaaattccttcatccacttctttcttcaaaggaaagggagattgatgattatattgtacaagcaaaggaacgaggctatgaaaccatggtaaactttggacggcaaggtttaaaccttgcagctactgctgctgttactgcagcagtaaagagccaaggagcaataactgaacgtttaagaagcttcagtatgcatgatttaacaactatccaaggtgatgagcctgtgggacaaagaccataccaacctctaccagaagcaaaaaagaaaagtaaaccagcccccagtgaatcagcaggttatggaattccactgaaagacggagatgagaaaacagatgaagaagcagaggggccatattcagataatgagatgttaacacacaaagggcttcgaagatcgcaaagcatgaaatctgtgaaaaccaccaaaggccgcaaagaggtgcggtacgggtcactaaaatacaaagtgaagaaacgaccacaagtgtatttttagtcatctacacgtcaaatatcccaagacagattatgctaaatacatcgacttcatcttctaacatgatatattcaggatttacacattaaaatgattatttaaattgtggcagtgatggggtttactttcatgaatttaaattgtttttatttctgtaacaattgcttccaaatattgactactaaaggcagttctgcaagatgtactaaatatgtatattagaaattatagaaaatcatgttgtccgttttcaaattcatcaacagcctagagtgcctgagatataagatgaaacacaaatccacagtatacttgaaaggagcctttttacggttcaggataaatcagcctttgtgatgtactgtgtttacctccttttgtgttgtatctggtaattaaataggcctcagattcagcagtgacataacaaggacataatgtaagataataaagtaggttttatatattctttaaatttttacttatataatactttctagtttttccaccatcagctgaaagtttttgaaacaaatatttgaaaaccaggtatccacacatagcacttttattcctgactagttttgcacacttgaaaattgtttacttattttacaactgttttactgatgctatctttattgtttttgccgtattctgacatgtcaaatctatgccttgaattatatcatctcttttcctgtgggtttcatttgttaaattcattggattttaataatataaaagtatagctaattgttcagttttaactatttttaattatcttcttaacaaataagaagttgctttaaacattaaccaattttctatatttagctatacagagtaattgaacttaacatgtttttgtcaacaccaattacattttcagcttttaaaaatggtagcttttgtgaaatagaatcagtgaccagtatagcacttagatcccttctaactcatataatttttctcagccaatccattcacaagcttggcattgacatgtgctgctagtttataaactggcattgacgaaaatcatttgaatctcttctggctgagataatttgccaatgcaaaatacagttgtcattaatcctgcacattagaaattattagaaacatattactttttaactttaaatctcaaagagattttgagttattgaattcttaaggctttcttagcttgaactgataactatgcattatgaaccctaagtcaatatatttttggtggttttagtgatcagtaatcaaatttgtacttattatgcttgttcaggtaatttacttgactgttctatttgtttgtccaaaagataaaatgatgagagagattcgagaggtctttgatctgtctcccttttaagaaatgaagccagctggtaatgtatattcaggacttcctcagagtattggccaagaacataatgtttacacaggagtaccttggtataatgcatacattgtctcatgatactagtcataaaatattttatggattatttcacattcttcatatataacaagtaaaattaattcagttttcttctcccaacgtttaattctgaataactctatctactttaccctaatttttagcctcttaatttctggaaggactctaatttctattccaaatttctatgaattctaattgtaaattatcggaacagagttttatttatatgacctggtactagacttcttaatataactgttacactgtccttgtctttcctactcaaagacagtatcatctgaagttgcctaataaggtcatgtgagtcaagaactttatctgtgggagctgatttgcaccattttaccttttttttttttttttttttgagacggagtcttgctctgtcaccaggctggagtgcagtggcgcgatctcggctcactacaacctctgcctcccgggttcgagcgattctcctgcctcggcctcccgagtaactgggtctacaggcccgtgctaccacgcccagctaatttttgtctttttagtagagacagggtttaaccatgttgcccaggatggtctccatctcttgacctcgtgatccgcccgcctcggcctcccaaacttctgggattacaggcgtgagccaccgcacccagccaccattttatctctctaaagtctggtcccagtattaaacctattctttagtaaactcatattactgttctaaattgaagaaattatttattactctgtacttctagactcaaaattctttatcaaagatagtctcaaagaggtagtacaagtcctgtttaactgcactttttcacattcacagtgcttcctctgatatctttccttacatcattatacactgttgatatcattttactcttctttctcttctacatttcttaaattttggttcttttcctgtacatgtgttttagcggggcccttttctttgaactttgtctaattagcctgtacatttttgtttcttttaaggtagaacagatctttttttgtttctccttttaagtctactggttttaaaagaggtaaatgtatccatagaccacagtgccttgctttttcctctgccagcacatggagcacgggattagatgcacaaacctatttagggaactattttggtagatgtttgagtttatacagaaattgcagctggtattttattttgctgtacatttactcaacttgtccattagtatttaactatttccagagtttgtttaggagtaagaattgacccattcgttagtttaccatattttttcctggtataaaaaggagccagaaataagccttattgctaaataattaattatgtaagcccacctaggtcctgcataagatccccctcacatacttcacaatatatatgtgtgtgtgtgtgtgtgtgtgtgtgtgtgtgtgtgtgtgtgtatttggctaaaaaattatactgccaaaattactgattataaatacttgactacactgattgatgggacaaaatgattaaagtattttcagggatcttattccatatgtcaccaccaaagatttctacagtgttataaagtatataaatattccaaatttctgtggttaaatatttttttcttttttttccttttttagaataacacagtctgtgctttccaaaaatgcttgaacttttatgttgttaagaaatatataatgatatcttacattaagcatgagtctaatttgtattaattgggatggactaaattttcatttgattatcaggaaaattaaggagttatatatttaaaagcaattttctgtgttttcttctttgtaagttgactcatttgtgaagcaattaggcaaattttgagaagatcattgttattgtggtttgcagtatatatttcttagtaaatatcacttaagattaaatttttcagaaagaaaattatagcttttttcccaaaatatttttaagatttaatctttttgtagtatgctacagatttaattatattaactcttttttaagacattgaccatgacttaacattttgccttctaacaccttttaaatctatgtactttaatagttaagagaaaataagtttgcagatttttaataatctgtttgtaaaaggctatctctaagcctagtatgtgggtaattttacaggtgtgttttttgataactttaatataaaataaactcattttatttgtggcaattcgcgtttctttttttatgccagagtacatatgttggattccatgaattggtattacttattattatgtgttgattaaatatatgcacacacttaggattacagatcacagagcaaattatgaaaatcataaacattctggtatggtcatccataggattatgaaaaagaaatactgaattgttaaatttggatgttagaaaggaaagataggaaaaacaatgagtacagaaatcctcaccatcaatttggatgggttagctgtctcaggcataaaatgtaacacaaaattcagatttatgtatcctggaaatgttctggggttccatctgttttaaagttagacgtctgtctgcctcacatttaagctttagagagaaatcctatgttttaagaagtttctttgtgttacttcattatgacacataatgcgtgttaaggtctttctagatagcattttaaatggaattattttcattttcattatgaggtatatacttgtaatgatctaaagaggttagaaatataaataaaaattcaaaagaa

SEQ ID NO: 18192 - DNA, 723 bp, Artificial Sequence
  derived and/or modified sequence
atgctgtaccccgcctactacagctacaaggccgtgaagaccaagaacgtgaaggagtacgtgagatggatgatgtactggatcgtgttcgccctgtacaccgtgatcgagaccgtggccgaccagaccgtggcctggttccccctgtactacgagctgaagatcgccttcgtgatctggctgctgagcccctacaccaagggcgccagcctgatctacagaaagttcctgcaccccctgctgagcagcaaggagagagagatcgacgactacatcgtgcaggccaaggagagaggctacgagaccatggtgaacttcggcagacagggcctgaacctggccgccaccgccgccgtgaccgccgccgtgaagagccagggcgccatcaccgagagactgagaagcttcagcatgcacgacctgaccaccatccagggcgacgagcccgtgggccagagaccctaccagcccctgcccgaggccaagaagaagagcaagcccgcccccagcgagagcgccggctacggcatccccctgaaggacggcgacgagaagaccgacgaggaggccgagggcccctacagcgacaacgagatgctgacccacaagggcctgagaagaagccagagcatgaagagcgtgaagaccaccaagggcagaaaggaggtgagatacggcagcctgaagtacaaggtgaagaagagaccccaggtgtacttctag

SEQ ID NO: 18193 - DNA, 768 bp, Artificial Sequence
  derived and/or modified sequence
atggtgagctggatgatcagcagagccgtggtgctggtgttcggcatgctgtaccccgcctactacagctacaaggccgtgaagaccaagaacgtgaaggagtacgtgagatggatgatgtactggatcgtgttcgccctgtacaccgtgatcgagaccgtggccgaccagaccgtggcctggttccccctgtactacgagctgaagatcgccttcgtgatctggctgctgagcccctacaccaagggcgccagcctgatctacagaaagttcctgcaccccctgctgagcagcaaggagagagagatcgacgactacatcgtgcaggccaaggagagaggctacgagaccatggtgaacttcggcagacagggcctgaacctggccgccaccgccgccgtgaccgccgccgtgaagagccagggcgccatcaccgagagactgagaagcttcagcatgcacgacctgaccaccatccagggcgacgagcccgtgggccagagaccctaccagcccctgcccgaggccaagaagaagagcaagcccgcccccagcgagagcgccggctacggcatccccctgaaggacggcgacgagaagaccgacgaggaggccgagggcccctacagcgacaacgagatgctgacccacaagggcctgagaagaagccagagcatgaagagcgtgaagaccaccaagggcagaaaggaggtgagatacggcagcctgaagtacaaggtgaagaagagaccccaggtgtacttctag

SEQ ID NO: 18194 - DNA, 774 bp, Artificial Sequence
  derived and/or modified sequence
ctgatgatgtggctgctggtggagagagccctgatccagctggtgttcggcatgctgtaccccgcctactacagctacaaggccgtgaagaccaagaacgtgaaggagtacgtgagatggatgatgtactggatcgtgttcgccctgtacaccgtgatcgagaccgtggccgaccagaccgtggcctggttccccctgtactacgagctgaagatcgccttcgtgatctggctgctgagcccctacaccaagggcgccagcctgatctacagaaagttcctgcaccccctgctgagcagcaaggagagagagatcgacgactacatcgtgcaggccaaggagagaggctacgagaccatggtgaacttcggcagacagggcctgaacctggccgccaccgccgccgtgaccgccgccgtgaagagccagggcgccatcaccgagagactgagaagcttcagcatgcacgacctgaccaccatccagggcgacgagcccgtgggccagagaccctaccagcccctgcccgaggccaagaagaagagcaagcccgcccccagcgagagcgccggctacggcatccccctgaaggacggcgacgagaagaccgacgaggaggccgagggcccctacagcgacaacgagatgctgacccacaagggcctgagaagaagccagagcatgaagagcgtgaagaccaccaagggcagaaaggaggtgagatacggcagcctgaagtacaaggtgaagaagagaccccaggtgtacttctag

SEQ ID NO: 18195 - protein, 1229 aa, Artificial Sequence
  derived and/or modified sequence
MGDMTNSDFYSKNQRNESSHGGEFGCTMEELRSLMELRGTEAVVKIKETYGDTEAICRRLKTSPVEGLPGTAPDLEKRKQIFGQNFIPPKKPKTFLQLVWEALQDVTLIILEIAAIISLGLSFYHPPGEGNEGCATAQGGAEDEGEAEAGWIEGAAILLSVICVVLVTAFNDWSKEKQFRGLQSRIEQEQKFTVVRAGQVVQIPVAEIVVGDIAQVKYGDLLPADGLFIQGNDLKIDESSLTGESDQVRKSVDKDPMLLSGTHVMEGSGRMLVTAVGVNSQTGIIFTLLGAGGEEEEKKDKKGVKKGDGLQLPAADGAAASNAADSANASLVNAKQQDGAAAMEMQPLKSAEGGDADDRKKASMHKKEKSVLQGKLTKLAVQIGKAGLVMSAITVIILVLYFTVDTFVVNKKPWLPECTPVYVQYFVKFFIIGVTVLVVAVPEGLPLAVTISLAYSVKKMMKDNNLVRHLDACETMGNATAICSDKTGTLTTNRMTVVQAYVGDVHYKEIPDPSSINTKTMELLINAIAINSAYTTKILPPEKEGALPRQVGNKTECGLLGFVLDLKQDYEPVRSQMPEEKLYKVYTFNSVRKSMSTVIKLPDESFRMYSKGASEIVLKKCCKILNGAGEPRVFRPRDRDEMVKKVIEPMACDGLRTICVAYRDFPSSPEPDWDNENDILNELTCICVVGIEDPVRPEVPEAIRKCQRAGITVRMVTGDNINTARAIAIKCGIIHPGEDFLCLEGKEFNRRIRNEKGEIEQERIDKIWPKLRVLARSSPTDKHTLVKGIIDSTHTEQRQVVAVTGDGTNDGPALKKADVGFAMGIAGTDVAKEASDIILTDDNFSSIVKAVMWGRNVYDSISKFLQFQLTVNVVAVIVAFTGACITQDSPLKAVQMLWVNLIMDTFASLALATEPPTETLLLRKPYGRNKPLISRTMMKNILGHAVYQLALIFTLLFVGEKMFQIDSGRNAPLHSPPSEHYTIIFNTFVMMQLFNEINARKIHGERNVFDGIFRNPIFCTIVLGTFAIQIVIVQFGGKPFSCSPLQLDQWMWCIFIGLGELVWGQVIATIPTSRLKFLKEAGRLTQKEEIPEEELNEDVEEIDHAERELRRGQILWFRGLNRIQTQIRVVKAFRSSLYEGLEKPESRTSIHNFMAHPEFRIEDSQPHIPLIDDTDLEEDAALKQNSSPPSSLNKNNSAIDSGINLTTDTSKSATSSSPGSPIHSLETSL

SEQ ID NO: 18196 - protein, 1243 aa, Artificial Sequence [sequence omitted]

SEQ ID NO: 18197 - DNA, 3690 bp, Artificial Sequence
  derived and/or modified sequence
atgggcgatatgaccaacagcgacttctattccaagaaccaacgtaacgagagctcacatgggggggagtttggatgtactatggaggaattaaggtccttaatggaactgcgcggaacagaggctgtcgtcaagattaaggaaacttatggagacacagaggcaatatgtaggagacttaagacttcacccgtagaagggctccccggtactgccccagacctggaaaagagaaaacagatattcggccagaacttcatacctcctaagaagccaaagacgtttctgcagctggtgtgggaagccttacaggacgtcacactgattatactggagatcgctgctattatcagcctgggcctcagcttctatcacccccccggagagggcaacgaaggatgcgctactgcccagggaggagctgaggacgaaggggaagcagaggctgggtggattgagggagccgccatattactctctgttatctgcgtcgtgctggttacagcctttaatgattggtctaaagagaagcagtttagagggctgcagtcgaggattgaacaggagcaaaaattcactgtggtgcgcgcagggcaagtggtacaaattcctgtggcagaaattgtggtcggcgatatagcccaggttaaatatggagacctgcttcccgctgatggcctgttcattcagggaaacgacttgaagattgatgagagctcactgactggagaaagcgatcaggtccggaaaagtgtggacaaagatcccatgttgttgagtggaacccatgttatggagggcagcggaaggatgctggtcacagccgtcggcgttaattcacaaaccgggattatcttcaccctgctgggagccggcggggaggaggaagaaaagaaagataaaaaaggtgtgaagaaaggggacggactacaactgccagctgccgacggggctgccgcatctaacgccgccgattccgctaatgcttccctggtgaacgccaagcagcaggacggggcggccgccatggaaatgcaaccactgaaatccgctgagggcggggacgccgatgatcgcaaaaaggcgtcaatgcataagaaggaaaagtctgtcctgcagggcaaactaacaaaattggcggtacagattggcaaagctggtctggttatgtcagcaattaccgtgattatcttggttttgtatttcacagtggacactttcgtggtgaacaaaaaaccctggcttccagaatgcaccccagtctacgtccaatattttgtaaagttcttcattatcggagtgacagtgctggtggtggcggtgcccgaaggactccctctggcagtcactatcagcctcgcctactccgtcaagaaaatgatgaaggataacaacttagtgcgacacctcgatgcatgtgagacaatgggcaacgccacggctatctgtagtgataagaccggaactctgactacaaacaggatgaccgtggttcaggcctatgtaggtgacgtgcactacaaggagattccagatccgtcatctataaacaccaagactatggaattgctcattaacgccatagctattaacagtgcctacaccacaaagatcttgcctcccgagaaagaaggagcattgccacggcaggttggaaataaaaccgagtgcggcttactggggttcgtgctggatttgaaacaggattacgagcctgtgaggtcgcagatgcccgaagagaagctttataaggtctacaccttcaacagtgtccggaagtcgatgtccactgtcataaagctacctgacgagtccttcaggatgtactccaagggggcttctgaaatagtgctgaaaaagtgctgtaaaattcttaatggggcgggagagccccgggtcttccgtccccgcgatcgggatgagatggtaaagaaagtaatagaaccaatggcttgcgatgggctgcgaactatttgtgtggcgtacagggattttccgtcgtcgccagaacctgactgggacaacgagaatgacatcctaaatgaactgacatgtatctgcgtggtaggaattgaagatcccgtgaggcctgaggtcccagaggctattcgaaagtgccaaagggccggaattaccgtccggatggtaacaggagacaatattaataccgcccgagctatcgcgataaagtgtgggattatacatccaggagaggattttctgtgtctcgaggggaaggaattcaacagacgtattcggaatgaaaagggggagatcgaacaggaacgtatcgataagatttggcctaaattgcgggttttggcccgatccagccctacagacaagcacacactagtgaaaggcatcattgactcgacgcatacagagcagcggcaggtcgtggccgtgaccggcgacgggacaaatgacggccccgccctgaaaaaagccgacgtaggttttgcaatgggcattgctggcactgatgtcgcaaaagaggcctccgatatcatcctgactgatgataatttcagctctatcgtcaaggctgtcatgtggggcagaaatgtctacgattcaataagcaaattcctgcagtttcaactgacggtgaacgtggttgctgttatcgtggctttcaccggggcttgcataacgcaggactcccccctgaaagccgtgcagatgctttgggtgaacctgataatggacactttcgcttctctggcattagccaccgagcctcctacagaaaccctgctcctgcggaagccatatggtaggaataagcccctgatttccaggacaatgatgaagaatatcctcggacacgccgtgtaccagctggcactcatattcactctgctttttgtgggggagaagatgttccaaatagatagcgggcgaaacgctccgctgcactcgccaccaagcgagcactatactatcatattcaacacttttgtcatgatgcagctgtttaatgaaatcaacgccaggaagattcacggcgagcgtaacgtgttcgacggtatattccgcaaccctatcttttgcactattgtcctggggacctttgcaatccagattgtcatcgtgcagtttgggggcaaaccgttttcttgcagccctctgcagctggatcagtggatgtggtgtatcttcattggactgggcgagcttgtttggggacaggtgatcgctaccatccctaccagtcgtctaaagttcttaaaagaggccggacgactcacccagaaagaagaaatccccgaagaagaacttaacgaggatgtggaggaaattgaccatgcagaaagggagctgagacgcggccagatactgtggttcagggggctcaacaggattcaaactcagattagggtcgtgaaggcctttagatcgtcgttgtacgaagggttggaaaagccggagtcacgcacttctattcacaatttcatggcccatcccgagtttcgaattgaagattctcagccacacatccccctaatcgacgataccgacctggaggaggacgccgctttaaaacagaacagttcgccaccgagtagcctgaacaagaataacagtgccatagattcgggcattaacctcactaccgatactagtaaatccgccacctccagctccccaggaagtcctatccatagtctagagactagcttgtag

SEQ ID NO: 18198 - DNA, 3732 bp, Artificial Sequence
  derived and/or modified sequence
atgggcgatatgacgaacagcgatttttacagcaaaaaccaacgaaatgagtcttctcatggaggggaattcggctgcactatggaggaactccggtcactgatggaactgcgcgggaccgaagcagttgtgaagatcaaagagacctatggtgatacagaagccatttgtagaagattaaaaacctccccggtggaaggattacccggcaccgcccctgacttggagaagcgcaaacaaatatttggccaaaacttcatcccaccaaagaaaccaaaaactttcctgcagctcgtgtgggaggctctgcaggatgttaccctgattatcctggaaatagctgccatcatcagtttaggactatcgttttatcatccccctggagagggcaatgagggatgcgccactgctcaaggcggagccgaggatgagggcgaagccgaggccgggtggatcgagggagcagccattcttctttccgttatttgtgtggtactcgtcacggccttcaacgactggtctaaggagaagcagtttagggggctgcaatctaggatcgaacaggagcagaagtttacagtggttcgggcaggacaggttgtccaaatccccgttgccgagattgtggtcggtgacatcgcccaagtgaaatatggcgacctgctgcctgctgacggtctattcatccagggcaatgatctcaaaatcgatgagagttctctaactggcgagtccgaccaggtgaggaaatcagtcgataaagaccctatgcttcttagcggaacccacgtcatggagggcagtgggagaatgctcgtcacagctgtgggagttaattcccagaccggtataatattcacattgctcggtgcaggaggggaggaggaggaaaagaaggataaaaagggagtgaagaaaggggatgggttgcagctgcctgcggccgatggggcggccgcatctaacgcagccgatagtgctaacgccagtctggtcaatggaaaaatgcaagatgggaacgtagatgcctcccagagtaaagcaaagcagcaagacggcgcagcggccatggagatgcagcctttgaaatccgccgaaggtggagacgccgatgaccgaaaaaaggcgagcatgcacaagaaagaaaaaagcgtcttgcaggggaagctgacaaagttggccgttcagattgggaaggcgggcctggtgatgtctgccatcaccgtaatcatacttgtcctgtactttactgttgacactttcgtggtgaacaagaaaccatggttgccagaatgcacaccggtatatgtacagtacttcgtgaagttcttcattatcggcgtcacggttttagtcgtggccgtcccggaaggccttccacttgcagtgacgataagtttagcttactctgtcaagaagatgatgaaggataacaatttagtcaggcacctggatgcatgcgaaacaatggggaatgctacggcaatctgctcggacaagaccggaacattgactactaaccgtatgacagtggtccaggcttacgtcggcgacgttcactataaggaaatccccgatccctctagcataaacactaaaaccatggaactgttaatcaatgctattgctataaatagcgcctacaccacaaagatcctccccccagagaaggagggcgcattacctaggcaggtgggcaataagacggaatgcggactcctgggcttcgtcctcgacctaaagcaggactacgagcccgtacggtcacagatgcccgaggaaaagctttacaaggtgtacacatttaacagcgtacggaagtctatgtctacagtgattaagctcccggatgagtcctttcggatgtatagcaaaggcgccagcgagatcgttctcaaaaagtgttgtaagatcctcaacggtgccggcgagccaagagtttttaggcctagggaccgggatgagatggtcaagaaagttatcgagcctatggcatgcgatgggctgaggacaatctgcgtcgcatatcgagacttcccatccagccccgagcctgattgggataatgagaacgacattctgaatgagttaacatgtatctgcgtcgttggtatcgaagacccggtacgacctgaagtgcccgaggcaattcgcaaatgccagagagctggcatcactgttcgcatggttacaggagataacattaacactgccagggctatcgccatcaagtgcgggatcatacatcctggggaagacttcttatgtcttgagggcaaggaatttaatcggaggatcaggaacgagaagggcgagatcgaacaggagcgcatcgataagatctggcccaaattgagagtattggctagatcatcacccacggacaagcatacacttgttaagggcatcattgattccacccataccgaacagcgacaggttgtggcagtgaccggcgatggaaccaatgatggccctgctctgaagaaggctgatgtgggctttgccatgggtatcgcggggaccgacgtggccaaggaagcctccgatattatcctaaccgatgacaattttagctcaattgtcaaggctgtcatgtggggacgaaacgtctacgactcaatctcaaagttccttcagtttcagctgacggtgaatgtagtagcagtcatcgtggctttcaccggagcctgtataacccaggacagcccgctgaaagcagttcagatgttatgggtgaatctaataatggatacttttgcaagcctggcgctcgcaaccgagccccccactgaaactttattgctccgtaaaccatatgggcggaataagccactcatctcacgtaccatgatgaaaaatatattaggtcacgccgtttaccaactggctctgattttcactctcctgttcgttggagagaagatgtttcagattgattctggtaggaacgctcccctccattcccccccttccgagcactacaccatcatcttcaacacatttgttatgatgcagctgttcaacgaaatcaacgctagaaagattcacggcgagcggaacgttttcgacggcatcttccgcaacccgatcttctgcaccattgtgttgggtacgtttgccatccaaatcgttatagtccagtttggcggcaagccatttagctgctccccgcttcagctggaccagtggatgtggtgcattttcatcggccttggcgagcttgtatggggtcaagtgatagccaccattcccacgtccaggcttaagttcctgaaggaagctggtcgcttgacccagaaggaagaaatccccgaggaggagctaaacgaagacgtggaggaaatcgaccacgctgaacgcgaactgcgaagaggccaaattctttggttccgcgggctcaataggatccagacgcaaattcgcgtagttaaagccttccgtagctctctgtatgagggcctggaaaaacctgagtcccgaacttctattcataatttcatggcccacccagagttcaggatagaggattcacagcctcatatcccactgatcgacgacactgacctggaagaggatgcagctctgaagcagaatagttccccccctagttcactgaataaaaataatagtgcaatcgattcggggataaacttgacgaccgataccagcaaatctgctacctcctcttcaccagggtctccaatccattcgctggagacaagcctgtag

SEQ ID NO: 18199 - DNA, 3732 bp, Artificial Sequence
  derived and/or modified sequence
atgggcgacatgaccaactctgacttctattcgaagaaccagcggaacgagtcatcccacggcggggagttcggctgcacaatggaggagctgaggtcactgatggaacttcgaggaacagaggcagtagtcaaaattaaggagacatacggcgatacagaggcaatttgccgccgcctgaagacgtcacctgtcgaaggcctgcctggcactgctcccgacctggagaaaagaaaacagatctttggacagaactttattccccctaaaaagcctaagacatttctgcagcttgtgtgggaggctctccaagatgttacactgatcatacttgaaattgctgccattatctccctggggctcagcttttaccaccctcctggcgaaggtaatgaaggctgcgcgaccgcccaggggggggctgaggacgaaggagaagcagaggcaggatggatagagggcgcagcaattcttttgtcagtaatatgtgtggttcttgtgacagcctttaacgactggtccaaggagaaacagttcagaggcctccagagccggatcgagcaggaacaaaagtttactgtcgtccgggcaggccaggtggtccagattcctgtggctgaaatcgtggtcggcgacattgcccaggtgaagtatggagacctcctgccggcagatggattattcattcagggcaacgatctcaaaattgatgagtcgtctctgaccggggagtccgatcaggtgcgcaagtccgtcgataaagaccctatgctgctgtctgggacccacgtgatggagggaagcggtagaatgctggtgaccgctgtgggagtgaatagccagacagggatcatctttactctcctgggggctggtggtgaagaggaggaaaaaaaagataaaaagggggtgaaaaagggcgatggtctccagctgcccgccgccgatggagccgctgcttcaaacgcggccgactccgccaacgcgagcctcgtgaatgggaagatgcaggatggtaacgtcgatgccagccagagcaaagccaaacagcaagatggtgccgctgctatggaaatgcagccactaaagagcgccgaggggggggatgccgatgatcgcaaaaaggcttctatgcacaagaaagaaaaatccgtgttgcagggcaagctaaccaaactggccgtgcagattggaaaggccggtctcgtcatgagcgcgatcacggttattattctcgttctctattttacggtggatacatttgtggtgaataaaaagccgtggctgcctgagtgtactcccgtgtacgtgcaatactttgtgaaattttttataataggggtgacagtgctagtcgtggccgtccccgaggggcttcctctggccgtgacgatcagccttgcatactctgtgaaaaagatgatgaaggacaataacttggtgagacatctcgatgcttgcgaaaccatgggaaacgccactgccatctgttcagataagaccggcacactcaccaccaatagaatgactgtagtgcaggcctacgttggtgacgtgcactacaaagaaatccccgacccgtcatctatcaacacaaaaaccatggagctgctgattaatgctatcgctatcaattccgcctatacaaccaagatcctgccccctgagaaagagggcgcactccctagacaggtggggaacaaaacagagtgcggattactcggttttgtgctggacttaaaacaggattatgagccggtcaggtcccagatgcccgaggaaaagctgtacaaggtgtacactttcaattccgtccggaagagcatgtcaacagtcatcaagttgccagacgagtcctttcgaatgtattcaaagggggcttccgaaattgtcctgaaaaagtgttgtaaaattctcaacggggccggggagccccgtgtgtttcggccacgggaccgcgatgagatggtcaagaaggtgattgaacctatggcttgcgacgggctgcgtaccatctgcgtcgcatatcgagactttccttctagtcctgagcctgactgggataatgaaaacgatattttgaatgaactcacatgtatatgtgttgtcggcatcgaggatcccgtccggcctgaggtaccagaagccataagaaaatgccagagagctgggatcactgtgaggatggtgactggcgacaatataaacacagctcgcgcgatcgccatcaaatgcggaataattcatcccggtgaagacttcttgtgcctagagggcaaagaattcaaccgaaggattcgcaacgagaagggggagatcgagcaggaacgcatcgacaagatatggcccaagctgagagtgctagctcgcagcagtcctacagacaagcatactcttgtcaaggggattatcgacagcacccatacggagcagagacaggttgtagcagttacaggcgacggcacaaatgacggcccagctctgaagaaggcagatgtcggctttgcgatgggtattgccggcacagacgtagccaaggaagcaagcgatatcatcctcactgacgataatttctccagcatagtgaaggctgtgatgtggggtagaaacgtgtatgatagcatctctaaatttctgcagttccagcttaccgttaatgtcgtagccgtaatcgtggcttttacaggcgcctgtatcacgcaggattcacccctcaaggctgtccagatgctctgggtcaatctcattatggacacctttgcctccctggccctggctaccgaacctccaaccgaaacacttttattacggaagccatacggccggaataagccactgattagccgcacaatgatgaagaacatccttggacacgctgtatatcaattggccctcattttcacattactctttgtgggcgagaagatgtttcagatcgactccggacgaaatgcgcctctgcatagccccccctcggaacactataccatcatctttaatacattcgttatgatgcagttgtttaatgagatcaacgcacgtaagatccacggtgaacgtaacgtttttgacggcatcttcagaaaccctattttttgcactattgtcctagggaccttcgctattcaaattgtcattgtgcagtttggaggaaagccctttagctgttctcccctgcagctggatcagtggatgtggtgtatctttattggcctgggggaattggtttggggccaggtgatagccactattcctacctcacgcttaaagttcttgaaggaagccggtaggcttacccaaaaggaggagatcccggaggaagagctcaatgaagatgtcgaggagatcgaccacgcagagagagagcttaggagagggcaaatactgtggttccgcgggctcaaccgaattcagacgcagatcagagtggttaaagcattcagatcctctctctacgagggcttagagaaacccgaatccaggactagcatccataatttcatggcccatccggaatttcgaatcgaggactcccagcctcacatacccttgattgatgacaccgatcttgaggaagacgctgcactcaaacagaactcaagtccaccctcatccctgaataaaaacaactctgccatcgatagtggcatcaatttaaccaccgacacatccaagagcgcaactagctctagtcccggctctcccatccacagcctagaaaccagcttgtag

SEQ ID NO: 18200 - DNA, 3690 bp, Artificial Sequence
  derived and/or modified sequence
atgggagacatgaccaacagcgacttctacagcaagaaccagagaaatgaaagcagccacggcggggagtttggctgcaccatggaggagctgcggagcctgatggagctgcggggcacagaggccgtggtgaagatcaaggagacctacggggacacagaggccatctgccggcggctgaagaccagccctgtggagggcctgcctggaacagccccagacctggagaagaggaagcagatcttcggccagaacttcatcccccccaagaagcccaagaccttcctgcagctggtgtgggaggccctgcaggatgtgaccctcatcatcctggagattgctgccatcatcagcctgggcctgtccttctaccaccccccaggagagggcaatgaaggctgtgccacagcccagggcggcgcagaagatgaaggagaggccgaggccggctggattgagggcgccgccatcctgctgagcgtcatctgtgtggtgctggtgacagccttcaatgactggagcaaggagaagcagttccggggcctgcagagccgcatcgagcaggagcagaagttcaccgtggtgcgggccggccaggtggtgcagatccctgtggccgagatcgtggtgggggacatcgcccaggtgaagtacggggacctgctgcctgcagatggcctcttcatccagggcaatgacctgaagattgatgagagcagcctgaccggggagagtgaccaggtgaggaagtctgtggacaaggaccccatgctgctgagcggcacccacgtgatggagggcagcggccgcatgctggtgacagctgtgggcgtgaacagccagacaggcatcatcttcaccctgctgggcgccggcggggaggaggaggagaagaaggacaagaagggcgtgaagaagggagatggcctgcagctgcctgctgctgatggagctgctgccagcaatgctgctgacagcgccaatgccagcctggtgaatgccaagcagcaggatggagctgctgccatggagatgcagcccctgaagtctgctgagggcggagatgctgatgacaggaagaaggcctccatgcacaagaaggagaagtctgtgctgcagggcaagctgaccaagctggccgtgcagatcggcaaggccggcctggtgatgtctgccatcaccgtcatcatcctggtgctgtacttcaccgtggacacctttgtggtgaacaagaagccctggctgcctgaatgtacccctgtgtatgtgcagtactttgtgaagttcttcatcatcggcgtgacagtgctggtggtggccgtgcctgagggcctgcccctggccgtgaccatcagcctggcctacagcgtgaagaagatgatgaaggacaacaacctggtgcgccacctggatgcctgtgagaccatgggaaatgccacagccatctgcagcgacaagacaggcaccctgaccaccaacaggatgacagtggtgcaggcctacgtgggagatgtgcactacaaggagatcccagaccccagcagcatcaacaccaagaccatggagctgctgatcaatgccatcgccatcaacagcgcctacaccaccaagatcctgcccccagagaaggagggcgccctgccccggcaggtgggcaacaagacagaatgtggcctgctgggctttgtgctggacctgaagcaggactatgagcctgtgcgcagccagatgcctgaggagaagctgtacaaggtgtacaccttcaacagcgtgaggaagtccatgagcaccgtcatcaagctgcctgatgagagcttcaggatgtacagcaaaggagccagcgagatcgtgctgaagaagtgctgcaagatcctgaatggagctggggagcccagggtcttccggccccgggacagagatgagatggtgaagaaggtgattgagcccatggcctgtgatggcctgcggaccatctgtgtggcctacagagacttccccagcagccctgagccagactgggacaatgaaaatgacatcctgaatgagctgacctgcatctgtgtggtgggcatcgaggaccctgtgcggcctgaggtgcctgaggccatcaggaagtgccagagagctggcatcaccgtgaggatggtgactggagacaacatcaacacagcccgggccatcgccatcaagtgtggcatcatccaccctggagaggacttcctgtgcctggagggcaaggagttcaacagacgcatcagaaatgagaagggggagattgagcaggagagaattgacaagatctggcccaagctgcgggtgctggcccggagcagccccacagacaagcacaccctggtgaagggcatcatcgacagcacccacacagagcagaggcaggtggtggccgtgactggagatggcaccaatgatggccctgccctgaagaaggcagatgtgggctttgccatgggcattgctggaacagatgtggccaaggaggccagtgacatcatcctgacagatgacaacttcagcagcatcgtgaaggctgtgatgtggggcagaaatgtgtatgacagcatcagcaagttcctgcagttccagctgactgtgaatgtggtggccgtgattgtggccttcaccggggcctgcatcacccaggacagccccctgaaggctgtgcagatgctgtgggtgaacctgatcatggacacctttgccagcctggccctggccacagagcccccaacagagaccctgctgctgaggaagccctacggcaggaacaagcccctcatcagcaggaccatgatgaagaacatcctgggccatgctgtgtaccagctggccctgatcttcaccctgctgtttgtgggggagaagatgttccagattgattctggaagaaatgcccccctgcacagcccccccagcgagcactacaccatcatcttcaacacctttgtgatgatgcagctgttcaatgagatcaatgccaggaagatccatggagagagaaatgtgtttgatggcatcttcaggaaccccatcttctgcaccatcgtgctgggcacctttgccatccagatcgtcatcgtgcagtttggaggcaagcccttcagctgcagccccctgcagctggaccagtggatgtggtgcatcttcatcggcctgggggagctggtgtggggccaggtgattgccaccatccccaccagccggctgaagttcctgaaggaggccggccgcctgacccagaaggaggagatccctgaggaggagctgaatgaagatgtggaggagattgaccatgctgagcgggagctgcggcggggccagatcctgtggttccggggcctgaaccgcatccagacccagatccgggtggtgaaggccttccgcagcagcctgtatgagggcctggagaagccagagagcaggaccagcatccacaacttcatggcccaccctgagttcagaattgaggacagccagccccacatccccctgattgatgacacagacctggaggaggatgctgccctgaagcagaacagcagcccccccagcagcctgaacaagaacaacagcgccattgattctggcatcaacctgaccacagacaccagcaagagcgccaccagcagcagccctggcagccccatccacagcctggagaccagcctgtag

SEQ ID NO: 18201 - DNA, 3732 bp, Artificial Sequence
  derived and/or modified sequence
atgggagacatgaccaacagcgacttctacagcaagaaccagagaaatgaaagcagccacggcggggagtttggctgcaccatggaggagctgcggagcctgatggagctgcggggcacagaggccgtggtgaagatcaaggagacctacggggacacagaggccatctgccggcggctgaagaccagccctgtggagggcctgcctggaacagccccagacctggagaagaggaagcagatcttcggccagaacttcatcccccccaagaagcccaagaccttcctgcagctggtgtgggaggccctgcaggatgtgaccctcatcatcctggagattgctgccatcatcagcctgggcctgtccttctaccaccccccaggagagggcaatgaaggctgtgccacagcccagggcggcgcagaagatgaaggagaggccgaggccggctggattgagggcgccgccatcctgctgagcgtcatctgtgtggtgctggtgacagccttcaatgactggagcaaggagaagcagttccggggcctgcagagccgcatcgagcaggagcagaagttcaccgtggtgcgggccggccaggtggtgcagatccctgtggccgagatcgtggtgggggacatcgcccaggtgaagtacggggacctgctgcctgcagatggcctcttcatccagggcaatgacctgaagattgatgagagcagcctgaccggggagagtgaccaggtgaggaagtctgtggacaaggaccccatgctgctgagcggcacccacgtgatggagggcagcggccgcatgctggtgacagctgtgggcgtgaacagccagacaggcatcatcttcaccctgctgggcgccggcggggaggaggaggagaagaaggacaagaagggcgtgaagaagggagatggcctgcagctgcctgctgctgatggagctgctgccagcaatgctgctgacagcgccaatgccagcctggtgaatggcaagatgcaggatggaaatgtggatgccagccagagcaaggccaagcagcaggatggagctgctgccatggagatgcagcccctgaagtctgctgagggcggagatgctgatgacaggaagaaggcctccatgcacaagaaggagaagtctgtgctgcagggcaagctgaccaagctggccgtgcagatcggcaaggccggcctggtgatgtctgccatcaccgtcatcatcctggtgctgtacttcaccgtggacacctttgtggtgaacaagaagccctggctgcctgaatgtacccctgtgtatgtgcagtactttgtgaagttcttcatcatcggcgtgacagtgctggtggtggccgtgcctgagggcctgcccctggccgtgaccatcagcctggcctacagcgtgaagaagatgatgaaggacaacaacctggtgcgccacctggatgcctgtgagaccatgggaaatgccacagccatctgcagcgacaagacaggcaccctgaccaccaacaggatgacagtggtgcaggcctacgtgggagatgtgcactacaaggagatcccagaccccagcagcatcaacaccaagaccatggagctgctgatcaatgccatcgccatcaacagcgcctacaccaccaagatcctgcccccagagaaggagggcgccctgccccggcaggtgggcaacaagacagaatgtggcctgctgggctttgtgctggacctgaagcaggactatgagcctgtgcgcagccagatgcctgaggagaagctgtacaaggtgtacaccttcaacagcgtgaggaagtccatgagcaccgtcatcaagctgcctgatgagagcttcaggatgtacagcaaaggagccagcgagatcgtgctgaagaagtgctgcaagatcctgaatggagctggggagcccagggtcttccggccccgggacagagatgagatggtgaagaaggtgattgagcccatggcctgtgatggcctgcggaccatctgtgtggcctacagagacttccccagcagccctgagccagactgggacaatgaaaatgacatcctgaatgagctgacctgcatctgtgtggtgggcatcgaggaccctgtgcggcctgaggtgcctgaggccatcaggaagtgccagagagctggcatcaccgtgaggatggtgactggagacaacatcaacacagcccgggccatcgccatcaagtgtggcatcatccaccctggagaggacttcctgtgcctggagggcaaggagttcaacagacgcatcagaaatgagaagggggagattgagcaggagagaattgacaagatctggcccaagctgcgggtgctggcccggagcagccccacagacaagcacaccctggtgaagggcatcatcgacagcacccacacagagcagaggcaggtggtggccgtgactggagatggcaccaatgatggccctgccctgaagaaggcagatgtgggctttgccatgggcattgctggaacagatgtggccaaggaggccagtgacatcatcctgacagatgacaacttcagcagcatcgtgaaggctgtgatgtggggcagaaatgtgtatgacagcatcagcaagttcctgcagttccagctgactgtgaatgtggtggccgtgattgtggccttcaccggggcctgcatcacccaggacagccccctgaaggctgtgcagatgctgtgggtgaacctgatcatggacacctttgccagcctggccctggccacagagcccccaacagagaccctgctgctgaggaagccctacggcaggaacaagcccctcatcagcaggaccatgatgaagaacatcctgggccatgctgtgtaccagctggccctgatcttcaccctgctgtttgtgggggagaagatgttccagattgattctggaagaaatgcccccctgcacagcccccccagcgagcactacaccatcatcttcaacacctttgtgatgatgcagctgttcaatgagatcaatgccaggaagatccatggagagagaaatgtgtttgatggcatcttcaggaaccccatcttctgcaccatcgtgctgggcacctttgccatccagatcgtcatcgtgcagtttggaggcaagcccttcagctgcagccccctgcagctggaccagtggatgtggtgcatcttcatcggcctgggggagctggtgtggggccaggtgattgccaccatccccaccagccggctgaagttcctgaaggaggccggccgcctgacccagaaggaggagatccctgaggaggagctgaatgaagatgtggaggagattgaccatgctgagcgggagctgcggcggggccagatcctgtggttccggggcctgaaccgcatccagacccagatccgggtggtgaaggccttccgcagcagcctgtatgagggcctggagaagccagagagcaggaccagcatccacaacttcatggcccaccctgagttcagaattgaggacagccagccccacatccccctgattgatgacacagacctggaggaggatgctgccctgaagcagaacagcagcccccccagcagcctgaacaagaacaacagcgccattgattctggcatcaacctgaccacagacaccagcaagagcgccaccagcagcagccctggcagccccatccacagcctggagaccagcctgtag

SEQ ID NO: 18202 - DNA, 3690 bp, Artificial Sequence
  derived and/or modified sequence
atgggcgacatgaccaacagcgacttctacagcaagaaccagcggaatgaaagtagccatggtggtgagttcggctgcactatggaagagctgcgcagcctgatggagttgcgaggaacggaagcggtagtgaagattaaggaaacatacggggacaccgaggccatctgccgcaggctgaagacctcccctgtggaggggctgcccggaacagcccccgacctggagaaaaggaagcagatctttgggcagaatttcataccacccaaaaagccaaagacctttttacagctggtgtgggaagcattacaagacgtgacgctcatcatcctggagatcgcagccatcatctcccttggtttgtctttctatcacccccccggcgaagggaacgagggctgtgctacggcccaaggtggcgcagaagacgagggggaggcagaagcaggatggatcgagggagccgccattctactgtccgtgatctgtgtggtgctggtgaccgcgttcaatgactggtctaaagagaagcaattcaggggtctgcagtccagaattgaacaggagcaaaagtttacggtggttagggctgggcaagtcgtgcagataccagtagcagaaattgtcgttggagacatagctcaagtgaagtacggcgatctcttaccggcagacggactgttcatacagggcaatgatttgaaaattgacgaaagctccctgactggcgaatcagaccaggtgcgaaaatcagtcgacaaggatccaatgttgctttccggcacgcatgttatggaagggtcaggaagaatgcttgtcactgcagtgggtgtgaactcccaaacaggcatcatttttacactgcttggcgcgggtggcgaggaggaggagaaaaaggataaaaagggtgtgaagaaaggcgatggccttcagcttcctgcagctgatggtgcggctgcgagtaacgccgcagactccgcgaacgccagcctcgttaacgcaaaacagcaagatggtgccgccgctatggagatgcaaccattaaaatccgcggaggggggggatgccgatgacaggaagaaagcatccatgcataaaaaggagaagagcgtgttacagggcaagctgaccaagctcgctgtccagatcgggaaggccggccttgtcatgagcgccattacggtcattatcttagtactatacttcaccgtcgacacgtttgtagtcaacaaaaagccatggctcccagagtgcaccccagtatatgtgcagtatttcgtgaaattctttatcattggggtaacggtgctggtggtggctgtgccagaaggcctgccactggcagtcactatctcattggcctactccgttaaaaaaatgatgaaagacaacaatctggtcaggcaccttgatgcatgcgagacaatgggaaatgcaactgccatatgttctgacaagacggggaccttaactactaacagaatgaccgtcgtgcaggcatacgtgggtgatgtgcattacaaggaaatccccgacccttctagcataaacacaaagactatggagctgctcatcaatgccatagccattaactccgcgtacactacaaaaattctgccccctgaaaaggaaggagctttgccacgccaggtgggaaataagaccgaatgtgggttgttgggatttgtcctggatctgaagcaggactatgagcccgtccgaagtcaaatgccagaggagaagctgtataaagtgtatacattcaattccgtcaggaagagtatgagcaccgtgatcaaacttcctgacgaatcgttccgcatgtattctaaaggggcatccgagatcgtgctgaaaaagtgttgtaagatcctgaacggggccggggaacctagggtttttagacccagggacagggacgagatggtcaagaaagtcattgagccaatggcctgcgatgggctgcgcacaatttgtgtggcctacagagattttccttctagccctgaaccggactgggataacgagaatgacattctcaacgagctcacgtgcatctgcgtagtgggaattgaggaccctgttaggccagaagtacccgaagccatacgcaaatgccagagggctgggatcacagtaagaatggtaaccggcgacaatattaataccgcccgggctattgctattaaatgcgggataatccatcccggggaggactttctgtgtctggagggcaaagaattcaacagacgtatccgtaacgagaaaggcgaaatcgagcaggaaaggatcgacaagatttggcctaaactcagagtcctggcaaggtcttctcccacagataaacatacattagtaaagggcataatagattcaactcatacagagcagcgccaggtggtagccgtgaccggcgatggcaccaatgatggtcctgcactcaaaaaggccgacgtaggatttgctatgggcatcgccggaacggacgtggccaaggaagcctctgacattatccttaccgacgacaatttctctagcatcgtcaaggccgtgatgtgggggaggaacgtgtatgattccatctcgaaattcctccagtttcaattaaccgtgaacgttgtggcagtgatcgtggctttcaccggggcatgcataacccaagactctccactcaaagcggtgcaaatgctctgggttaatcttattatggataccttcgcgtctctcgcactcgctactgaaccaccaaccgagacactgctcctgcggaagccttacggtagaaataagccactgatcagtcgtaccatgatgaaaaatatcctgggccatgcagtctaccagctcgctctcatattcacactcctgttcgttggcgaaaaaatgttccagatcgactctggtcggaatgccccccttcactcacctccgtcggaacattacacaataatcttcaacacatttgtcatgatgcaactgtttaacgaaattaatgctcgaaaaatacatggggaacggaatgtgttcgatgggatattccgcaatcctatcttctgtactatagtgttgggtactttcgctattcagatcgtcatagtccagtttgggggtaaacccttttcttgcagtcctttacagctagatcagtggatgtggtgcatcttcatcggcctcggggaacttgtgtgggggcaagtcatcgcaactatccctacgagccggttgaaatttttgaaggaggccggacgcctcactcagaaagaggagataccagaggaagaacttaatgaggatgtggaggaaatcgatcatgcggagagggagctccgcagaggacaaattctctggttccgcggcctcaatcgtattcagacgcagatacgagtggtgaaagcctttagatccagtttgtacgaaggcctagagaagccagagtcccggaccagcattcacaacttcatggcacaccccgaatttcgcatcgaggactcgcagccacacatcccactgatcgacgacacggatctggaggaggacgctgccctgaagcaaaactctagccccccgtcttccttgaacaaaaacaactctgctatagacagcggtatcaatctgaccactgacaccagcaaaagcgctacatcttcctcacccggatctcctatccacagtcttgagacttcactgtag

SEQ ID NO: 18203 - DNA, 3732 bp, Artificial Sequence
  derived and/or modified sequence
atgggcgacatgaccaacagcgacttctacagcaagaaccagcggaatgagtccagccacgggggcgagtttggatgcacaatggaggagttgcggagtcttatggagctgcggggtaccgaggccgtcgtgaaaatcaaggaaacctatggcgatacggaggctatatgccggagactgaaaaccagccccgtggaagggctccccggcaccgcacctgacttggaaaagcgaaaacagatcttcgggcagaattttattccacccaaaaaaccaaagactttcctgcagctcgtgtgggaggccctgcaagatgtgacactgatcattttggagattgctgctatcatctcactggggctgtctttttatcacccccctggcgagggaaatgaggggtgcgcaaccgcccaagggggagctgaggatgaaggtgaagcagaggctggatggatcgagggcgctgctatacttctcagtgtgatttgcgtggtgctcgtgacagcatttaacgactggagcaaagagaaacagtttaggggcctgcagagccggatagaacaggagcagaaattcactgttgtgagagctggacaagtggtacagatccctgtggcagagatagttgttggcgacatcgctcaagtgaagtatggggatctgttgccagcagatggcctgttcatccagggtaatgatcttaaaatcgacgaaagctcattgactggcgaatccgatcaggtcagaaagagcgtcgataaggatccgatgctactgtcaggaacacacgtcatggagggatccggccggatgttagtcaccgccgtaggagtgaacagccagaccggcatcatctttactctcctgggtgcgggcggggaggaggaggagaaaaaagacaaaaaaggggtcaagaaaggcgatggcctgcagctgcctgcagcggacggagccgcggcatctaatgcggctgacagcgctaacgcctctctcgtgaacggcaaaatgcaagacggcaatgtggacgcctctcagagcaaagcgaagcagcaagatggagcggccgccatggaaatgcaacctttgaagtctgcagaaggtggtgacgcggatgaccgcaaaaaggcgtcaatgcataagaaagagaaatcagtgctccagggcaagctcaccaaactggccgtccagatcggaaaagccggcttggtaatgtcggccattaccgttatcatcctggtcctgtattttacagtggacacatttgttgtgaacaagaagccgtggctgcccgagtgcacgcctgtttacgttcagtactttgtgaagttttttatcattggtgtaaccgtcctggtagtggccgttccagaaggacttccgctggccgtcacaatcagcctggcctactcagtgaagaagatgatgaaggacaacaatcttgtgcgccacctggatgcttgtgaaaccatgggaaacgccaccgccatctgctcagacaagactgggacgctcaccaccaaccggatgaccgtcgtccaggcatatgtgggggatgttcattacaaagaaattccggacccaagcagcattaataccaaaacaatggaacttcttattaatgcaatagcaatcaattcggcttacacaacaaagattttgccacctgaaaaagagggcgccctgccacgacaggttgggaataaaacggagtgtggcctgctggggtttgtactcgacctcaagcaggattatgagcccgtcagaagccagatgcctgaagaaaagctctataaagtgtacacctttaatagtgtccggaaatcgatgtcaacagtgataaagctgcctgacgagtcctttcgcatgtatagcaagggcgcctctgaaatcgtcctcaaaaagtgttgtaaaatcctgaatggcgcgggcgagccacgggtgttcagaccaagggacagggatgagatggtgaaaaaggtgattgaacccatggcttgtgatggcctgcggaccatatgcgttgcttacagggatttcccatcttcaccagaacctgattgggataacgagaatgacatcctcaatgaattgacctgcatttgtgttgttggaattgaagatcccgtaagacccgaagtgcccgaggccattaggaagtgtcagcgagctggtatcacggttaggatggtgaccggcgacaatatcaatacggcccgcgctatagccataaagtgcggcataattcaccctggcgaggattttctctgtctggaaggaaaagaatttaaccgtaggatcaggaacgaaaagggggaaatcgaacaagagcgtatcgacaaaatctggccaaaactgcgggtcctagcgcgcagttcgcccaccgataaacacaccttagtgaagggcatcattgatagcacccataccgagcagagacaggtcgtcgccgttacgggagatggtacaaatgacgggcctgcgttaaagaaggccgatgtaggttttgcaatggggattgcgggcaccgatgtcgccaaagaggcttccgatatcattctcacagacgacaactttagttcaatagttaaggcagtgatgtggggaaggaatgtttacgacagtatctctaaattcctgcagttccagttgacagttaatgtggtagccgtgatagtggctttcacaggtgcctgtatcacccaggattccccactcaaggcagtgcaaatgctctgggtgaatttgattatggataccttcgcctctctggccctggcaaccgagccacctaccgaaacactgctgttgcgcaagccctacggccgtaataagcccctgatctcacggaccatgatgaaaaacattctgggacacgcagtgtatcagcttgctttgatcttcacgctgttgttcgttggcgaaaaaatgtttcagatcgactctggccggaacgcccccctgcacagcccgccttccgaacactatactataatttttaataccttcgtgatgatgcagctgtttaatgaaatcaacgccaggaaaattcatggcgagcgtaatgttttcgatgggatttttagaaatcccatcttctgcactatagtcctggggacgttcgccattcagatcgtaatcgtgcaattcgggggtaaaccattttcttgttctccattgcagctggaccagtggatgtggtgtatctttatcgggcttggagagttagtgtggggccaagtaattgctaccatccctacttctagactaaagtttctcaaggaagccggcagattaacccagaaggaggagattcccgaggaggagctcaatgaggatgtggaagagatagatcacgcagaacgcgagctacgccgggggcagattctgtggtttcgcggactgaatagaatccaaacccaaatacgggtggtcaaggctttccggtcaagcctatatgaaggactggagaagccggaatcccggacctctatccataactttatggcacatccagagtttagaatagaagatagtcagccacatattccgctcatcgatgacactgacctggaggaggacgccgctttgaagcaaaattctagtccgccaagttccctgaacaagaataacagcgcaatcgactcagggataaatttgacaactgacacttctaagtctgcaacatcgtcctctccaggatccccaatccactctttagaaaccagcttatag

SEQ ID NO: 18204 - DNA, 3732 bp, Artificial Sequence
  derived and/or modified sequence
atgggcgacatgaccaacagcgacttctacagcaagaaccagcggaatgagagttcccacggcggcgaatttggctgcactatggaggaactgcggtctctgatggagctgcgagggaccgaggccgtggtgaagattaaagagacttacggcgacactgaagccatatgtaggcgtctgaagacctctccggtggaagggctccccgggaccgcacccgatctggagaagcggaaacagatttttggccagaactttattcctccaaaaaagccaaaaacattcctccagctggtgtgggaagcgctccaggacgtgacactgatcatcctcgagatcgctgccataatctctctggggctgtccttttaccaccccccaggagagggaaacgagggatgcgccaccgcgcaagggggagctgaggacgagggagaggcagaagcggggtggatcgagggagccgcaatcttactatcggtgatctgtgttgtcctggtaacagcatttaacgattggagcaaagagaaacaattccgtggattgcagagccgcatcgaacaagagcagaagttcacagttgtccgggcaggccaggtagttcagattccggttgccgagatagtggtgggagacattgcacaggttaagtacggagacctactgcccgccgacgggctctttattcagggaaatgatctgaaaattgacgagtcctcgctcactggagaaagtgaccaggtcagaaagagcgtcgacaaggacccaatgttactcagcggcacacatgtgatggagggctccggtagaatgctggttacagcagtgggggtgaacagccaaaccggtattatttttactttgctaggggccggaggcgaagaggaggagaagaaggacaaaaagggcgtgaaaaagggtgatggcctgcaattacctgcggccgacggagcagcagctagcaacgcagcagactctgccaacgcttcccttgtgaatggcaagatgcaggacggaaacgttgatgcctcccagagtaaagccaagcagcaggacggcgccgccgccatggaaatgcagccactaaagagtgccgagggcggcgatgctgacgatcggaagaaggccagtatgcacaagaaagaaaagagcgtcttacaaggtaagctcacgaagctagccgtgcagattggcaaagcagggcttgtgatgagtgcgattaccgtgatcatccttgtgttgtattttaccgtcgatacatttgtagtaaataaaaagccttggctgcccgagtgcacccctgtttacgtgcaatattttgtaaagtttttcatcattggagtgaccgtcttggtcgttgccgtgcctgagggtttgccgttggctgttacgatcagccttgcatatagtgtcaagaaaatgatgaaagataacaacctcgtgcggcatctggacgcatgcgagactatgggaaacgctacggcgatctgttcagacaagacagggaccttgactaccaatagaatgacagtcgtacaggcctatgtgggagacgtgcattataaagaaatacccgacccttcctccatcaacaccaagacgatggagttattgattaacgctatagccatcaacagtgcctacaccaccaagatattgcctccggaaaaggaaggcgccctaccccggcaagtgggcaataagacagagtgcggacttctcgggttcgtcctggatcttaagcaggactacgaaccagtgagatctcagatgcccgaggagaaactctataaagtgtacacttttaacagcgtgagaaagagcatgtcaaccgtgatcaaattacccgatgaatcattcagaatgtatagcaagggggcttcagagatcgtcctcaaaaagtgttgtaagatattaaatggagctggagagccgcgggttttccggccacgggacagggacgagatggtgaagaaagtaattgagcctatggcatgtgacggcctgcggaccatttgcgttgcatatcgagacttccccagcagccccgagcctgattgggacaatgaaaacgacatactgaatgagctcacatgtatctgtgtggtggggatagaggaccccgtgaggcccgaagttccagaagccattagaaaatgtcagagagccggtataaccgtgagaatggtgactggagacaacatcaacacagcgcgggcaatcgccataaagtgtggcatcattcatccaggggaagattttctttgcctggaaggaaaggagttcaacaggaggatacgcaacgagaagggggaaatcgaacaggagcgaatcgataaaatctggccaaaactcagagtgctggctaggtcatcccctacagataaacatacactcgtcaagggcataattgatagtacccatacagagcagagacaagtggtggccgtaaccggagatggcacaaatgacgggccggccctcaagaaagcggatgtggggtttgctatgggaatcgcaggaacagatgtcgctaaggaggcctccgatattattctgactgacgacaatttctcatccatcgttaaggccgtgatgtggggacggaatgtctatgattctatctctaaatttttgcagttccagctaacagtaaatgtggtggcagtaattgtggccttcacaggggcatgcatcacacaggactctccactgaaagctgtacagatgttatgggttaatctcatcatggacacttttgcaagcttagccttagctactgaaccacccacagagaccttgctcctgcgcaagccatacggtcgaaacaagcccctgatttcccgcactatgatgaaaaatattcttggtcatgctgtgtaccagttggcgttgatattcaccctattgtttgtgggcgaaaaaatgtttcagatcgatagtgggagaaatgcgccactgcactcgccgcccagcgaacattatactatcattttcaacaccttcgtaatgatgcagctgttcaatgagattaacgcaagaaagattcatggtgagcggaatgtcttcgatggcatctttaggaatccaatcttttgtacaattgtccttgggacatttgctattcagattgttattgtacagtttggcggtaaacccttctcctgttccccactccagcttgatcagtggatgtggtgtatcttcattgggttgggtgaactggtgtgggggcaggttatcgcaactattcccactagtaggcttaagtttctgaaggaagcaggtcgactgacccagaaagaagaaattccagaagaggaactgaacgaagacgtggaggaaatcgaccatgcagaacgggagttgcggcgtggtcaaattctgtggttccggggcctgaacagaattcagacacagatcagggtagtgaaggcattccggtcttcattatatgagggccttgaaaaaccagagtctagaacttctattcacaacttcatggctcatcctgagttcaggattgaagattcccaaccacatatacctctgatcgacgatacggacctggaggaagatgccgccctgaaacagaacagctctccgccatcatccttgaacaaaaataattctgctattgattcggggataaatctgactacagatacatcgaaatccgctacctccagctctcccggtagtcctattcactcgctggagacatctttatag

SEQ ID NO: 18205 - DNA, 3690 bp, Artificial Sequence
  derived and/or modified sequence
atgggggacatgactaactcagatttttattcaaagaaccagcgcaatgaaagttcccacgggggagagtttggttgtacgatggaggaactccggagcttaatggagctgcggggtactgaagctgtcgtcaagataaaggagacatacggcgataccgaggctatttgtagaaggctgaaaactagcccagtggagggactgccagggaccgcccctgatctggagaagagaaagcagatatttgggcaaaactttataccaccaaagaaaccaaagacctttctgcagttggtgtgggaagctctgcaagatgttactctgataattctagaaatcgctgccattattagcctgggtctgagtttttaccatccccctggagagggcaacgaaggctgtgctacagcgcagggaggcgctgaggatgagggagaagctgaagccggttggattgagggagccgctattcttttgagcgttatttgcgtggtcctggtgactgcctttaatgattggtcaaaagaaaagcagttcagggggctgcagagccggattgagcaagagcagaaatttacggtagtgcgagccggacaagtcgttcagattccggtggctgaaattgtggtgggagacattgcccaagtgaaatacggggacctactgcctgcggacggtttgttcatccaggggaatgacttaaaaattgacgaatcaagcctgacaggggagtccgatcaggtgcgaaaatcagtcgacaaggatccaatgcttctgagcggaacgcatgtcatggagggttccggccgaatgttagtgacggctgtgggcgtgaactcccaaaccggaatcatcttcactctgctgggggcagggggagaggaagaggagaagaaggataaaaagggcgtgaaaaagggagatggactgcagttgccggctgccgatggcgctgcagctagcaacgccgcagacagtgcaaatgcctcattggtcaatgccaaacagcaagatggggctgctgccatggaaatgcagcctctgaaaagcgccgagggaggcgatgctgatgatagaaaaaaagctagtatgcacaagaaagagaagtctgtccttcaaggaaaactgacgaaattagccgtccagattgggaaggcaggcctggtcatgtctgcaataactgtgattatcctcgtgctgtacttcacggtagacacatttgtagtgaataagaaaccctggctgccggagtgcacacccgtctatgtgcagtacttcgtgaaattctttataattggtgtaaccgttctggtagtcgccgtgcctgaaggactccctctcgccgtgaccatatctcttgcctatagcgtcaagaaaatgatgaaggataataacctcgtccgccacctggacgcgtgtgaaaccatggggaacgcaacggccatctgttcagacaagactggtaccctcaccacaaaccgaatgacagtggtgcaggcctacgtcggcgatgtgcactacaaggagattcctgatccttcttctataaacaccaaaacgatggaactgctgataaacgctatcgcaatcaatagcgcttacacgacaaaaatcttacctccggagaaggaaggcgctctcccaagacaggtcggaaacaaaaccgaatgcggcctgctgggctttgttctagatctcaaacaggattacgaacccgtgcgatcccagatgcctgaggaaaaactctacaaggtttacacattcaattctgtacgcaagagtatgtctaccgttatcaaattgcctgatgagtcgttcagaatgtactcaaaaggcgctagcgagatcgtcctgaaaaagtgttgcaagattctcaacggcgctggcgaaccccgagtctttaggcctagggatcgtgacgagatggtcaagaaggttatagagccaatggcctgtgatggactgaggacaatctgtgtagcttatcgggattttccgtctagtccagagcctgattgggacaatgaaaacgatatccttaacgaactgacttgtatctgcgtggtggggatagaagaccctgtgaggcctgaagtgcctgaggccatcaggaagtgtcagagggcaggcatcactgtcagaatggtaactggggataacattaacaccgcgagagctatcgctataaagtgcggaattattcatccaggggaagatttcctgtgtctggagggcaaggagttcaatagaagaatccgtaatgagaagggggaaattgaacaagaaaggatcgataagatttggcccaaacttcgggtcctagctaggtccagcccgacagacaaacatacactagtgaagggaatcattgactctacacacacagagcagcgccaggtggtcgccgtgaccggtgatggaacgaacgacggacctgcattaaaaaaagcagacgtgggatttgctatgggtattgctggaacagatgtagcgaaagaagcctcagatataatactgaccgatgacaatttctcatcaatcgtgaaggctgtcatgtggggtcgtaacgtgtatgattccataagtaaatttcttcaattccaattgacagtgaacgttgtggccgtgattgtagcttttacgggcgcttgtattacccaagatagtccattaaaggccgtgcagatgctgtgggtgaaccttatcatggatactttcgcatccctggccctggcgaccgaacctccaaccgagaccctgctgctccggaagccttacgggagaaacaaaccattaatctcaaggaccatgatgaagaacattcttgggcacgctgtttatcagctggctctgattttcaccctgctctttgtcggagaaaaaatgttccagatcgattctggacgaaacgcaccactgcattcccctccgtctgagcactacactataattttcaacacattcgtgatgatgcagctgtttaacgagattaacgccagaaagatccatggggagaggaacgtgttcgatgggattttccgcaaccctatattctgcacgattgttctgggcacctttgccatccagatcgttatcgtgcagtttggtggcaaacctttcagttgctcaccactgcagttggaccaatggatgtggtgcatttttataggactgggggagttagtgtggggacaagtgatagctaccattccaacgtcacgtctcaagttccttaaagaagcgggaagactgacgcagaaggaagagattcccgaagaagagttgaatgaggatgtcgaagaaatcgatcatgccgagagagagctgcgcagaggccagatcctgtggttcaggggcctgaatcggatccagactcaaataagagtagtgaaggcatttcgctctagtttgtacgaaggcttggagaaacccgagagccggacctcaattcacaactttatggcccacccagaatttcgcatagaggactcccagccacacataccattaattgatgatacggacctggaggaggacgccgcactgaagcagaacagcagtccgccatcctcattaaataaaaataactcagcgattgattcaggcatcaacctgaccaccgacacttctaaatccgctactagctccagtcccggtagcccgatacactccttagaaacttcactgtag

SEQ ID NO: 18206 - DNA, 3732 bp, Artificial Sequence
  derived and/or modified sequence
atgggagacatgacaaactcagacttttatagcaagaatcagcgaaacgagtcctcccatggcggagagttcggttgtacaatggaagagctgcgctccttgatggagctgcgcggtactgaagccgtcgtgaagattaaagagacttacggcgacacagaagcaatctgtagacgtctcaagacatctcccgtggaaggcctgcctggaactgcacccgacctggagaagaggaaacagatcttcggccagaacttcatcccccctaagaaacccaagacttttctacagctggtatgggaagcattacaggatgtcacactcatcattcttgaaattgctgccattatttcccttggccttagtttctaccacccacctggggagggaaatgaaggctgcgccacagctcagggaggagctgaggatgaaggagaagccgaagccggatggattgagggcgctgcgattctgttaagcgttatatgcgtagttctggtaactgcttttaatgactggtccaaagaaaaacagtttagagggttgcagtctcgcattgagcaagaacaaaagtttacagtcgtccgggcagggcaggttgttcagatcccagtcgccgaaatcgtggtcggggatatcgctcaggtgaaatatggcgatctcctgcccgctgatgggctgtttattcaaggaaacgacctgaagatagacgaaagtagcctgaccggagagagcgatcaggtgcgcaagtctgttgataaggatcccatgcttctcagcggaactcacgttatggagggcagcggcagaatgcttgtcaccgccgtcggggtaaatagccagactggcattatttttaccctcctgggggcaggcggtgaggaggaggagaagaaggataaaaaaggcgtgaagaagggcgacgggttacagctgccggctgcggatggtgcagccgcttcgaacgccgctgactctgcaaacgcgtccctagtgaatggaaagatgcaagacgggaacgtggacgcttcacagagcaaggctaagcagcaggatggcgctgctgctatggagatgcagccactgaagagtgctgagggcggtgacgccgatgatcgaaaaaaagcctccatgcacaagaaggagaaatcagtattgcagggcaagctaaccaagctggccgtgcagatagggaaggccggattagtcatgtcggccatcacagtgatcatactcgtgctgtactttactgtcgacacctttgtggtcaacaaaaaaccctggttacccgaatgcactcccgtgtacgtgcagtactttgtgaaatttttcatcatcggcgtgacagtgctggtagtggccgtgcctgaagggctgccactggcagtcaccataagcctggcttacagtgtgaagaagatgatgaaagataataatctggtaaggcacctggatgcttgcgaaactatggggaatgctactgccatttgctcagataagaccggtacccttaccacgaacagaatgactgtggtccaggcctatgtcggggatgtacattataaagaaatacccgatccttcatctatcaataccaagactatggagctgctgatcaacgcaatcgccattaatagcgcttataccaccaagatcttgccacccgagaaggaaggtgctctacccagacaggtggggaataagacggaatgcggattattaggtttcgtgctagatctgaaacaagactacgaaccagtgagatctcagatgcccgaggaaaagctctacaaggtgtacactttcaactcagtccgcaagtctatgagtacagttataaagctccctgacgagtcttttcgcatgtactccaagggcgcatcagaaattgtactgaagaagtgttgcaagattctgaatggggctggggaaccacgtgttttcagaccccgtgacagggacgaaatggtgaaaaaggtcatagagcctatggcctgtgacggactgcgaacaatctgcgttgcctacagggattttccctccagtccagagcccgattgggataatgagaatgatattttaaatgagttgacatgcatctgtgtcgttggcatcgaggacccagtaaggccagaggtgcctgaagccatccgtaagtgtcagcgtgcaggtatcaccgtgaggatggttactggtgataacattaataccgcacgagccatcgccatcaaatgtggtatcatacacccaggagaggatttcctgtgtctggagggcaaagaattcaatcgtcgcatccgtaacgagaaaggggagatcgaacaggagaggattgataagatctggcctaagctgagggttctggctaggtcatctccaactgacaagcataccctcgttaaagggattattgactctactcataccgagcaaagacaagttgtagcagttacaggtgatgggaccaacgatggacctgcgttgaaaaaagctgatgtgggatttgctatgggcattgccggaaccgacgttgccaaggaagcctctgacatcatactcacagacgacaatttttccagtattgtaaaagctgtgatgtggggacgaaacgtgtatgactccatcagcaagtttcttcagtttcagctcactgtgaacgtcgtcgcagttattgtcgcctttactggcgcatgcatcacacaggattctccattgaaggccgtccagatgctgtgggtgaatctaatcatggacactttcgcgagccttgctctggcgaccgagcccccaacagaaactctgctgctgaggaaaccctacgggaggaataagccgctgatttcaagaaccatgatgaagaacattctggggcacgctgtgtaccaattggcactaatattcaccctgcttttcgtaggagagaaaatgtttcagatagattccgggagaaatgcacctctgcacagcccccctagcgagcattatacaattattttcaatacattcgtgatgatgcagctgttcaacgagatcaatgccaggaagatccatggggaacgtaacgtatttgatggcatttttaggaacccaatattttgcacaattgttctgggcacttttgccattcaaatcgtgattgtgcagtttggcggaaagcccttctcttgctctcccttgcagctggatcagtggatgtggtgtatctttataggccttggagaactggtgtgggggcaggtcatcgccacaattcccacgtcacggctaaagttcctaaaagaagctgggagactcacccagaaggaggagatccctgaggaagagctcaacgaagacgtcgaagaaatcgatcacgcagagcgagagttaagacgagggcagatcctctggtttcggggactaaaccggattcagacccagatcagagtggttaaggctttccgcagctccctgtacgaagggctggagaaaccagagagtaggacgagtattcataatttcatggcccacccagagtttagaatcgaggactctcaaccccatatcccactcatcgatgatacggacctcgaagaagacgctgccttgaaacaaaactccagtcctccttcctcgttgaacaagaacaattcagctattgatagcgggatcaacttaacaaccgatacgtctaagtccgccacaagcagctcccctggtagccctatacactcactggagactagcctgtag

SEQ ID NO: 18207 - DNA, 3732 bp, Artificial Sequence
  derived and/or modified sequence
atgggggacatgactaacagcgacttttacagcaaaaatcaaaggaacgagtcttcacacgggggagaattcggatgcacaatggaagagctgaggtccctgatggagctgcgaggtactgaggctgtggtgaagattaaagagacatatggtgataccgaagcaatttgccgcaggttaaagactagtcctgtggaggggctgccgggtacagctcccgacctggagaagagaaagcagatctttgggcagaatttcattccgccaaagaagcctaagacttttctgcagctggtctgggaggccctgcaagatgtaaccctgataatcctcgaaattgccgctataatcagtttaggcctgtcgttctaccatcctcctggcgaaggcaacgaaggttgcgccacagcccagggcggagccgaagacgagggcgaagctgaggcgggatggatagaaggcgcagctatcctgctgtccgtaatctgcgttgtgctcgtgacagcattcaacgattggagcaaggaaaagcagttccgaggactgcagtcaaggattgagcaggaacagaaattcaccgtggttcgtgccggacaagtagtgcagatccccgtggccgaaattgtcgtgggcgacatcgcccaggtcaaatatggtgatttgctgccagcagacggcctttttatccagggtaacgacctgaagatagacgaatcatctctgactggagaaagtgatcaggtgcggaagtcagttgataaggatcctatgttgttaagcggtacccatgtgatggaggggagcggcagaatgctggtgacagcagtcggcgtcaatagccaaacagggataattttcactctgctgggagccggaggagaagaagaagaaaaaaaggataagaaaggagtgaaaaagggagacggcttacagcttccagcggcagatggcgcagctgcaagtaacgccgcagactccgcgaacgcgtccttggtaaacggtaagatgcaagacgggaacgtggacgcttcccagtctaaggccaaacagcaggacggtgcggcagccatggagatgcaacccctgaagtctgccgaaggcggagatgcggacgatcgtaagaaggcctctatgcacaagaaggagaaaagcgtgttgcagggcaagctcacaaaactggctgtgcagattggaaaggccggattagtgatgagtgcgataaccgtcatcattctggtgctgtacttcacagtggacaccttcgtggtcaacaaaaagccttggttgccagaatgcacaccggtgtacgtgcagtatttcgtaaaattctttattatcggggtgactgtgttggtggtagccgtccccgaagggcttcccttagccgtcacaatcagcttggcttacagcgtgaagaagatgatgaaggataacaatttggtgagacacctcgatgcctgtgagacaatgggcaacgcgacggccatatgctccgataagacggggactctgactacaaacaggatgaccgttgtgcaagcttatgtgggtgacgtgcattataaagaaattcctgacccttctagcattaacaccaagacaatggaattgctgatcaatgccattgcaatcaactctgcctatacaacaaagatactgcctccagaaaaggaaggcgcattgccacgacaggtggggaataagactgaatgtggcctccttgggtttgttcttgatttgaaacaagattacgaacctgttaggagccagatgccagaggaaaaattgtataaggtttatacattcaactccgtccgcaagagtatgtccactgttataaagcttcctgacgaatcctttagaatgtatagcaagggcgcatctgagatcgtgcttaagaaatgttgcaagattctgaacggcgcaggtgaacctagggtcttccgaccacgggacagagacgagatggtgaagaaggttatcgagcctatggcctgcgacggattgcggactatatgcgtggcttaccgcgactttcccagttctccagaaccagattgggacaacgagaacgacatcctgaacgagctgacttgtatatgcgtcgtggggatcgaggacccagtgcgccctgaggtgcccgaggcaattaggaagtgccaacgcgcagggatcaccgtccggatggtaacaggcgacaatatcaatacggctcgggcaattgcaatcaagtgtggtattatacatcccggagaggatttcctttgcctggagggtaaagagtttaacagacggattaggaatgagaaaggcgagatcgagcaagagaggatcgataagatttggccaaaactgcgtgtgctcgcccgaagtagcccgactgacaagcataccctcgtcaaaggcataatagattccacccacaccgaacagagacaggttgtggctgtcacgggtgatggaacaaatgacggccctgcactgaagaaagcggatgtcgggttcgctatgggaattgcagggaccgacgttgctaaagaagcatcagacataattctgaccgatgacaatttttcctctatcgtgaaagctgtgatgtggggaagaaatgtgtacgattccatctctaaattcctccagttccagctgaccgtgaatgtagtcgcagtgatcgtcgccttcactggggcatgtatcacacaagactctccattaaaagccgtgcaaatgctttgggtgaaccttatcatggatacctttgcaagtctcgcactggcaacagaacctccaaccgagaccctcttactccgaaagccatatggtcgcaataagccactcatctctcggactatgatgaaaaatatcttgggccatgctgtgtaccagttagcactgattttcaccctgctgttcgtaggtgagaagatgtttcaaatagactcggggaggaatgcccctctccactcacccccttcagagcattatactattatttttaacactttcgtcatgatgcagctttttaacgaaatcaatgctcgcaaaattcacggggaacggaacgtatttgacggtattttccgtaatccaattttctgtacaattgtgctaggcaccttcgccatccaaattgtgatcgtgcagttcggcggaaagccatttagctgttctcccttgcagttggaccagtggatgtggtgtattttcatcgggcttggggagttagtgtggggccaagtcattgctaccattcccacctcaaggttgaagtttctcaaggaggccggaaggcttacccagaaagaagagatcccagaggaggaacttaacgaggatgtcgaggaaatcgatcatgccgagagggaattacgcagaggtcaaattttatggttccgcggacttaatcgcatacagacccagatacgggtagtgaaagctttcaggagtagtctgtatgaagggcttgaaaaaccagagtctaggacctccattcataactttatggcccacccagagttccgaatagaggactctcagcctcacatcccactcattgacgatactgacctcgaagaggacgccgctctcaaacagaattccagcccaccatcctccctgaataaaaacaactccgccatcgacagtggtatcaacctcaccacggacacatctaaaagcgctacttcttcctcccccggatctcccattcacagcttggaaacctccctgtag

SEQ ID NO: 18208 - DNA, 8920 bp, Artificial Sequence
  derived and/or modified sequence
agtctgcagaggggcccgggcacgctggctgggctcagccgcggcaccagctgccgcaccgcgattacggggctgcccgccgggaaaccgtgcaggattggtggtgattttcatagccaagagccaccacccctgaccatgtagatgccagttccagggagcagcatgggccccactgaatggagactcctgggtctacagccctgagcccctccggcccctggacctcgtcccacaccggaggacacctcttggagctcaccaccactgtcaccagcccgcctcggccacccccaccccccgggacccggagtcggccgcctggtgccacagctgaccagtgagggtgtgctgaggacagccacaagcagccatcacccggcagcctcttgtccagcgctgacccttgggcccagcccgagcaaggaccgcagcaaacatgggtgacatgaccaacagcgacttttactccaaaaaccaaagaaatgagtcgagccatgggggcgagttcgggtgcacaatggaggagctccgctccctcatggagctgcggggcactgaggctgtggtcaagatcaaggagacttatggggacaccgaagccatctgccggcgcctcaaaacctcacctgttgaaggtttgccgggcaccgctccagacctggaaaagagaaagcaaatttttgggcaaaactttatacctccaaagaagccaaaaaccttcctgcagctcgtgtgggaggcgctgcaggacgtgacgctcatcatcctggagattgccgccatcatctccctggggctgtccttctaccacccgcccggcgagggcaacgaaggatgtgcgacggcccagggtggggcagaggatgaaggagaggcagaggcaggttggatcgagggggccgccattctcctctcagttatctgtgtggtcctggtcacggccttcaatgactggagcaaagagaaacagttccggggcctgcagagccgcatcgagcaggaacagaaatttaccgtggtccgggctggccaggtggtccagatccctgtggctgagatcgtggttggggacatagcccaggtcaaatatggtgacctcctccctgccgacggcctcttcatccagggcaatgacctcaagattgatgaaagctccctaactggagagtctgaccaggtgcgcaagtccgtggacaaggaccccatgctgctgtcaggaacccacgtgatggagggctcaggacggatgttggtgactgctgtgggtgtgaactctcagactggcatcatctttaccctcctgggggctggtggtgaagaggaagagaagaaagacaaaaaaggtgtgaagaagggggatggccttcagctaccagcagcagacggtgcggcagcttcaaatgctgcagatagtgcgaatgccagcctagtcaatgccaaacaacaggacggggcagccgccatggagatgcagcccctcaagagtgccgagggcggcgacgctgacgacaggaagaaggccagcatgcacaagaaggagaagtccgtgctgcagggcaagctcaccaagctggctgtgcagatcgggaaggcgggcttggtgatgtcagccatcacggtgatcatcctggtgctctacttcactgtggacaccttcgtggtcaacaagaagccgtggctgcctgagtgcacgcccgtctacgtgcagtactttgtcaagttcttcatcattggcgtgacggtgctggtggtcgccgtgcccgaggggctccctctggccgtcaccatctcgttggcctattcggtgaagaaaatgatgaaggacaacaacctggtacgccacctggatgcctgtgagaccatgggcaatgccacagccatctgctcagacaagacaggcacgctgaccaccaatcgcatgacagtggtacaggcctatgtcggcgacgtccactataaagagatccccgaccccagctccatcaacaccaagaccatggagctgctgatcaatgccatcgccatcaacagcgcctacaccaccaagattctgcccccagagaaggagggcgccctgcctcggcaggtgggcaacaagacggagtgcggcctgctgggcttcgtgctggacctgaagcaggactacgagcccgtgcgcagccagatgccagaggagaagttgtacaaagtgtacaccttcaactccgtgcgcaagtccatgagcactgtcatcaagctgcccgacgagagcttccgcatgtacagcaagggggcttctgagatcgtgctcaagaagtgctgcaaaatcctcaatggggcgggagagcctcgtgtcttccggccccgcgaccgggacgagatggtaaagaaggtgattgagcccatggcttgcgatgggctccgcactatctgcgtggcctaccgcgacttccccagcagcccggagccggactgggacaatgagaatgacatcctcaacgaactcacctgcatctgcgtggtgggcatcgaggacccggtgcggccagaggtcccagaagccatccgcaagtgccagcgggcaggcatcacggtccgcatggtcactggcgacaatatcaacacggctcgggccatcgccatcaagtgtggcatcatccatcctggggaggactttctgtgcctcgagggcaaggagttcaacaggaggatccgcaacgagaagggggagattgagcaggagcgaattgacaagatctggccaaagctgcgggtgctggctcgctcctccccaacggacaagcataccctggttaaaggcatcatcgacagcacacacactgagcagcggcaggtggtggccgtgacgggggacgggaccaacgacgggcctgcactcaagaaggccgacgtgggcttcgccatgggcatcgcaggcactgacgtggccaaggaggcctcagacatcatcctgacagacgacaatttcagcagcatcgtcaaggcagtgatgtggggccgcaacgtctatgacagcatctccaaattcttgcagttccagctcaccgtcaacgtggtggccgtgattgtggccttcacaggcgcctgcatcacgcaggactcccctctgaaggccgtgcagatgctctgggtgaacctcatcatggacacgtttgcctcgctggcactggccactgagccgcccacggagaccctgctgctgaggaagccgtacggccgcaacaagccgctcatctccaggaccatgatgaagaacatcctgggccatgctgtctaccagcttgccctcatcttcaccctgctctttgttggcgagaagatgttccagatcgacagcgggaggaacgcgcccctgcattcgccaccctcagaacattacaccatcatcttcaacaccttcgtcatgatgcagctcttcaacgagatcaacgcccgcaagatccacggcgagcgcaatgtctttgacggcatcttccggaaccccatcttctgcaccatcgtgctgggcacctttgccatccagatagtgatcgtgcagtttggagggaagccattcagctgctctccactgcagctggaccagtggatgtggtgcatattcattgggttaggagagctcgtttggggccaggtcatcgccaccatcccgaccagcagactcaagttcctcaaggaggcaggcaggctcacacagaaggaggagatcccggaggaggagctcaacgaggacgtggaggagatcgaccacgcggagcgggagctgcggcggggccagatcctgtggttccgaggcctgaatcggatccagacacagatccgcgtcgtgaaggcgttccgtagctctctctatgaaggtttagaaaagcctgaatctcgaacctccatccataacttcatggctcatcctgaattccggatcgaagattcccagccccacatccccctcattgatgacaccgacctggaagaagatgccgcgctcaagcagaactcgagcccgccgtcatccctcaacaagaacaacagcgccatcgacagtgggatcaacctgacgaccgacacaagcaaatcagctacctcttcaagtccagggagccccatccacagcctggagacgtcgctttagctgaggaccctctcgcctgcccgcccgccctcatggaccccgctgccacccgctttccgggcacccatccatccaggcacccaactcacccaagcagcaacgagcaacaatcggaaaccaaatactggagagaaaaccaacgtttccacccacagaccctttctctggctgcgatgctgtttgaactctttttcacttcaaggcaaggggcgggatctccactgggggcttacgggagtgagcggttttcccaaaacaagcccttcctggctcccacccagacatggaccagccatgcacccgcccagccaccacgtcccccgcatgaatgtactgtacactttcaatcctccccttgtttggtttttgggggttggggaggggtttttgtttgtttgtttgttttcttaggcgggaactgcaaacagactcttttctgagactatttatccaatccactggtctgtgagtttttgaaatgcttgcacagcatggtctcagttgtatagattaatttaataactttttgaaattgcagagcttaactcgcctagtagatttgcaccaatggaaccgaagaacttcatagacactcacaaggttatatccatttctttgtatctatatcaacgtatacttttccgagactgtatacgtccatatagataggtagatatatatatatatatataaatatatatacatggatatataaagtttctttgccggcatgttgccttgtttccgcttaaattgctctattttaacttatttatgtcctaaaagaagaatgtaatttgtttacaaacctgtagataacgtctttggctatttgtatggtttaagaacactggtggctgagatgctataaaaacagctcggcccaacagacacttcccctgggttgcatcctggatgttttatgatagccatgctctgatttttgcctgctatttccgttcaataatgtcactaccgtgagaggctcaggcagaagccaaatgctaccgagttgccatcctgaggggtttaacaacatgctccgtagacgaagggagaggaggagagaaggcttcctgggtttgcaacactaacggccatccggcccaaggatgccaggatctgcaaagcactgctcgaagacttttctctcaatgaaactcgcttgagtttactaagagcatttcaaaaataggttctctttggcactgtctgtacagagattgaggtagtgttgaaatattataaatggtattgtgttgatttttttttttatttagtaacttacaggtttgtttccttattaatggcagcatctgagctgttggcatattggatgaggatcagtatggcttgctgcttttatttttatttttgaagaagaatagcctttttctctgcactatttagatccgaatgaaccttatgatgtgtatattgagatgtactcagtgtgattttaaaccaaattgtcttcctgtagtcacaatatatactgtagccttttaacagcaagtcttgctttcccaaacagaaagccattctgaaaccctacagtatcacaggtgagaaaaggtggttattttttccccaagacaacagcactagtaatcccacttaataagagcttatttaattggatgtcagcctcttaactgctaagcactttgtgggtctcagcgtttttcataaaagaacttttgtatttaatacaaagtttgctttgagacttttcagcatatgatcttttttccataaacttgtacagtgcaaaagacattttgaataccatgatcgatgatgtcccatgcttcgaggaaaaccaaacactttccgcctctcttgcaaaatccattcctcatgctgaccctcctcacgatggctgtgtcagcccagccccttcccttctccaggcccagagaactcttccacaaacaagatgagagccactcgggaaaagagccatagtcaactgggagggcctacatctggatggcggtggaaaaacttgagggtttggggttcaaagtcagcccatcccacctggcaaaatcctcctggaaggaggaccttcaagagcgcatcacctgaatgtcgtgaagaagtatctctgaatgtatccaggagaggaactgcataaccaaaggggtgaccagccctcagatgtgcttattggattccagtacaaacgccaccaaagccagcccactgctctcctacaaggaaggaaagatctgcacgtgtaaaacatggggcagccttggaacatggtgttttttggagtttcctttctcacagttttccatctccccacttctttgatcagtcatgtgtccgtgacctcgttccatgacatcaggatagctgtgtttgcacaccatgctccatgttcattcggagccaggaggggttctcagtggagcctggcttagggaacagggagcgatggaagaatgccaacattagcgttggtcttctcttgtcaggaatgaaggatgcttgcacacatgcaccccctcactctcacacttgcacacatacacacacacacacacgaaatggttggtttgtcaaaactcactgtagtacataaagcttgcactctgcgtcctatatctagcagcatggggtacgtttggcagttcactccattagggggtaaataatttatgaccattcatctgtttttatgaatttttttatctagacaataatgtaaataaagaactcaccatctctgttcatttaatactatgcaatggttatgctttcaatcgctggctcttctgactcgtgcagtgtggttctgaaatgtttgtggtttaaaaaaaaaagcaaaaaacaacatcaaacagaacatagtaaatatatctgtaatgtatacttttttctactttgggactgcatcatccacatagcttcttttctgtcctctagacaagggctccaggagtaagtggcagatttggttctgagagctaagctcaccaacttgtctccccctcaacagatgagggaagggcagggagcccgttcagtgactcctggcgctgcagaatcactcatctttggaggtgagcagagagagctctgaggagtttccttcttgcaactcaggcggagctttctttaactcaggagcagcctccattgctcccgccaacccctcaccatggccccttgtccccttgtcccaaccatagcatagagatgacaagagagaggcagtcctatttctgagactggaccaattaaaatgactgcactggctcaaaggactctgaacctgtcttgtcctgggtcctccagttgttggaagccactcttttccccaaccatgctgaaatgccacctttaccacacactgatgtcttacatagacttagatctatttctggaacttctcttctcttcgcttacttgggtgtctcatctggcaccagccatacaattttaactattgtcaatttctaatgtcttattatgtggtgggatgagtcccttcactcttcttttacaaaatttcctagttattctctcacatctattcttccacataaactttaaattgtgcccagtcctccaccccctgtcccattcccacccccaaattctgggctctgtcattccctgtgccatcatcttccccccattgtaattactgtccactcagggctgtgaaatagactatgttctgtaaagagggacaaaaagggcatcctgatcttgagagaagcctgctgttcctcccatcatttcacctgccccctaagcccaggagttgtcatgagaggtcaccaggcccccactcaatctcagcttgggaaccaaagtcacccaccttggttgtgttggggtggacccgccatctgtccctggtccagacgagaaagaggagtctctcctaggcctggagctgggaaagaatgtgtggcccagttgtctgcacttctaattctcatcatggagaaacctttattcctatctccctttcctgaactggttttttgttgtttttgtttcattttgttttggggggatagtttcttgctctttaatttggagtctccagtacctttgggatgcaggcagttcttgcctgggccttctcggaaccctcactcccctagcccactcttgcgctacctgcaggaggctgccaacctggtgcattctgacaagcctcccacccaaatctctctcctgccattgtgtccaaaatcccaccattagaggctcttgtagggaagagcgtttcttgaaggcttttaggccttccagagccaggagggaagtcagacaatagcaggaagtccccaggccttttcaaagttccaaaccaagctctcctgattttaatgtagagatcataccaacccaggtgggggaggagggtccccagccccaggcagcagccatcaccccctccactgaaaacaatattggaggctgctttgggactgcccttctcagccccctaagtctgttttgtaatgcctgtggtgctctccctcctggacctttcctctcgggggtcaccacactttgctaactcttgtgtgcacatattttataatagagtagcgagggaatggtgccgcctccagcttccgtaagctgcccgggctctggggggctctgggacaatcggggctgggaagtgactgtgctcttattgtacactctttatttctctgtatctttggcttgtgctctttgtaattaatgggatttgtctgccttttcaacactatactgagcaataacaataaatgcacacgtggaaatgca

SEQ ID NO: 18209 - DNA, 8593 bp, Artificial Sequence
  derived and/or modified sequence
agccatcacccggcagcctcttgtccagcgctgacccttgggcccagcccgagcaaggaccgcagcaaacatgggtgacatgaccaacagcgacttttactccaaaaaccaaagaaatgagtcgagccatgggggcgagttcgggtgcacaatggaggagctccgctccctcatggagctgcggggcactgaggctgtggtcaagatcaaggagacttatggggacaccgaagccatctgccggcgcctcaaaacctcacctgttgaaggtttgccgggcaccgctccagacctggaaaagagaaagcaaatttttgggcaaaactttatacctccaaagaagccaaaaaccttcctgcagctcgtgtgggaggcgctgcaggacgtgacgctcatcatcctggagattgccgccatcatctccctggggctgtccttctaccacccgcccggcgagggcaacgaaggatgtgcgacggcccagggtggggcagaggatgaaggagaggcagaggcaggttggatcgagggggccgccattctcctctcagttatctgtgtggtcctggtcacggccttcaatgactggagcaaagagaaacagttccggggcctgcagagccgcatcgagcaggaacagaaatttaccgtggtccgggctggccaggtggtccagatccctgtggctgagatcgtggttggggacatagcccaggtcaaatatggtgacctcctccctgccgacggcctcttcatccagggcaatgacctcaagattgatgaaagctccctaactggagagtctgaccaggtgcgcaagtccgtggacaaggaccccatgctgctgtcaggaacccacgtgatggagggctcaggacggatgttggtgactgctgtgggtgtgaactctcagactggcatcatctttaccctcctgggggctggtggtgaagaggaagagaagaaagacaaaaaaggtgtgaagaagggggatggccttcagctaccagcagcagacggtgcggcagcttcaaatgctgcagatagtgcgaatgccagcctagtcaatggtaaaatgcaggatggcaatgtggacgccagccagagcaaagccaaacaacaggacggggcagccgccatggagatgcagcccctcaagagtgccgagggcggcgacgctgacgacaggaagaaggccagcatgcacaagaaggagaagtccgtgctgcagggcaagctcaccaagctggctgtgcagatcgggaaggcgggcttggtgatgtcagccatcacggtgatcatcctggtgctctacttcactgtggacaccttcgtggtcaacaagaagccgtggctgcctgagtgcacgcccgtctacgtgcagtactttgtcaagttcttcatcattggcgtgacggtgctggtggtcgccgtgcccgaggggctccctctggccgtcaccatctcgttggcctattcggtgaagaaaatgatgaaggacaacaacctggtacgccacctggatgcctgtgagaccatgggcaatgccacagccatctgctcagacaagacaggcacgctgaccaccaatcgcatgacagtggtacaggcctatgtcggcgacgtccactataaagagatccccgaccccagctccatcaacaccaagaccatggagctgctgatcaatgccatcgccatcaacagcgcctacaccaccaagattctgcccccagagaaggagggcgccctgcctcggcaggtgggcaacaagacggagtgcggcctgctgggcttcgtgctggacctgaagcaggactacgagcccgtgcgcagccagatgccagaggagaagttgtacaaagtgtacaccttcaactccgtgcgcaagtccatgagcactgtcatcaagctgcccgacgagagcttccgcatgtacagcaagggggcttctgagatcgtgctcaagaagtgctgcaaaatcctcaatggggcgggagagcctcgtgtcttccggccccgcgaccgggacgagatggtaaagaaggtgattgagcccatggcttgcgatgggctccgcactatctgcgtggcctaccgcgacttccccagcagcccggagccggactgggacaatgagaatgacatcctcaacgaactcacctgcatctgcgtggtgggcatcgaggacccggtgcggccagaggtcccagaagccatccgcaagtgccagcgggcaggcatcacggtccgcatggtcactggcgacaatatcaacacggctcgggccatcgccatcaagtgtggcatcatccatcctggggaggactttctgtgcctcgagggcaaggagttcaacaggaggatccgcaacgagaagggggagattgagcaggagcgaattgacaagatctggccaaagctgcgggtgctggctcgctcctccccaacggacaagcataccctggttaaaggcatcatcgacagcacacacactgagcagcggcaggtggtggccgtgacgggggacgggaccaacgacgggcctgcactcaagaaggccgacgtgggcttcgccatgggcatcgcaggcactgacgtggccaaggaggcctcagacatcatcctgacagacgacaatttcagcagcatcgtcaaggcagtgatgtggggccgcaacgtctatgacagcatctccaaattcttgcagttccagctcaccgtcaacgtggtggccgtgattgtggccttcacaggcgcctgcatcacgcaggactcccctctgaaggccgtgcagatgctctgggtgaacctcatcatggacacgtttgcctcgctggcactggccactgagccgcccacggagaccctgctgctgaggaagccgtacggccgcaacaagccgctcatctccaggaccatgatgaagaacatcctgggccatgctgtctaccagcttgccctcatcttcaccctgctctttgttggcgagaagatgttccagatcgacagcgggaggaacgcgcccctgcattcgccaccctcagaacattacaccatcatcttcaacaccttcgtcatgatgcagctcttcaacgagatcaacgcccgcaagatccacggcgagcgcaatgtctttgacggcatcttccggaaccccatcttctgcaccatcgtgctgggcacctttgccatccagatagtgatcgtgcagtttggagggaagccattcagctgctctccactgcagctggaccagtggatgtggtgcatattcattgggttaggagagctcgtttggggccaggtcatcgccaccatcccgaccagcagactcaagttcctcaaggaggcaggcaggctcacacagaaggaggagatcccggaggaggagctcaacgaggacgtggaggagatcgaccacgcggagcgggagctgcggcggggccagatcctgtggttccgaggcctgaatcggatccagacacagatccgcgtcgtgaaggcgttccgtagctctctctatgaaggtttagaaaagcctgaatctcgaacctccatccataacttcatggctcatcctgaattccggatcgaagattcccagccccacatccccctcattgatgacaccgacctggaagaagatgccgcgctcaagcagaactcgagcccgccgtcatccctcaacaagaacaacagcgccatcgacagtgggatcaacctgacgaccgacacaagcaaatcagctacctcttcaagtccagggagccccatccacagcctggagacgtcgctttagctgaggaccctctcgcctgcccgcccgccctcatggaccccgctgccacccgctttccgggcacccatccatccaggcacccaactcacccaagcagcaacgagcaacaatcggaaaccaaatactggagagaaaaccaacgtttccacccacagaccctttctctggctgcgatgctgtttgaactctttttcacttcaaggcaaggggcgggatctccactgggggcttacgggagtgagcggttttcccaaaacaagcccttcctggctcccacccagacatggaccagccatgcacccgcccagccaccacgtcccccgcatgaatgtactgtacactttcaatcctccccttgtttggtttttgggggttggggaggggtttttgtttgtttgtttgttttcttaggcgggaactgcaaacagactcttttctgagactatttatccaatccactggtctgtgagtttttgaaatgcttgcacagcatggtctcagttgtatagattaatttaataactttttgaaattgcagagcttaactcgcctagtagatttgcaccaatggaaccgaagaacttcatagacactcacaaggttatatccatttctttgtatctatatcaacgtatacttttccgagactgtatacgtccatatagataggtagatatatatatatatatataaatatatatacatggatatataaagtttctttgccggcatgttgccttgtttccgcttaaattgctctattttaacttatttatgtcctaaaagaagaatgtaatttgtttacaaacctgtagataacgtctttggctatttgtatggtttaagaacactggtggctgagatgctataaaaacagctcggcccaacagacacttcccctgggttgcatcctggatgttttatgatagccatgctctgatttttgcctgctatttccgttcaataatgtcactaccgtgagaggctcaggcagaagccaaatgctaccgagttgccatcctgaggggtttaacaacatgctccgtagacgaagggagaggaggagagaaggcttcctgggtttgcaacactaacggccatccggcccaaggatgccaggatctgcaaagcactgctcgaagacttttctctcaatgaaactcgcttgagtttactaagagcatttcaaaaataggttctctttggcactgtctgtacagagattgaggtagtgttgaaatattataaatggtattgtgttgatttttttttttatttagtaacttacaggtttgtttccttattaatggcagcatctgagctgttggcatattggatgaggatcagtatggcttgctgcttttatttttatttttgaagaagaatagcctttttctctgcactatttagatccgaatgaaccttatgatgtgtatattgagatgtactcagtgtgattttaaaccaaattgtcttcctgtagtcacaatatatactgtagccttttaacagcaagtcttgctttcccaaacagaaagccattctgaaaccctacagtatcacaggtgagaaaaggtggttattttttccccaagacaacagcactagtaatcccacttaataagagcttatttaattggatgtcagcctcttaactgctaagcactttgtgggtctcagcgtttttcataaaagaacttttgtatttaatacaaagtttgctttgagacttttcagcatatgatcttttttccataaacttgtacagtgcaaaagacattttgaataccatgatcgatgatgtcccatgcttcgaggaaaaccaaacactttccgcctctcttgcaaaatccattcctcatgctgaccctcctcacgatggctgtgtcagcccagccccttcccttctccaggcccagagaactcttccacaaacaagatgagagccactcgggaaaagagccatagtcaactgggagggcctacatctggatggcggtggaaaaacttgagggtttggggttcaaagtcagcccatcccacctggcaaaatcctcctggaaggaggaccttcaagagcgcatcacctgaatgtcgtgaagaagtatctctgaatgtatccaggagaggaactgcataaccaaaggggtgaccagccctcagatgtgcttattggattccagtacaaacgccaccaaagccagcccactgctctcctacaaggaaggaaagatctgcacgtgtaaaacatggggcagccttggaacatggtgttttttggagtttcctttctcacagttttccatctccccacttctttgatcagtcatgtgtccgtgacctcgttccatgacatcaggatagctgtgtttgcacaccatgctccatgttcattcggagccaggaggggttctcagtggagcctggcttagggaacagggagcgatggaagaatgccaacattagcgttggtcttctcttgtcaggaatgaaggatgcttgcacacatgcaccccctcactctcacacttgcacacatacacacacacacacacgaaatggttggtttgtcaaaactcactgtagtacataaagcttgcactctgcgtcctatatctagcagcatggggtacgtttggcagttcactccattagggggtaaataatttatgaccattcatctgtttttatgaatttttttatctagacaataatgtaaataaagaactcaccatctctgttcatttaatactatgcaatggttatgctttcaatcgctggctcttctgactcgtgcagtgtggttctgaaatgtttgtggtttaaaaaaaaaagcaaaaaacaacatcaaacagaacatagtaaatatatctgtaatgtatacttttttctactttgggactgcatcatccacatagcttcttttctgtcctctagacaagggctccaggagtaagtggcagatttggttctgagagctaagctcaccaacttgtctccccctcaacagatgagggaagggcagggagcccgttcagtgactcctggcgctgcagaatcactcatctttggaggtgagcagagagagctctgaggagtttccttcttgcaactcaggcggagctttctttaactcaggagcagcctccattgctcccgccaacccctcaccatggccccttgtccccttgtcccaaccatagcatagagatgacaagagagaggcagtcctatttctgagactggaccaattaaaatgactgcactggctcaaaggactctgaacctgtcttgtcctgggtcctccagttgttggaagccactcttttccccaaccatgctgaaatgccacctttaccacacactgatgtcttacatagacttagatctatttctggaacttctcttctcttcgcttacttgggtgtctcatctggcaccagccatacaattttaactattgtcaatttctaatgtcttattatgtggtgggatgagtcccttcactcttcttttacaaaatttcctagttattctctcacatctattcttccacataaactttaaattgtgcccagtcctccaccccctgtcccattcccacccccaaattctgggctctgtcattccctgtgccatcatcttccccccattgtaattactgtccactcagggctgtgaaatagactatgttctgtaaagagggacaaaaagggcatcctgatcttgagagaagcctgctgttcctcccatcatttcacctgccccctaagcccaggagttgtcatgagaggtcaccaggcccccactcaatctcagcttgggaaccaaagtcacccaccttggttgtgttggggtggacccgccatctgtccctggtccagacgagaaagaggagtctctcctaggcctggagctgggaaagaatgtgtggcccagttgtctgcacttctaattctcatcatggagaaacctttattcctatctccctttcctgaactggttttttgttgtttttgtttcattttgttttggggggatagtttcttgctctttaatttggagtctccagtacctttgggatgcaggcagttcttgcctgggccttctcggaaccctcactcccctagcccactcttgcgctacctgcaggaggctgccaacctggtgcattctgacaagcctcccacccaaatctctctcctgccattgtgtccaaaatcccaccattagaggctcttgtagggaagagcgtttcttgaaggcttttaggccttccagagccaggagggaagtcagacaatagcaggaagtccccaggccttttcaaagttccaaaccaagctctcctgattttaatgtagagatcataccaacccaggtgggggaggagggtccccagccccaggcagcagccatcaccccctccactgaaaacaatattggaggctgctttgggactgcccttctcagccccctaagtctgttttgtaatgcctgtggtgctctccctcctggacctttcctctcgggggtcaccacactttgctaactcttgtgtgcacatattttataatagagtagcgagggaatggtgccgcctccagcttccgtaagctgcccgggctctggggggctctgggacaatcggggctgggaagtgactgtgctcttattgtacactctttatttctctgtatctttggcttgtgctctttgtaattaatgggatttgtctgccttttcaacactatactgagcaataacaataaatgcacacgtggaaatgca

SEQ ID NO: 18210 - DNA, 8962 bp, Artificial Sequence
  derived and/or modified sequence
agtctgcagaggggcccgggcacgctggctgggctcagccgcggcaccagctgccgcaccgcgattacggggctgcccgccgggaaaccgtgcaggattggtggtgattttcatagccaagagccaccacccctgaccatgtagatgccagttccagggagcagcatgggccccactgaatggagactcctgggtctacagccctgagcccctccggcccctggacctcgtcccacaccggaggacacctcttggagctcaccaccactgtcaccagcccgcctcggccacccccaccccccgggacccggagtcggccgcctggtgccacagctgaccagtgagggtgtgctgaggacagccacaagcagccatcacccggcagcctcttgtccagcgctgacccttgggcccagcccgagcaaggaccgcagcaaacatgggtgacatgaccaacagcgacttttactccaaaaaccaaagaaatgagtcgagccatgggggcgagttcgggtgcacaatggaggagctccgctccctcatggagctgcggggcactgaggctgtggtcaagatcaaggagacttatggggacaccgaagccatctgccggcgcctcaaaacctcacctgttgaaggtttgccgggcaccgctccagacctggaaaagagaaagcaaatttttgggcaaaactttatacctccaaagaagccaaaaaccttcctgcagctcgtgtgggaggcgctgcaggacgtgacgctcatcatcctggagattgccgccatcatctccctggggctgtccttctaccacccgcccggcgagggcaacgaaggatgtgcgacggcccagggtggggcagaggatgaaggagaggcagaggcaggttggatcgagggggccgccattctcctctcagttatctgtgtggtcctggtcacggccttcaatgactggagcaaagagaaacagttccggggcctgcagagccgcatcgagcaggaacagaaatttaccgtggtccgggctggccaggtggtccagatccctgtggctgagatcgtggttggggacatagcccaggtcaaatatggtgacctcctccctgccgacggcctcttcatccagggcaatgacctcaagattgatgaaagctccctaactggagagtctgaccaggtgcgcaagtccgtggacaaggaccccatgctgctgtcaggaacccacgtgatggagggctcaggacggatgttggtgactgctgtgggtgtgaactctcagactggcatcatctttaccctcctgggggctggtggtgaagaggaagagaagaaagacaaaaaaggtgtgaagaagggggatggccttcagctaccagcagcagacggtgcggcagcttcaaatgctgcagatagtgcgaatgccagcctagtcaatggtaaaatgcaggatggcaatgtggacgccagccagagcaaagccaaacaacaggacggggcagccgccatggagatgcagcccctcaagagtgccgagggcggcgacgctgacgacaggaagaaggccagcatgcacaagaaggagaagtccgtgctgcagggcaagctcaccaagctggctgtgcagatcgggaaggcgggcttggtgatgtcagccatcacggtgatcatcctggtgctctacttcactgtggacaccttcgtggtcaacaagaagccgtggctgcctgagtgcacgcccgtctacgtgcagtactttgtcaagttcttcatcattggcgtgacggtgctggtggtcgccgtgcccgaggggctccctctggccgtcaccatctcgttggcctattcggtgaagaaaatgatgaaggacaacaacctggtacgccacctggatgcctgtgagaccatgggcaatgccacagccatctgctcagacaagacaggcacgctgaccaccaatcgcatgacagtggtacaggcctatgtcggcgacgtccactataaagagatccccgaccccagctccatcaacaccaagaccatggagctgctgatcaatgccatcgccatcaacagcgcctacaccaccaagattctgcccccagagaaggagggcgccctgcctcggcaggtgggcaacaagacggagtgcggcctgctgggcttcgtgctggacctgaagcaggactacgagcccgtgcgcagccagatgccagaggagaagttgtacaaagtgtacaccttcaactccgtgcgcaagtccatgagcactgtcatcaagctgcccgacgagagcttccgcatgtacagcaagggggcttctgagatcgtgctcaagaagtgctgcaaaatcctcaatggggcgggagagcctcgtgtcttccggccccgcgaccgggacgagatggtaaagaaggtgattgagcccatggcttgcgatgggctccgcactatctgcgtggcctaccgcgacttccccagcagcccggagccggactgggacaatgagaatgacatcctcaacgaactcacctgcatctgcgtggtgggcatcgaggacccggtgcggccagaggtcccagaagccatccgcaagtgccagcgggcaggcatcacggtccgcatggtcactggcgacaatatcaacacggctcgggccatcgccatcaagtgtggcatcatccatcctggggaggactttctgtgcctcgagggcaaggagttcaacaggaggatccgcaacgagaagggggagattgagcaggagcgaattgacaagatctggccaaagctgcgggtgctggctcgctcctccccaacggacaagcataccctggttaaaggcatcatcgacagcacacacactgagcagcggcaggtggtggccgtgacgggggacgggaccaacgacgggcctgcactcaagaaggccgacgtgggcttcgccatgggcatcgcaggcactgacgtggccaaggaggcctcagacatcatcctgacagacgacaatttcagcagcatcgtcaaggcagtgatgtggggccgcaacgtctatgacagcatctccaaattcttgcagttccagctcaccgtcaacgtggtggccgtgattgtggccttcacaggcgcctgcatcacgcaggactcccctctgaaggccgtgcagatgctctgggtgaacctcatcatggacacgtttgcctcgctggcactggccactgagccgcccacggagaccctgctgctgaggaagccgtacggccgcaacaagccgctcatctccaggaccatgatgaagaacatcctgggccatgctgtctaccagcttgccctcatcttcaccctgctctttgttggcgagaagatgttccagatcgacagcgggaggaacgcgcccctgcattcgccaccctcagaacattacaccatcatcttcaacaccttcgtcatgatgcagctcttcaacgagatcaacgcccgcaagatccacggcgagcgcaatgtctttgacggcatcttccggaaccccatcttctgcaccatcgtgctgggcacctttgccatccagatagtgatcgtgcagtttggagggaagccattcagctgctctccactgcagctggaccagtggatgtggtgcatattcattgggttaggagagctcgtttggggccaggtcatcgccaccatcccgaccagcagactcaagttcctcaaggaggcaggcaggctcacacagaaggaggagatcccggaggaggagctcaacgaggacgtggaggagatcgaccacgcggagcgggagctgcggcggggccagatcctgtggttccgaggcctgaatcggatccagacacagatccgcgtcgtgaaggcgttccgtagctctctctatgaaggtttagaaaagcctgaatctcgaacctccatccataacttcatggctcatcctgaattccggatcgaagattcccagccccacatccccctcattgatgacaccgacctggaagaagatgccgcgctcaagcagaactcgagcccgccgtcatccctcaacaagaacaacagcgccatcgacagtgggatcaacctgacgaccgacacaagcaaatcagctacctcttcaagtccagggagccccatccacagcctggagacgtcgctttagctgaggaccctctcgcctgcccgcccgccctcatggaccccgctgccacccgctttccgggcacccatccatccaggcacccaactcacccaagcagcaacgagcaacaatcggaaaccaaatactggagagaaaaccaacgtttccacccacagaccctttctctggctgcgatgctgtttgaactctttttcacttcaaggcaaggggcgggatctccactgggggcttacgggagtgagcggttttcccaaaacaagcccttcctggctcccacccagacatggaccagccatgcacccgcccagccaccacgtcccccgcatgaatgtactgtacactttcaatcctccccttgtttggtttttgggggttggggaggggtttttgtttgtttgtttgttttcttaggcgggaactgcaaacagactcttttctgagactatttatccaatccactggtctgtgagtttttgaaatgcttgcacagcatggtctcagttgtatagattaatttaataactttttgaaattgcagagcttaactcgcctagtagatttgcaccaatggaaccgaagaacttcatagacactcacaaggttatatccatttctttgtatctatatcaacgtatacttttccgagactgtatacgtccatatagataggtagatatatatatatatatataaatatatatacatggatatataaagtttctttgccggcatgttgccttgtttccgcttaaattgctctattttaacttatttatgtcctaaaagaagaatgtaatttgtttacaaacctgtagataacgtctttggctatttgtatggtttaagaacactggtggctgagatgctataaaaacagctcggcccaacagacacttcccctgggttgcatcctggatgttttatgatagccatgctctgatttttgcctgctatttccgttcaataatgtcactaccgtgagaggctcaggcagaagccaaatgctaccgagttgccatcctgaggggtttaacaacatgctccgtagacgaagggagaggaggagagaaggcttcctgggtttgcaacactaacggccatccggcccaaggatgccaggatctgcaaagcactgctcgaagacttttctctcaatgaaactcgcttgagtttactaagagcatttcaaaaataggttctctttggcactgtctgtacagagattgaggtagtgttgaaatattataaatggtattgtgttgatttttttttttatttagtaacttacaggtttgtttccttattaatggcagcatctgagctgttggcatattggatgaggatcagtatggcttgctgcttttatttttatttttgaagaagaatagcctttttctctgcactatttagatccgaatgaaccttatgatgtgtatattgagatgtactcagtgtgattttaaaccaaattgtcttcctgtagtcacaatatatactgtagccttttaacagcaagtcttgctttcccaaacagaaagccattctgaaaccctacagtatcacaggtgagaaaaggtggttattttttccccaagacaacagcactagtaatcccacttaataagagcttatttaattggatgtcagcctcttaactgctaagcactttgtgggtctcagcgtttttcataaaagaacttttgtatttaatacaaagtttgctttgagacttttcagcatatgatcttttttccataaacttgtacagtgcaaaagacattttgaataccatgatcgatgatgtcccatgcttcgaggaaaaccaaacactttccgcctctcttgcaaaatccattcctcatgctgaccctcctcacgatggctgtgtcagcccagccccttcccttctccaggcccagagaactcttccacaaacaagatgagagccactcgggaaaagagccatagtcaactgggagggcctacatctggatggcggtggaaaaacttgagggtttggggttcaaagtcagcccatcccacctggcaaaatcctcctggaaggaggaccttcaagagcgcatcacctgaatgtcgtgaagaagtatctctgaatgtatccaggagaggaactgcataaccaaaggggtgaccagccctcagatgtgcttattggattccagtacaaacgccaccaaagccagcccactgctctcctacaaggaaggaaagatctgcacgtgtaaaacatggggcagccttggaacatggtgttttttggagtttcctttctcacagttttccatctccccacttctttgatcagtcatgtgtccgtgacctcgttccatgacatcaggatagctgtgtttgcacaccatgctccatgttcattcggagccaggaggggttctcagtggagcctggcttagggaacagggagcgatggaagaatgccaacattagcgttggtcttctcttgtcaggaatgaaggatgcttgcacacatgcaccccctcactctcacacttgcacacatacacacacacacacacgaaatggttggtttgtcaaaactcactgtagtacataaagcttgcactctgcgtcctatatctagcagcatggggtacgtttggcagttcactccattagggggtaaataatttatgaccattcatctgtttttatgaatttttttatctagacaataatgtaaataaagaactcaccatctctgttcatttaatactatgcaatggttatgctttcaatcgctggctcttctgactcgtgcagtgtggttctgaaatgtttgtggtttaaaaaaaaaagcaaaaaacaacatcaaacagaacatagtaaatatatctgtaatgtatacttttttctactttgggactgcatcatccacatagcttcttttctgtcctctagacaagggctccaggagtaagtggcagatttggttctgagagctaagctcaccaacttgtctccccctcaacagatgagggaagggcagggagcccgttcagtgactcctggcgctgcagaatcactcatctttggaggtgagcagagagagctctgaggagtttccttcttgcaactcaggcggagctttctttaactcaggagcagcctccattgctcccgccaacccctcaccatggccccttgtccccttgtcccaaccatagcatagagatgacaagagagaggcagtcctatttctgagactggaccaattaaaatgactgcactggctcaaaggactctgaacctgtcttgtcctgggtcctccagttgttggaagccactcttttccccaaccatgctgaaatgccacctttaccacacactgatgtcttacatagacttagatctatttctggaacttctcttctcttcgcttacttgggtgtctcatctggcaccagccatacaattttaactattgtcaatttctaatgtcttattatgtggtgggatgagtcccttcactcttcttttacaaaatttcctagttattctctcacatctattcttccacataaactttaaattgtgcccagtcctccaccccctgtcccattcccacccccaaattctgggctctgtcattccctgtgccatcatcttccccccattgtaattactgtccactcagggctgtgaaatagactatgttctgtaaagagggacaaaaagggcatcctgatcttgagagaagcctgctgttcctcccatcatttcacctgccccctaagcccaggagttgtcatgagaggtcaccaggcccccactcaatctcagcttgggaaccaaagtcacccaccttggttgtgttggggtggacccgccatctgtccctggtccagacgagaaagaggagtctctcctaggcctggagctgggaaagaatgtgtggcccagttgtctgcacttctaattctcatcatggagaaacctttattcctatctccctttcctgaactggttttttgttgtttttgtttcattttgttttggggggatagtttcttgctctttaatttggagtctccagtacctttgggatgcaggcagttcttgcctgggccttctcggaaccctcactcccctagcccactcttgcgctacctgcaggaggctgccaacctggtgcattctgacaagcctcccacccaaatctctctcctgccattgtgtccaaaatcccaccattagaggctcttgtagggaagagcgtttcttgaaggcttttaggccttccagagccaggagggaagtcagacaatagcaggaagtccccaggccttttcaaagttccaaaccaagctctcctgattttaatgtagagatcataccaacccaggtgggggaggagggtccccagccccaggcagcagccatcaccccctccactgaaaacaatattggaggctgctttgggactgcccttctcagccccctaagtctgttttgtaatgcctgtggtgctctccctcctggacctttcctctcgggggtcaccacactttgctaactcttgtgtgcacatattttataatagagtagcgagggaatggtgccgcctccagcttccgtaagctgcccgggctctggggggctctgggacaatcggggctgggaagtgactgtgctcttattgtacactctttatttctctgtatctttggcttgtgctctttgtaattaatgggatttgtctgccttttcaacactatactgagcaataacaataaatgcacacgtggaaatgca

SEQ ID NO: 18211 - DNA, 3690 bp, Artificial Sequence
  derived and/or modified sequence
atgggcgacatgaccaacagcgacttctacagcaagaaccagagaaacgagagcagccacggcggcgagttcggctgcaccatggaggagctgagaagcctgatggagctgagaggcaccgaggccgtggtgaagatcaaggagacctacggcgacaccgaggccatctgcagaagactgaagaccagccccgtggagggcctgcccggcaccgcccccgacctggagaagagaaagcagatcttcggccagaacttcatcccccccaagaagcccaagaccttcctgcagctggtgtgggaggccctgcaggacgtgaccctgatcatcctggagatcgccgccatcatcagcctgggcctgagcttctaccacccccccggcgagggcaacgagggctgcgccaccgcccagggcggcgccgaggacgagggcgaggccgaggccggctggatcgagggcgccgccatcctgctgagcgtgatctgcgtggtgctggtgaccgccttcaacgactggagcaaggagaagcagttcagaggcctgcagagcagaatcgagcaggagcagaagttcaccgtggtgagagccggccaggtggtgcagatccccgtggccgagatcgtggtgggcgacatcgcccaggtgaagtacggcgacctgctgcccgccgacggcctgttcatccagggcaacgacctgaagatcgacgagagcagcctgaccggcgagagcgaccaggtgagaaagagcgtggacaaggaccccatgctgctgagcggcacccacgtgatggagggcagcggcagaatgctggtgaccgccgtgggcgtgaacagccagaccggcatcatcttcaccctgctgggcgccggcggcgaggaggaggagaagaaggacaagaagggcgtgaagaagggcgacggcctgcagctgcccgccgccgacggcgccgccgccagcaacgccgccgacagcgccaacgccagcctggtgaacgccaagcagcaggacggcgccgccgccatggagatgcagcccctgaagagcgccgagggcggcgacgccgacgacagaaagaaggccagcatgcacaagaaggagaagagcgtgctgcagggcaagctgaccaagctggccgtgcagatcggcaaggccggcctggtgatgagcgccatcaccgtgatcatcctggtgctgtacttcaccgtggacaccttcgtggtgaacaagaagccctggctgcccgagtgcacccccgtgtacgtgcagtacttcgtgaagttcttcatcatcggcgtgaccgtgctggtggtggccgtgcccgagggcctgcccctggccgtgaccatcagcctggcctacagcgtgaagaagatgatgaaggacaacaacctggtgagacacctggacgcctgcgagaccatgggcaacgccaccgccatctgcagcgacaagaccggcaccctgaccaccaacagaatgaccgtggtgcaggcctacgtgggcgacgtgcactacaaggagatccccgaccccagcagcatcaacaccaagaccatggagctgctgatcaacgccatcgccatcaacagcgcctacaccaccaagatcctgccccccgagaaggagggcgccctgcccagacaggtgggcaacaagaccgagtgcggcctgctgggcttcgtgctggacctgaagcaggactacgagcccgtgagaagccagatgcccgaggagaagctgtacaaggtgtacaccttcaacagcgtgagaaagagcatgagcaccgtgatcaagctgcccgacgagagcttcagaatgtacagcaagggcgccagcgagatcgtgctgaagaagtgctgcaagatcctgaacggcgccggcgagcccagagtgttcagacccagagacagagacgagatggtgaagaaggtgatcgagcccatggcctgcgacggcctgagaaccatctgcgtggcctacagagacttccccagcagccccgagcccgactgggacaacgagaacgacatcctgaacgagctgacctgcatctgcgtggtgggcatcgaggaccccgtgagacccgaggtgcccgaggccatcagaaagtgccagagagccggcatcaccgtgagaatggtgaccggcgacaacatcaacaccgccagagccatcgccatcaagtgcggcatcatccaccccggcgaggacttcctgtgcctggagggcaaggagttcaacagaagaatcagaaacgagaagggcgagatcgagcaggagagaatcgacaagatctggcccaagctgagagtgctggccagaagcagccccaccgacaagcacaccctggtgaagggcatcatcgacagcacccacaccgagcagagacaggtggtggccgtgaccggcgacggcaccaacgacggccccgccctgaagaaggccgacgtgggcttcgccatgggcatcgccggcaccgacgtggccaaggaggccagcgacatcatcctgaccgacgacaacttcagcagcatcgtgaaggccgtgatgtggggcagaaacgtgtacgacagcatcagcaagttcctgcagttccagctgaccgtgaacgtggtggccgtgatcgtggccttcaccggcgcctgcatcacccaggacagccccctgaaggccgtgcagatgctgtgggtgaacctgatcatggacaccttcgccagcctggccctggccaccgagccccccaccgagaccctgctgctgagaaagccctacggcagaaacaagcccctgatcagcagaaccatgatgaagaacatcctgggccacgccgtgtaccagctggccctgatcttcaccctgctgttcgtgggcgagaagatgttccagatcgacagcggcagaaacgcccccctgcacagcccccccagcgagcactacaccatcatcttcaacaccttcgtgatgatgcagctgttcaacgagatcaacgccagaaagatccacggcgagagaaacgtgttcgacggcatcttcagaaaccccatcttctgcaccatcgtgctgggcaccttcgccatccagatcgtgatcgtgcagttcggcggcaagcccttcagctgcagccccctgcagctggaccagtggatgtggtgcatcttcatcggcctgggcgagctggtgtggggccaggtgatcgccaccatccccaccagcagactgaagttcctgaaggaggccggcagactgacccagaaggaggagatccccgaggaggagctgaacgaggacgtggaggagatcgaccacgccgagagagagctgagaagaggccagatcctgtggttcagaggcctgaacagaatccagacccagatcagagtggtgaaggccttcagaagcagcctgtacgagggcctggagaagcccgagagcagaaccagcatccacaacttcatggcccaccccgagttcagaatcgaggacagccagccccacatccccctgatcgacgacaccgacctggaggaggacgccgccctgaagcagaacagcagcccccccagcagcctgaacaagaacaacagcgccatcgacagcggcatcaacctgaccaccgacaccagcaagagcgccaccagcagcagccccggcagccccatccacagcctggagaccagcctgtag

SEQ ID NO: 18212 - DNA, 3732 bp, Artificial Sequence
  derived and/or modified sequence
atgggcgacatgaccaacagcgacttctacagcaagaaccagagaaacgagagcagccacggcggcgagttcggctgcaccatggaggagctgagaagcctgatggagctgagaggcaccgaggccgtggtgaagatcaaggagacctacggcgacaccgaggccatctgcagaagactgaagaccagccccgtggagggcctgcccggcaccgcccccgacctggagaagagaaagcagatcttcggccagaacttcatcccccccaagaagcccaagaccttcctgcagctggtgtgggaggccctgcaggacgtgaccctgatcatcctggagatcgccgccatcatcagcctgggcctgagcttctaccacccccccggcgagggcaacgagggctgcgccaccgcccagggcggcgccgaggacgagggcgaggccgaggccggctggatcgagggcgccgccatcctgctgagcgtgatctgcgtggtgctggtgaccgccttcaacgactggagcaaggagaagcagttcagaggcctgcagagcagaatcgagcaggagcagaagttcaccgtggtgagagccggccaggtggtgcagatccccgtggccgagatcgtggtgggcgacatcgcccaggtgaagtacggcgacctgctgcccgccgacggcctgttcatccagggcaacgacctgaagatcgacgagagcagcctgaccggcgagagcgaccaggtgagaaagagcgtggacaaggaccccatgctgctgagcggcacccacgtgatggagggcagcggcagaatgctggtgaccgccgtgggcgtgaacagccagaccggcatcatcttcaccctgctgggcgccggcggcgaggaggaggagaagaaggacaagaagggcgtgaagaagggcgacggcctgcagctgcccgccgccgacggcgccgccgccagcaacgccgccgacagcgccaacgccagcctggtgaacggcaagatgcaggacggcaacgtggacgccagccagagcaaggccaagcagcaggacggcgccgccgccatggagatgcagcccctgaagagcgccgagggcggcgacgccgacgacagaaagaaggccagcatgcacaagaaggagaagagcgtgctgcagggcaagctgaccaagctggccgtgcagatcggcaaggccggcctggtgatgagcgccatcaccgtgatcatcctggtgctgtacttcaccgtggacaccttcgtggtgaacaagaagccctggctgcccgagtgcacccccgtgtacgtgcagtacttcgtgaagttcttcatcatcggcgtgaccgtgctggtggtggccgtgcccgagggcctgcccctggccgtgaccatcagcctggcctacagcgtgaagaagatgatgaaggacaacaacctggtgagacacctggacgcctgcgagaccatgggcaacgccaccgccatctgcagcgacaagaccggcaccctgaccaccaacagaatgaccgtggtgcaggcctacgtgggcgacgtgcactacaaggagatccccgaccccagcagcatcaacaccaagaccatggagctgctgatcaacgccatcgccatcaacagcgcctacaccaccaagatcctgccccccgagaaggagggcgccctgcccagacaggtgggcaacaagaccgagtgcggcctgctgggcttcgtgctggacctgaagcaggactacgagcccgtgagaagccagatgcccgaggagaagctgtacaaggtgtacaccttcaacagcgtgagaaagagcatgagcaccgtgatcaagctgcccgacgagagcttcagaatgtacagcaagggcgccagcgagatcgtgctgaagaagtgctgcaagatcctgaacggcgccggcgagcccagagtgttcagacccagagacagagacgagatggtgaagaaggtgatcgagcccatggcctgcgacggcctgagaaccatctgcgtggcctacagagacttccccagcagccccgagcccgactgggacaacgagaacgacatcctgaacgagctgacctgcatctgcgtggtgggcatcgaggaccccgtgagacccgaggtgcccgaggccatcagaaagtgccagagagccggcatcaccgtgagaatggtgaccggcgacaacatcaacaccgccagagccatcgccatcaagtgcggcatcatccaccccggcgaggacttcctgtgcctggagggcaaggagttcaacagaagaatcagaaacgagaagggcgagatcgagcaggagagaatcgacaagatctggcccaagctgagagtgctggccagaagcagccccaccgacaagcacaccctggtgaagggcatcatcgacagcacccacaccgagcagagacaggtggtggccgtgaccggcgacggcaccaacgacggccccgccctgaagaaggccgacgtgggcttcgccatgggcatcgccggcaccgacgtggccaaggaggccagcgacatcatcctgaccgacgacaacttcagcagcatcgtgaaggccgtgatgtggggcagaaacgtgtacgacagcatcagcaagttcctgcagttccagctgaccgtgaacgtggtggccgtgatcgtggccttcaccggcgcctgcatcacccaggacagccccctgaaggccgtgcagatgctgtgggtgaacctgatcatggacaccttcgccagcctggccctggccaccgagccccccaccgagaccctgctgctgagaaagccctacggcagaaacaagcccctgatcagcagaaccatgatgaagaacatcctgggccacgccgtgtaccagctggccctgatcttcaccctgctgttcgtgggcgagaagatgttccagatcgacagcggcagaaacgcccccctgcacagcccccccagcgagcactacaccatcatcttcaacaccttcgtgatgatgcagctgttcaacgagatcaacgccagaaagatccacggcgagagaaacgtgttcgacggcatcttcagaaaccccatcttctgcaccatcgtgctgggcaccttcgccatccagatcgtgatcgtgcagttcggcggcaagcccttcagctgcagccccctgcagctggaccagtggatgtggtgcatcttcatcggcctgggcgagctggtgtggggccaggtgatcgccaccatccccaccagcagactgaagttcctgaaggaggccggcagactgacccagaaggaggagatccccgaggaggagctgaacgaggacgtggaggagatcgaccacgccgagagagagctgagaagaggccagatcctgtggttcagaggcctgaacagaatccagacccagatcagagtggtgaaggccttcagaagcagcctgtacgagggcctggagaagcccgagagcagaaccagcatccacaacttcatggcccaccccgagttcagaatcgaggacagccagccccacatccccctgatcgacgacaccgacctggaggaggacgccgccctgaagcagaacagcagcccccccagcagcctgaacaagaacaacagcgccatcgacagcggcatcaacctgaccaccgacaccagcaagagcgccaccagcagcagccccggcagccccatccacagcctggagaccagcctgtag

SEQ ID NO: 18213 - protein, 699 aa, Artificial Sequence
  derived and/or modified sequence
MDKFWWHAAWGLCLVPLSLAQIDLNITCRFAGVFHVEKNGRYSISRTEAADLCKAFNSTLPTMAQMEKALSIGFETCRYGFIEGHVVIPRIHPNSICAANNTGVYILTSNTSQYDTYCFNASAPPEEDCTSVTDLPNAFDGPITITIVNRDGTRYVQKGEYRTNPEDIYPSNPTDDDVSSGSSSERSSTSGGYIFYTFSTVHPIPDEDSPWITDSTDRIPATSTSSNTISAGWEPNEENEDERDRHLSFSGSGIDDDEDFISSTISTTPRAFDHTKQNQDWTQWNPSHSNPEVLLQTTTRMTDVDRNGTTAYEGNWNPEAHPPLIHHEHHEEEETPHSTSTIQATPSSTTEETATQKEQWFGNRWHEGYRQTPKEDSHSTTGTAAASAHTSHPMQGRTTPSPEDSSWTDFFNPISHPMGRGHQAGRRMDMDSSHSITLQPTANPNTGLVEDLDRTGPLSMTTQQSNSQSFSTSHEGLEEDKDHPTTSTLTSSNRNDVTGGRRDPNHSEGSTTLLEGYTSHYPHTKESRTFIPVTSAKTGSFGVTAVTVGDSNSNVNRSLSGDQDTFHPSGGSHTTHGSESDGHSHGSQEGGANTTSGPIRTPQIPEWLIILASLLALALILAVCIAVNSRRRCGQKKKLVINSGNGAVEDRKPSGLNGEASKSQEMVHLVNKESSETPDQFMTADETRNLQNVDMKIGV

SEQ ID NO: 18214 - DNA, 2100 bp, Artificial Sequence
  derived and/or modified sequence
atggacaagttttggtggcatgccgcctggggcctttgcctcgttccactgagcctcgcacagatagatctgaacatcacttgtcgctttgccggcgtgtttcacgtcgagaaaaacggtagatactctatctccaggacagaggctgccgacctgtgcaaggcattcaacagcaccctccccacgatggcacagatggaaaaagccctttccattggcttcgagacctgccgctatgggtttatagaaggtcacgttgtcatcccacggatccatccaaactctatctgtgccgcaaacaacacaggggtctacattttaaccagtaacacctcccagtacgatacgtattgttttaatgcgagcgcccccccagaggaggactgcacaagcgtgacggatctgccgaacgctttcgacggacctatcacgattactattgtgaacagggacggaactaggtacgtgcagaagggagaatatcgcaccaaccctgaggatatttatccaagcaacccaaccgatgatgacgtctcaagtgggtcaagctctgagcgctccagcacttccggtggatatattttttatacattttcaactgtccacccaatcccagatgaggacagcccatggatcactgactcaacggatcggatacccgctactagcacgtcatcgaataccatctccgcaggatgggagcctaacgaggagaatgaagacgaacgcgatcggcatctcagctttagtggatctgggattgacgacgatgaagacttcatctcgagcaccatcagtacaaccccaagggcctttgatcacaccaagcaaaatcaggactggacacagtggaatccaagccactctaatcctgaggtgctgctccaaacaaccactcggatgactgatgtggaccggaacggcactacagcatacgagggaaactggaatcctgaagcacacccccccctcattcatcatgagcatcacgaagaggaagaaacccctcatagcacctcaaccatccaggcgactcctagctcaaccaccgaggaaaccgcaacccagaaagaacagtggttcggcaacaggtggcacgagggttacaggcagacgccgaaagaggattcacattcaactactggtacagctgccgccagtgcgcacaccagtcatcctatgcaggggagaactaccccttccccggaagactctagctggacagatttctttaatcctatcagccacccgatgggaaggggacaccaggccgggagaaggatggatatggacagtagtcactctatcactctgcagcctactgctaatccgaacaccggcctggtagaggacctcgatcgcacaggtccgctctctatgactacacagcaatcaaactctcagtcgtttagtacttcacatgagggattggaagaggacaaagaccatcctaccacatccactcttaccagcagcaatagaaatgacgtgacgggggggagacgggaccctaaccacagcgagggcagcacaacactgttggaagggtacacttctcactacccccacacgaaggagtccagaacgttcattcctgttactagtgccaagacaggatccttcggcgtgaccgctgtgactgtgggagacagcaattcgaacgttaacagatccctgagcggggaccaggatacatttcatccatctggcggatcccacacgacacacgggtcagaaagtgacgggcactctcacggctcacaagaggggggagctaacaccaccagtgggccgatccgaacccctcagattcccgaatggctgattattctggcatccctacttgcactggccttgattttggcagtgtgtatagccgttaattctcggcgtagatgcggacaaaagaagaagctggttatcaactccggaaatggtgcagtggaggaccgaaagccaagcgggctcaacggagaggccagcaaatcccaggagatggtgcatctcgtcaataaggagtcttcagagaccccagatcaattcatgacggctgatgagacccgtaacctgcaaaacgtggacatgaagattggagtgtag

SEQ ID NO: 18215 - DNA, 2100 bp, Artificial Sequence
  derived and/or modified sequence
atggacaagttctggtggcacgccgcctggggcctgtgcctggtgcccctgagcctggcccagattgacctgaacatcacctgccgctttgctggggtcttccacgtggagaagaatggccgctacagcatcagcaggacagaagctgctgacctgtgcaaggccttcaacagcaccctgcccaccatggcccagatggagaaggccctgagcatcggctttgagacctgccgctatggcttcatcgagggccacgtggtgatcccccgcatccaccccaacagcatctgtgccgccaacaacacaggagtgtacatcctgaccagcaacaccagccagtatgacacctactgcttcaatgccagcgcccccccagaggaggactgcacctctgtgacagacctgcccaatgcctttgatggccccatcaccatcaccatcgtgaacagagatggcaccaggtatgtgcagaagggggagtaccgcaccaaccctgaggacatctaccccagcaaccccacagatgatgatgtgagcagcggcagcagcagcgagaggagcagcaccagcggcggctacatcttctacaccttcagcacagtgcaccccatcccagatgaggacagcccctggatcacagacagcacagaccgcatcccagccaccagcaccagcagcaacaccatctctgctggctgggagcccaatgaggagaatgaagatgagcgggacagacacctgtccttcagcggcagcggcattgatgatgatgaggacttcatcagcagcaccatcagcaccaccccccgggcctttgaccacaccaagcagaaccaggactggacccagtggaaccccagccacagcaaccctgaggtgctgctgcagaccaccaccaggatgacagatgtggacagaaatggcaccacagcctatgagggcaactggaaccctgaggcccaccccccactcatccaccacgagcaccacgaggaggaggagaccccccacagcaccagcaccatccaggccacccccagcagcaccacagaggagacagccacccagaaggagcagtggtttggaaaccgctggcatgagggctaccggcagacccccaaggaggacagccacagcaccactggaacagctgctgccagcgcccacaccagccaccccatgcagggccgcaccacccccagccctgaggacagctcctggacagacttcttcaaccccatcagccaccccatgggccggggccaccaggccggccgcaggatggacatggacagcagccacagcatcaccctgcagcccacagccaaccccaacacaggcctggtggaggacctggacagaacaggccccctgtccatgaccacccagcagagcaacagccagagcttcagcaccagccatgagggcctggaggaggacaaggaccaccccaccaccagcaccctgaccagcagcaacagaaatgatgtgactggaggaagaagagaccccaaccacagcgagggcagcaccaccctgctggagggctacaccagccactacccccacaccaaggagagcaggaccttcatccctgtgaccagcgccaagacaggcagctttggagtgacagctgtgacagtgggggacagcaacagcaatgtgaacagaagcctgagcggggaccaggacaccttccaccccagcggcggcagccacaccacccacggcagcgagagtgatggccacagccacggcagccaggagggcggggccaacaccaccagcggccccatccgcaccccccagatccctgagtggctgatcatcctggccagcctgctggccctggccctgatcctggccgtgtgcatcgctgtgaacagcagaagaagatgtggccagaagaagaagctggtgatcaacagcggaaatggagctgtggaggacaggaagcccagcggcctgaatggagaggccagcaagagccaggagatggtgcacctggtgaacaaggagagcagcgagaccccagaccagttcatgacagcagatgagaccaggaacctgcagaatgtggacatgaagattggagtgtag

SEQ ID NO: 18216 - DNA, 2100 bp, Artificial Sequence
  derived and/or modified sequence
atggacaagttctggtggcacgccgcctggggcctgtgcctggtgccactctcattggcccagattgatttaaatattacctgcaggtttgcaggtgttttccatgtggagaagaatggtcgctattccatttcacgaacagaagcagcggacctgtgtaaggcttttaactccacactgccaaccatggcccagatggagaaggccctaagcataggatttgaaacctgtcgatacggcttcatcgagggccacgtggtgatcccccgcatccatccgaacagtatctgcgccgcgaataatactggcgtatacattctcacctcgaacacgtcccagtacgacacttactgttttaacgcttccgccccccctgaagaagactgcacctcagtgacagaccttcccaacgctttcgatggaccaattacaattacgatagtgaatcgggacggaactagatatgtgcaaaagggagaatatagaaccaaccctgaggatatctatcccagcaatcccactgacgatgacgtttccagcggatcctcgtctgagaggtcgagtacatctgggggctacattttttacactttttctacagtgcaccccatacccgacgaggactccccttggataactgattccacagaccggatcccggctacttctacctctagtaacaccatttcggctgggtgggagcctaacgaagaaaatgaagatgaaagagacaggcatctgagtttttctggatccggaatagacgacgatgaagactttatatctagcactattagtaccaccccacgcgctttcgatcacacaaagcagaatcaggattggacccaatggaacccgagccactcaaaccctgaggtgctgctccagaccactacacggatgaccgacgtagaccgcaacggcaccacagcatacgagggtaattggaaccctgaggcccaccctccactgattcaccatgagcaccacgaagaggaagagactcctcattcgacctctactatccaggccaccccatcgtctactaccgaagaaactgcaacgcagaaggagcagtggttcggaaatcgttggcacgagggctacagacagacaccgaaggaagactcccacagtaccactggcacagcggcagcctctgcccatacttctcaccccatgcagggaaggaccacaccttctccagaggactcaagttggactgactttttcaatccgatcagccatcccatgggtcggggacaccaagccggtcgtagaatggatatggatagcagtcattccattacattgcagccaaccgctaatcccaacacagggttggtggaggatctcgacagaacgggcccactctcaatgaccacacagcagagcaacagccagtctttcagcacctcccatgaaggtctggaggaagacaaggaccacccgacgaccagcacgttgaccagctccaatagaaacgatgtcaccgggggccgaagggatcccaaccactccgagggctccacaacccttctcgaggggtataccagccattacccccacacaaaagagagcaggactttcatccctgtgacatccgctaagaccgggtcctttggcgtgacagccgtgacagtgggcgatagtaacagcaatgtcaatcgcagtctgtccggagaccaggatacctttcacccatctgggggcagccacacaacccacggttccgaatcagacggacatagccacgggtcccaggaagggggggctaatacaacaagcggtcctatacggactccacagatcccagagtggctgatcatcctggccagcctactagctctggcacttattcttgccgtgtgtattgcggtcaacagtcgacggagatgcggtcagaagaaaaagctggtgattaactctggaaatggcgccgtcgaagatagaaaaccaagtgggctaaatggcgaggccagtaagtcacaggaaatggtacacttagtgaacaaagaatcctcggagactcccgatcaattcatgacggccgatgaaactcgcaacctccaaaatgttgacatgaagatcggagtgtag

SEQ ID NO: 18217 - DNA, 2100 bp, Artificial Sequence
  derived and/or modified sequence
atggacaaattctggtggcatgccgcatggggcctctgcctggtccctctatccttggcccagattgatctcaatattacttgtcgcttcgccggtgtgtttcatgttgagaaaaatgggaggtactcaattagcagaaccgaagctgctgacctttgcaaggcatttaattcaacactgcccactatggcgcagatggagaaggccctctccatagggttcgaaacctgtcgttacggttttatagagggtcacgtggtgattcccaggattcacccgaactcaatttgtgccgctaacaataccggtgtatatattctaacgagcaacacatcgcaatacgatacctactgtttcaacgcctcagccccacccgaggaggactgcacttccgtcacggatcttccgaatgcattcgacggcccaattacaattactatcgttaaccgggacgggactagatacgttcagaaaggagagtacaggactaatccggaggatatatatcccagcaatcctaccgatgatgacgtgtcctctggctcctcctcggagcgcagctcgacttctgggggttacatcttctacaccttctccacagtgcatcctatacccgacgaggacagtccgtggatcaccgatagcaccgacaggattccagccactagcacatcctccaacactatctctgccggttgggaacccaatgaggaaaatgaagatgaacgggatcgccacctaagtttttcaggctccggcattgacgatgatgaggatttcatctcatcgacaatcagcacaacacccagagccttcgaccacactaagcagaaccaggactggacccagtggaacccatctcactctaaccccgaagtcctgctgcaaacaaccaccaggatgaccgacgtcgacaggaacgggacaacggcctacgaggggaattggaacccggaggcccacccccctctcattcaccacgagcaccatgaggaagaggagacaccgcactccacgagcacaatccaagccaccccttcttcaactaccgaggagaccgctacgcagaaagagcaatggtttggaaaccggtggcatgaaggatacaggcaaactccaaaggaagattcccacagtactaccggcacagctgctgcatcagctcatacgtcccacccaatgcagggcagaacaacacccagtcccgaagacagttcctggaccgacttcttcaatccgatctcacatcccatgggcagaggccaccaagctggacggagaatggatatggacagttcgcactctataactttacagcctacggctaatccaaataccggactcgtcgaagacctggaccggacagggcctttgagtatgactacccagcagagtaactcacagtcttttagcacatcccacgagggcctagaagaggacaaagatcatcccactacctcaacactcacaagcagtaatcggaatgacgtgaccggcggacgtcgcgaccctaaccacagcgaaggatccaccaccctgctggagggatatacttctcactacccccacaccaaagaatcccggactttcatcccagtgacctccgcaaagacaggctcatttggagtgacggcagtgaccgtcggtgactcaaattctaacgtgaatcgctctctctccggcgaccaggacacgttccacccttccggcggatcccacacaacacacggcagcgaaagtgatgggcactcccatggttcgcaggagggtggggcaaacaccacgtctggacctatcagaacgccccagatccctgagtggctgattatcttggcatcactgctggccctggcgctcattctggccgtctgcatagccgtgaactcccgaaggcgatgtggccaaaagaagaagctcgtcatcaatagcggcaatggggctgtggaggatcggaagccatccggcctgaatggggaggcctccaagagccaggaaatggtccacctggtgaataaggagtcttccgagacacccgaccagttcatgacggcagacgaaacccgtaatttgcaaaacgtggatatgaagattggagtgtag

SEQ ID NO: 18218 - DNA, 2369 bp, Artificial Sequence
  derived and/or modified sequence
cctcattgcccagcggaccccagcctctgccaggttcggtccgccatcctcgtcccgtcctccgccggcccctgccccgcgcccagggatcctccagctcctttcgcccgcgccctccgttcgctccggacaccatggacaagttttggtggcacgcagcctggggactctgcctcgtgccgctgagcctggcgcagatcgatttgaatataacctgccgctttgcaggtgtattccacgtggagaaaaatggtcgctacagcatctctcggacggaggccgctgacctctgcaaggctttcaatagcaccttgcccacaatggcccagatggagaaagctctgagcatcggatttgagacctgcaggtatgggttcatagaagggcacgtggtgattccccggatccaccccaactccatctgtgcagcaaacaacacaggggtgtacatcctcacatccaacacctcccagtatgacacatattgcttcaatgcttcagctccacctgaagaagattgtacatcagtcacagacctgcccaatgcctttgatggaccaattaccataactattgttaaccgtgatggcacccgctatgtccagaaaggagaatacagaacgaatcctgaagacatctaccccagcaaccctactgatgatgacgtgagcagcggctcctccagtgaaaggagcagcacttcaggaggttacatcttttacaccttttctactgtacaccccatcccagacgaagacagtccctggatcaccgacagcacagacagaatccctgctaccagtacgtcttcaaataccatctcagcaggctgggagccaaatgaagaaaatgaagatgaaagagacagacacctcagtttttctggatcaggcattgatgatgatgaagattttatctccagcaccatttcaaccacaccacgggcttttgaccacacaaaacagaaccaggactggacccagtggaacccaagccattcaaatccggaagtgctacttcagacaaccacaaggatgactgatgtagacagaaatggcaccactgcttatgaaggaaactggaacccagaagcacaccctcccctcattcaccatgagcatcatgaggaagaagagaccccacattctacaagcacaatccaggcaactcctagtagtacaacggaagaaacagctacccagaaggaacagtggtttggcaacagatggcatgagggatatcgccaaacacccaaagaagactcccattcgacaacagggacagctgcagcctcagctcataccagccatccaatgcaaggaaggacaacaccaagcccagaggacagttcctggactgatttcttcaacccaatctcacaccccatgggacgaggtcatcaagcaggaagaaggatggatatggactccagtcatagtataacgcttcagcctactgcaaatccaaacacaggtttggtggaagatttggacaggacaggacctctttcaatgacaacgcagcagagtaattctcagagcttctctacatcacatgaaggcttggaagaagataaagaccatccaacaacttctactctgacatcaagcaataggaatgatgtcacaggtggaagaagagacccaaatcattctgaaggctcaactactttactggaaggttatacctctcattacccacacacgaaggaaagcaggaccttcatcccagtgacctcagctaagactgggtcctttggagttactgcagttactgttggagattccaactctaatgtcaatcgttccttatcaggagaccaagacacattccaccccagtggggggtcccataccactcatggatctgaatcagatggacactcacatgggagtcaagaaggtggagcaaacacaacctctggtcctataaggacaccccaaattccagaatggctgatcatcttggcatccctcttggccttggctttgattcttgcagtttgcattgcagtcaacagtcgaagaaggtgtgggcagaagaaaaagctagtgatcaacagtggcaatggagctgtggaggacagaaagccaagtggactcaacggagaggccagcaagtctcaggaaatggtgcatttggtgaacaaggagtcgtcagaaactccagaccagtttatgacagctgatgagacaaggaacctgcagaatgtggacatgaagattggggtgtaacacctacaccattatcttggaaagaaacaaccgttggaaacataaccattacagggagctgggacacttaacagatgcaatgtgctactgattgtttcattgcgaatcttttttagcataaaattttctactctt

SEQ ID NO: 18219 - DNA, 2100 bp, Artificial Sequence
  derived and/or modified sequence
atggacaagttctggtggcacgccgcctggggcctgtgcctggtgcccctgagcctggcccagatcgacctgaacatcacctgcagattcgccggcgtgttccacgtggagaagaacggcagatacagcatcagcagaaccgaggccgccgacctgtgcaaggccttcaacagcaccctgcccaccatggcccagatggagaaggccctgagcatcggcttcgagacctgcagatacggcttcatcgagggccacgtggtgatccccagaatccaccccaacagcatctgcgccgccaacaacaccggcgtgtacatcctgaccagcaacaccagccagtacgacacctactgcttcaacgccagcgccccccccgaggaggactgcaccagcgtgaccgacctgcccaacgccttcgacggccccatcaccatcaccatcgtgaacagagacggcaccagatacgtgcagaagggcgagtacagaaccaaccccgaggacatctaccccagcaaccccaccgacgacgacgtgagcagcggcagcagcagcgagagaagcagcaccagcggcggctacatcttctacaccttcagcaccgtgcaccccatccccgacgaggacagcccctggatcaccgacagcaccgacagaatccccgccaccagcaccagcagcaacaccatcagcgccggctgggagcccaacgaggagaacgaggacgagagagacagacacctgagcttcagcggcagcggcatcgacgacgacgaggacttcatcagcagcaccatcagcaccacccccagagccttcgaccacaccaagcagaaccaggactggacccagtggaaccccagccacagcaaccccgaggtgctgctgcagaccaccaccagaatgaccgacgtggacagaaacggcaccaccgcctacgagggcaactggaaccccgaggcccacccccccctgatccaccacgagcaccacgaggaggaggagaccccccacagcaccagcaccatccaggccacccccagcagcaccaccgaggagaccgccacccagaaggagcagtggttcggcaacagatggcacgagggctacagacagacccccaaggaggacagccacagcaccaccggcaccgccgccgccagcgcccacaccagccaccccatgcagggcagaaccacccccagccccgaggacagcagctggaccgacttcttcaaccccatcagccaccccatgggcagaggccaccaggccggcagaagaatggacatggacagcagccacagcatcaccctgcagcccaccgccaaccccaacaccggcctggtggaggacctggacagaaccggccccctgagcatgaccacccagcagagcaacagccagagcttcagcaccagccacgagggcctggaggaggacaaggaccaccccaccaccagcaccctgaccagcagcaacagaaacgacgtgaccggcggcagaagagaccccaaccacagcgagggcagcaccaccctgctggagggctacaccagccactacccccacaccaaggagagcagaaccttcatccccgtgaccagcgccaagaccggcagcttcggcgtgaccgccgtgaccgtgggcgacagcaacagcaacgtgaacagaagcctgagcggcgaccaggacaccttccaccccagcggcggcagccacaccacccacggcagcgagagcgacggccacagccacggcagccaggagggcggcgccaacaccaccagcggccccatcagaaccccccagatccccgagtggctgatcatcctggccagcctgctggccctggccctgatcctggccgtgtgcatcgccgtgaacagcagaagaagatgcggccagaagaagaagctggtgatcaacagcggcaacggcgccgtggaggacagaaagcccagcggcctgaacggcgaggccagcaagagccaggagatggtgcacctggtgaacaaggagagcagcgagacccccgaccagttcatgaccgccgacgagaccagaaacctgcagaacgtggacatgaagatcggcgtgtag

SEQ ID NO: 18220 - protein, 493 aa, Artificial Sequence
  derived and/or modified sequence
MDKFWWHAAWGLCLVPLSLAQIDLNITCRFAGVFHVEKNGRYSISRTEAADLCKAFNSTLPTMAQMEKALSIGFETCRYGFIEGHVVIPRIHPNSICAANNTGVYILTSNTSQYDTYCFNASAPPEEDCTSVTDLPNAFDGPITITIVNRDGTRYVQKGEYRTNPEDIYPSNPTDDDVSSGSSSERSSTSGGYIFYTFSTVHPIPDEDSPWITDSTDRIPATNMDSSHSITLQPTANPNTGLVEDLDRTGPLSMTTQQSNSQSFSTSHEGLEEDKDHPTTSTLTSSNRNDVTGGRRDPNHSEGSTTLLEGYTSHYPHTKESRTFIPVTSAKTGSFGVTAVTVGDSNSNVNRSLSGDQDTFHPSGGSHTTHGSESDGHSHGSQEGGANTTSGPIRTPQIPEWLIILASLLALALILAVCIAVNSRRRCGQKKKLVINSGNGAVEDRKPSGLNGEASKSQEMVHLVNKESSETPDQFMTADETRNLQNVDMKIGV

SEQ ID NO: 18221 - DNA, 1482 bp, Artificial Sequence
  derived and/or modified sequence
atggataagttttggtggcatgcagcctgggggttgtgcctggtacccctgtctttggcccagattgacctcaacatcacttgtcgcttcgccggagtgttccatgtggagaaaaatggaagatattccatatcgagaacggaggcggccgacttgtgcaaggccttcaactcaaccttgccgacaatggcacagatggagaaggccctatccattggattcgaaacatgccgatatggctttatcgaggggcacgtggtcatcccccgcattcaccctaattccatatgtgctgccaataacaccggcgtgtacattcttaccagcaacacgagtcagtatgacacatattgttttaatgcaagcgcacccccagaggaggattgcaccagcgtaacagatcttcctaacgctttcgatgggccaattacaattacaattgtgaacagggatgggaccagatatgtccagaaaggagagtaccgcaccaatcctgaggatatttaccccagtaatcctacggacgacgatgtgtcaagtggctccagctctgagcgtagtagcacttccgggggttacatcttttacacattctctactgtccacccaattcccgacgaggactcaccctggattaccgactccacagaccgcattcccgcaacgaacatggactcatcccactcaattaccctccagcctaccgccaatcctaatactgggctggtcgaggatttggaccgtactggccccttaagtatgacaacccagcagagcaattcccagtctttttcaacttcccacgaaggtctggaggaagacaaagaccaccctacaacctcaacccttacttcatctaatcggaacgacgtcaccggaggcaggcgggatcctaatcattccgaaggcagcactactctgctggagggctatacctcgcactatccccatacgaaagagagccgaaccttcatccccgtgacctcagcaaaaaccggctctttcggcgtgactgcagtgaccgtgggggacagtaattcaaacgtaaatagaagtctttccggagatcaggacacatttcacccttccggggggagccatacaacacacggctctgagagcgatggccactcacatgggtctcaggagggcggggctaacacgaccagtggaccaatcaggactccccagattccagaatggctaatcatcctggcgagcctgctggcactggctttgattctggccgtgtgtattgccgttaatagcaggagaaggtgtggacaaaagaagaagcttgtaataaattcagggaatggggctgtagaggaccggaaacctagcggtctgaacggcgaagcttcgaagagccaggagatggtacatctggtaaacaaagaaagcagcgagaccccagatcaattcatgaccgccgatgagactcgtaacctccagaatgtggatatgaaaattggcgtctag

SEQ ID NO: 18222 - DNA, 1482 bp, Artificial Sequence
  derived and/or modified sequence
atggacaagttctggtggcacgccgcctggggcctgtgcctggtgcccctgagcctggcccagattgacctgaacatcacctgccgctttgctggggtcttccacgtggagaagaatggccgctacagcatcagcaggacagaagctgctgacctgtgcaaggccttcaacagcaccctgcccaccatggcccagatggagaaggccctgagcatcggctttgagacctgccgctatggcttcatcgagggccacgtggtgatcccccgcatccaccccaacagcatctgtgccgccaacaacacaggagtgtacatcctgaccagcaacaccagccagtatgacacctactgcttcaatgccagcgcccccccagaggaggactgcacctctgtgacagacctgcccaatgcctttgatggccccatcaccatcaccatcgtgaacagagatggcaccaggtatgtgcagaagggggagtaccgcaccaaccctgaggacatctaccccagcaaccccacagatgatgatgtgagcagcggcagcagcagcgagaggagcagcaccagcggcggctacatcttctacaccttcagcacagtgcaccccatcccagatgaggacagcccctggatcacagacagcacagaccgcatcccagccaccaacatggacagcagccacagcatcaccctgcagcccacagccaaccccaacacaggcctggtggaggacctggacagaacaggccccctgtccatgaccacccagcagagcaacagccagagcttcagcaccagccatgagggcctggaggaggacaaggaccaccccaccaccagcaccctgaccagcagcaacagaaatgatgtgactggaggaagaagagaccccaaccacagcgagggcagcaccaccctgctggagggctacaccagccactacccccacaccaaggagagcaggaccttcatccctgtgaccagcgccaagacaggcagctttggagtgacagctgtgacagtgggggacagcaacagcaatgtgaacagaagcctgagcggggaccaggacaccttccaccccagcggcggcagccacaccacccacggcagcgagagtgatggccacagccacggcagccaggagggcggggccaacaccaccagcggccccatccgcaccccccagatccctgagtggctgatcatcctggccagcctgctggccctggccctgatcctggccgtgtgcatcgctgtgaacagcagaagaagatgtggccagaagaagaagctggtgatcaacagcggaaatggagctgtggaggacaggaagcccagcggcctgaatggagaggccagcaagagccaggagatggtgcacctggtgaacaaggagagcagcgagaccccagaccagttcatgacagcagatgagaccaggaacctgcagaatgtggacatgaagattggagtgtag

SEQ ID NO: 18223 - DNA, 1482 bp, Artificial Sequence
  derived and/or modified sequence
atggacaagttctggtggcacgccgcctggggcctgtgcctggtgcctctaagccttgcacagattgacctcaacatcacatgcaggtttgctggcgtgttccatgtggaaaagaacggaaggtacagcatcagccggacggaggcagccgacctatgtaaagctttcaattccacgcttcccaccatggcccagatggaaaaagccttgtccattggctttgaaacctgtcggtatggtttcatcgagggccacgtggtaatcccccggattcacccgaattcaatttgtgcagccaacaacaccggcgtgtacattttgacatcaaacacctcacagtacgacacttactgttttaatgcctccgcccctccagaggaggactgtacctccgtaacggacttgcctaatgcctttgacggccccataactattaccattgttaaccgggatgggacacgctacgtccagaagggcgaatatcggaccaacccagaggacatctacccaagtaatcctactgacgatgacgtctcgtccgggagctcgtccgaacgatctagcacatctggagggtacatcttctatacattttctactgtgcacccaatacctgatgaagattctccctggatcactgacagcaccgaccgtatccctgccaccaacatggacagctctcattctattaccttgcagccgacagccaatccaaacactggcctcgtagaagatctggaccgcaccggccccttgtctatgaccacccagcaaagcaattctcaaagtttcagcacctctcacgagggtctggaggaggacaaggatcacccaaccaccagtaccctgacctcttccaatcggaacgacgtcaccggaggccgtcgcgacccaaaccacagcgagggatctacaactctgctcgaaggttacacgagccattaccctcacactaaagagtctcgtacattcatccccgtcacctctgcgaagacaggcagttttggcgtaactgccgtgacggttggggatagcaattctaatgtcaaccggtccctatccggagaccaggacacattccatccatcagggggctcccacactacgcacggaagtgaatccgacggccacagccacggatcccaggaggggggggccaatacaacgtccgggcccatacgtaccccacagattccagagtggctgattatactcgcctctctgctagcactcgcacttattctggcagtgtgcatcgccgtaaacagccggcggaggtgtggccagaagaaaaagttagttattaactccggtaacggggctgtggaggacagaaaacctagcggcctgaacggcgaggcatccaagtcacaggaaatggtgcacctagtgaacaaagaatcctccgagactccagaccaatttatgaccgctgacgaaacgagaaacctgcaaaacgtggatatgaagatcggagtatag

SEQ ID NO: 18224 - DNA, 1482 bp, Artificial Sequence
  derived and/or modified sequence
atggacaagttttggtggcatgccgcatggggcctttgtttggtgcccctgtccttagctcagatcgatctcaatattacttgccggttcgctggcgtgtttcacgtggagaaaaacgggcgttacagcattagcaggacagaagccgcagatctctgcaaagcattcaatagcacactccctacaatggcccagatggaaaaggctttgtctatcggctttgagacttgtcgatacggattcattgagggtcatgtggtgatcccaaggatccaccccaattccatttgcgcagccaataatacaggcgtctatatcctgacgagcaacaccagtcaatacgatacatactgcttcaatgccagtgccccaccagaggaagattgcaccagcgtcaccgacctccctaatgccttcgatggaccaatcacgataacaatcgtcaatcgtgacgggacccgttacgtccagaagggggaatacagaaccaaccctgaggacatctatccatcaaatcctaccgacgatgatgttagcagtggcagtagctcagaacgaagtagcacaagcggaggatacatcttctacacattctctacagtgcatcccataccggacgaggactccccgtggataacggatagcacagacagaatcccggctactaatatggattccagccactccattaccctacaacctactgcgaaccccaacaccggactcgtggaggatctcgaccgcacggggcctctttccatgacgacccagcagagtaacagccagagttttagtacttcccacgaggggctagaagaggacaaagaccatcccacgacttctactttgacatccagcaataggaacgacgtgacagggggacgtcgggatccaaatcatagcgaggggagtacgacactgctggaaggttatacttctcactatccacataccaaagaatctcggactttcattcccgtgacaagcgctaagactgggtcctttggcgtgacagctgtgacggtgggagactcaaattccaatgtcaaccgctctctgtcaggtgaccaggacacgtttcaccccagcgggggatcccacaccacacacgggagtgagtccgatgggcattctcacggttctcaggaaggaggcgcaaacactaccagtggcccaatccgaactccgcaaatccccgagtggcttattattctggcatccttgctggcattggcccttatcttagcagtgtgtatcgccgtcaatagccgtagacggtgcggccaaaaaaagaaactcgtgatcaatagcggaaatggagctgtggaagataggaagccctccggactgaacggcgaagctagtaagagccaagagatggttcatctcgtgaataaagagagctccgaaactccagatcagttcatgaccgccgatgagacaaggaatttgcagaatgttgacatgaagatcggggtgtag

SEQ ID NO: 18225 - DNA, 2292 bp, Artificial Sequence
  derived and/or modified sequence
cccagcctctgccaggttcggtccgccatcctcgtcccgtcctccgccggcccctgccccgcgcccagggatcctccagctcctttcgcccgcgccctccgttcgctccggacaccatggacaagttttggtggcacgcagcctggggactctgcctcgtgccgctgagcctggcgcagatcgatttgaatataacctgccgctttgcaggtgtattccacgtggagaaaaatggtcgctacagcatctctcggacggaggccgctgacctctgcaaggctttcaatagcaccttgcccacaatggcccagatggagaaagctctgagcatcggatttgagacctgcaggtatgggttcatagaagggcacgtggtgattccccggatccaccccaactccatctgtgcagcaaacaacacaggggtgtacatcctcacatccaacacctcccagtatgacacatattgcttcaatgcttcagctccacctgaagaagattgtacatcagtcacagacctgcccaatgcctttgatggaccaattaccataactattgttaaccgtgatggcacccgctatgtccagaaaggagaatacagaacgaatcctgaagacatctaccccagcaaccctactgatgatgacgtgagcagcggctcctccagtgaaaggagcagcacttcaggaggttacatcttttacaccttttctactgtacaccccatcccagacgaagacagtccctggatcaccgacagcacagacagaatccctgctaccaatatggactccagtcatagtataacgcttcagcctactgcaaatccaaacacaggtttggtggaagatttggacaggacaggacctctttcaatgacaacgcagcagagtaattctcagagcttctctacatcacatgaaggcttggaagaagataaagaccatccaacaacttctactctgacatcaagcaataggaatgatgtcacaggtggaagaagagacccaaatcattctgaaggctcaactactttactggaaggttatacctctcattacccacacacgaaggaaagcaggaccttcatcccagtgacctcagctaagactgggtcctttggagttactgcagttactgttggagattccaactctaatgtcaatcgttccttatcaggagaccaagacacattccaccccagtggggggtcccataccactcatggatctgaatcagatggacactcacatgggagtcaagaaggtggagcaaacacaacctctggtcctataaggacaccccaaattccagaatggctgatcatcttggcatccctcttggccttggctttgattcttgcagtttgcattgcagtcaacagtcgaagaaggtgtgggcagaagaaaaagctagtgatcaacagtggcaatggagctgtggaggacagaaagccaagtggactcaacggagaggccagcaagtctcaggaaatggtgcatttggtgaacaaggagtcgtcagaaactccagaccagtttatgacagctgatgagacaaggaacctgcagaatgtggacatgaagattggggtgtaacacctacaccattatcttggaaagaaacaaccgttggaaacataaccattacagggagctgggacacttaacagatgcaatgtgctactgattgtttcattgcgaatcttttttagcataaaattttctactctttttgttttttgtgttttgttctttaaagtcaggtccaatttgtaaaaacagcattgctttctgaaattagggcccaattaataatcagcaagaatttgatcgttccagttcccacttggaggcctttcatccctcgggtgtgctatggatggcttctaacaaaaactacacatatgtattcctgatcgccaacctttcccccaccagctaaggacatttcccagggttaatagggcctggtccctgggaggaaatttgaatgggtccattttgcccttccatagcctaatccctgggcattgctttccactgaggttgggggttggggtgtactagttacacatcttcaacagaccccctctagaaatttttcagatgcttctgggagacacccaaagggtgaagctatttatctgtagtaaactatttatctgtgtttttgaaatattaaaccctggatcagtcctttgatcagtataattttttaaagttactttgtcagaggcacaaaagggtttaaactgattcataataaatatctgtacttcttcgatcttca

SEQ ID NO: 18226 - DNA, 1482 bp, Artificial Sequence
  derived and/or modified sequence
atggacaagttctggtggcacgccgcctggggcctgtgcctggtgcccctgagcctggcccagatcgacctgaacatcacctgcagattcgccggcgtgttccacgtggagaagaacggcagatacagcatcagcagaaccgaggccgccgacctgtgcaaggccttcaacagcaccctgcccaccatggcccagatggagaaggccctgagcatcggcttcgagacctgcagatacggcttcatcgagggccacgtggtgatccccagaatccaccccaacagcatctgcgccgccaacaacaccggcgtgtacatcctgaccagcaacaccagccagtacgacacctactgcttcaacgccagcgccccccccgaggaggactgcaccagcgtgaccgacctgcccaacgccttcgacggccccatcaccatcaccatcgtgaacagagacggcaccagatacgtgcagaagggcgagtacagaaccaaccccgaggacatctaccccagcaaccccaccgacgacgacgtgagcagcggcagcagcagcgagagaagcagcaccagcggcggctacatcttctacaccttcagcaccgtgcaccccatccccgacgaggacagcccctggatcaccgacagcaccgacagaatccccgccaccaacatggacagcagccacagcatcaccctgcagcccaccgccaaccccaacaccggcctggtggaggacctggacagaaccggccccctgagcatgaccacccagcagagcaacagccagagcttcagcaccagccacgagggcctggaggaggacaaggaccaccccaccaccagcaccctgaccagcagcaacagaaacgacgtgaccggcggcagaagagaccccaaccacagcgagggcagcaccaccctgctggagggctacaccagccactacccccacaccaaggagagcagaaccttcatccccgtgaccagcgccaagaccggcagcttcggcgtgaccgccgtgaccgtgggcgacagcaacagcaacgtgaacagaagcctgagcggcgaccaggacaccttccaccccagcggcggcagccacaccacccacggcagcgagagcgacggccacagccacggcagccaggagggcggcgccaacaccaccagcggccccatcagaaccccccagatccccgagtggctgatcatcctggccagcctgctggccctggccctgatcctggccgtgtgcatcgccgtgaacagcagaagaagatgcggccagaagaagaagctggtgatcaacagcggcaacggcgccgtggaggacagaaagcccagcggcctgaacggcgaggccagcaagagccaggagatggtgcacctggtgaacaaggagagcagcgagacccccgaccagttcatgaccgccgacgagaccagaaacctgcagaacgtggacatgaagatcggcgtgtag

SEQ ID NO: 18227 - protein, 361 aa, Artificial Sequence
  derived and/or modified sequence
MDKFWWHAAWGLCLVPLSLAQIDLNITCRFAGVFHVEKNGRYSISRTEAADLCKAFNSTLPTMAQMEKALSIGFETCRYGFIEGHVVIPRIHPNSICAANNTGVYILTSNTSQYDTYCFNASAPPEEDCTSVTDLPNAFDGPITITIVNRDGTRYVQKGEYRTNPEDIYPSNPTDDDVSSGSSSERSSTSGGYIFYTFSTVHPIPDEDSPWITDSTDRIPATRDQDTFHPSGGSHTTHGSESDGHSHGSQEGGANTTSGPIRTPQIPEWLIILASLLALALILAVCIAVNSRRRCGQKKKLVINSGNGAVEDRKPSGLNGEASKSQEMVHLVNKESSETPDQFMTADETRNLQNVDMKIGV

SEQ ID NO: 18228 - protein, 294 aa, Artificial Sequence
  derived and/or modified sequence
  misc_feature (1)..(1): Xaa can be any naturally occurring amino acid
XDKFWWHAAWGLCLVPLSLAQIDLNITCRFAGVFHVEKNGRYSISRTEAADLCKAFNSTLPTMAQMEKALSIGFETCRYGFIEGHVVIPRIHPNSICAANNTGVYILTSNTSQYDTYCFNASAPPEEDCTSVTDLPNAFDGPITITIVNRDGTRYVQKGEYRTNPEDIYPSNPTDDDVSSGSSSERSSTSGGYIFYTFSTVHPIPDEDSPWITDSTDRIPATRDQDTFHPSGGSHTTHGSESDGHSHGSQEGGANTTSGPIRTPQIPEWLIILASLLALALILAVCIAVNSRRS

SEQ ID NO: 18229 - DNA, 1086 bp, Artificial Sequence
  derived and/or modified sequence
atggataaattttggtggcacgctgcctgggggctctgcctggtccctttgtctttggcccaaattgacctgaatattacgtgcaggtttgcgggggtgtttcacgtcgaaaaaaacggccggtatagtatcagtcggacggaggcggccgatctgtgcaaggcctttaattctacattgccgactatggcgcagatggaaaaggctctgtcgatcgggttcgagacttgtcgctacggatttatcgaaggccatgtggttatcccaaggattcacccaaactctatctgcgctgccaacaacaccggagtctacatattgactagtaatacctctcagtacgatacatactgttttaatgcaagtgctcctcccgaagaggactgcaccagtgtgacagatctgccaaacgccttcgacggacccatcacaataactatagtcaaccgggacggcacaagatatgtccagaaaggggagtacagaacgaatcccgaagacatctacccttcaaaccccactgacgacgatgtctcttccgggagttcttctgagcggtcctccacaagcgggggttacatcttttataccttttcaacagtccatcctatccccgacgaggatagcccctggatcacagactctacagaccgcatcccagctactcgtgatcaagataccttccatcccagcgggggcagtcacacaacccacggtagtgaaagtgacggccactcccatgggtcccaagagggaggcgcaaacacaacgtccggccctattcgcacaccacagatccctgagtggctcatcattctcgcatctttgctggcgcttgctctgattctggccgtctgtatcgcggtcaactctcgcagaaggtgcgggcaaaagaagaagctcgtgatcaactccggtaatggagctgtcgaagatcgaaagcctagcggtctcaatggggaagctagtaagtcacaggaaatggtccacctcgtgaacaaggaatcaagcgagacaccagaccagttcatgacggctgatgaaactcgcaacctgcagaatgtcgatatgaagattggcgtttag

SEQ ID NO: 18230 - DNA, 1086 bp, Artificial Sequence
  derived and/or modified sequence
atggacaagttctggtggcacgccgcctggggcctgtgcctggtgcccctgagcctggcccagattgacctgaacatcacctgccgctttgctggggtcttccacgtggagaagaatggccgctacagcatcagcaggacagaagctgctgacctgtgcaaggccttcaacagcaccctgcccaccatggcccagatggagaaggccctgagcatcggctttgagacctgccgctatggcttcatcgagggccacgtggtgatcccccgcatccaccccaacagcatctgtgccgccaacaacacaggagtgtacatcctgaccagcaacaccagccagtatgacacctactgcttcaatgccagcgcccccccagaggaggactgcacctctgtgacagacctgcccaatgcctttgatggccccatcaccatcaccatcgtgaacagagatggcaccaggtatgtgcagaagggggagtaccgcaccaaccctgaggacatctaccccagcaaccccacagatgatgatgtgagcagcggcagcagcagcgagaggagcagcaccagcggcggctacatcttctacaccttcagcacagtgcaccccatcccagatgaggacagcccctggatcacagacagcacagaccgcatcccagccacccgggaccaggacaccttccaccccagcggcggcagccacaccacccacggcagcgagagtgatggccacagccacggcagccaggagggcggggccaacaccaccagcggccccatccgcaccccccagatccctgagtggctgatcatcctggccagcctgctggccctggccctgatcctggccgtgtgcatcgctgtgaacagcagaagaagatgtggccagaagaagaagctggtgatcaacagcggaaatggagctgtggaggacaggaagcccagcggcctgaatggagaggccagcaagagccaggagatggtgcacctggtgaacaaggagagcagcgagaccccagaccagttcatgacagcagatgagaccaggaacctgcagaatgtggacatgaagattggagtgtag

SEQ ID NO: 18231 - DNA, 1086 bp, Artificial Sequence
  derived and/or modified sequence
atggacaagttctggtggcacgccgcctggggcctgtgcctggtgccactcagcctggctcagatcgatttgaatattacatgtagatttgccggagtcttccacgtcgaaaaaaacggacgatattctataagcagaaccgaggcggcagacttgtgtaaagcttttaattctaccttgcctaccatggcccaaatggagaaggccctttcaatcgggtttgagacctgcaggtacgggttcatagagggacatgttgtaatcccaagaatacaccccaattccatttgtgctgcgaacaatacgggcgtgtacatcttgacctctaacacttcccagtatgacacttactgcttcaacgcttctgcgccacccgaggaggactgcacttcagtcacagatctgcccaatgctttcgatgggcccattaccattacaatagtgaacagggacggaactaggtacgtgcagaagggcgaataccgaacaaacccagaagacatatatccttcaaaccccactgacgacgacgtgtccagtggttccagctctgaacgtagtagcacaagtggtggatacattttctacaccttttcaaccgtgcatccgatccctgatgaagattcaccctggattactgattccacggaccggatccctgccacccgggaccaggacacgtttcaccccagcggaggcagccacactacccatggctccgaatcggacggacatagccatggcagtcaggagggaggagctaatactacatctggcccaatcagaaccccccagattccagaatggctgatcattctggcgtcactactagcactggccctgatcctagctgtctgtatagccgtgaactcacgcagaagatgtggacagaaaaaaaagctcgtgattaactccggaaacggtgcagtcgaggaccggaagccaagcggactgaacggcgaggcctctaagtcccaggaaatggtgcacctcgtgaacaaggagagctctgaaacccccgatcagtttatgacagccgacgaaacccggaatcttcaaaatgtggatatgaagatcggtgtttag

SEQ ID NO: 18232 - DNA, 1086 bp, Artificial Sequence
  derived and/or modified sequence
atggacaaattttggtggcacgctgcctggggactgtgcttggtacctctgtcattagcacagatcgacctcaacattacttgccgattcgccggagtttttcatgttgaaaagaacggcaggtacagcatttccagaaccgaggccgctgatctgtgtaaagccttcaactcaactcttcccacgatggcccagatggaaaaggcactttctatcggatttgagacatgccgttacggctttatcgaaggacacgtggtcatcccacgcattcaccccaattctatctgtgcagccaacaatactggggtgtatatcttgacgtcaaacacctcccagtatgatacttattgtttcaatgccagcgcccctcctgaggaagattgcacgagtgtcacagatttgcctaatgcctttgatggcccaattactatcaccatagtgaacagagatggtacacggtacgtgcagaaaggtgagtacagaaccaaccctgaggacatctatccgagtaaccctactgatgacgacgtctctagtggctcctcttctgagaggagctccacatccgggggttacatcttctatacttttagcactgttcaccctattccggacgaggatagcccctggattaccgactcaaccgacagaataccagccaccagggatcaggacacttttcatcccagcggcggttcacatacaacccacggctccgagagcgacggacactcccacgggagccaggaaggaggagcgaacaccacaagtggccctatcagaactccccagatacctgagtggctcattatcttggcctcattgttagctctggccctcatacttgcagtgtgcatcgctgtgaattctcgaagaagatgcgggcagaagaagaagctggtgataaattcaggaaatggagcggtggaggatagaaagccgagcggattaaacggggaagctagtaagagtcaagaaatggtccatttagttaataaggaaagttcagaaacgccagatcagttcatgaccgccgacgaaaccagaaatctgcaaaacgtggatatgaaaattggcgtctag

SEQ ID NO: 18233 - DNA, 4589 bp, Artificial Sequence
  derived and/or modified sequence
gagaagaaagccagtgcgtctctgggcgcaggggccagtggggctcggaggcacaggcaccccgcgacactccaggttccccgacccacgtccctggcagccccgattatttacagcctcagcagagcacggggcgggggcagaggggcccgcccgggagggctgctacttcttaaaacctctgcgggctgcttagtcacagccccccttgcttgggtgtgtccttcgctcgctccctccctccgtcttaggtcactgttttcaacctcgaataaaaactgcagccaacttccgaggcagcctcattgcccagcggaccccagcctctgccaggttcggtccgccatcctcgtcccgtcctccgccggcccctgccccgcgcccagggatcctccagctcctttcgcccgcgccctccgttcgctccggacaccatggacaagttttggtggcacgcagcctggggactctgcctcgtgccgctgagcctggcgcagatcgatttgaatataacctgccgctttgcaggtgtattccacgtggagaaaaatggtcgctacagcatctctcggacggaggccgctgacctctgcaaggctttcaatagcaccttgcccacaatggcccagatggagaaagctctgagcatcggatttgagacctgcaggtatgggttcatagaagggcacgtggtgattccccggatccaccccaactccatctgtgcagcaaacaacacaggggtgtacatcctcacatccaacacctcccagtatgacacatattgcttcaatgcttcagctccacctgaagaagattgtacatcagtcacagacctgcccaatgcctttgatggaccaattaccataactattgttaaccgtgatggcacccgctatgtccagaaaggagaatacagaacgaatcctgaagacatctaccccagcaaccctactgatgatgacgtgagcagcggctcctccagtgaaaggagcagcacttcaggaggttacatcttttacaccttttctactgtacaccccatcccagacgaagacagtccctggatcaccgacagcacagacagaatccctgctaccagagaccaagacacattccaccccagtggggggtcccataccactcatggatctgaatcagatggacactcacatgggagtcaagaaggtggagcaaacacaacctctggtcctataaggacaccccaaattccagaatggctgatcatcttggcatccctcttggccttggctttgattcttgcagtttgcattgcagtcaacagtcgaagaaggtgtgggcagaagaaaaagctagtgatcaacagtggcaatggagctgtggaggacagaaagccaagtggactcaacggagaggccagcaagtctcaggaaatggtgcatttggtgaacaaggagtcgtcagaaactccagaccagtttatgacagctgatgagacaaggaacctgcagaatgtggacatgaagattggggtgtaacacctacaccattatcttggaaagaaacaaccgttggaaacataaccattacagggagctgggacacttaacagatgcaatgtgctactgattgtttcattgcgaatcttttttagcataaaattttctactctttttgttttttgtgttttgttctttaaagtcaggtccaatttgtaaaaacagcattgctttctgaaattagggcccaattaataatcagcaagaatttgatcgttccagttcccacttggaggcctttcatccctcgggtgtgctatggatggcttctaacaaaaactacacatatgtattcctgatcgccaacctttcccccaccagctaaggacatttcccagggttaatagggcctggtccctgggaggaaatttgaatgggtccattttgcccttccatagcctaatccctgggcattgctttccactgaggttgggggttggggtgtactagttacacatcttcaacagaccccctctagaaatttttcagatgcttctgggagacacccaaagggtgaagctatttatctgtagtaaactatttatctgtgtttttgaaatattaaaccctggatcagtcctttgatcagtataattttttaaagttactttgtcagaggcacaaaagggtttaaactgattcataataaatatctgtacttcttcgatcttcaccttttgtgctgtgattcttcagtttctaaaccagcactgtctgggtccctacaatgtatcaggaagagctgagaatggtaaggagactcttctaagtcttcatctcagagaccctgagttcccactcagacccactcagccaaatctcatggaagaccaaggagggcagcactgtttttgttttttgttttttgttttttttttttgacactgtccaaaggttttccatcctgtcctggaatcagagttggaagctgaggagcttcagcctcttttatggtttaatggccacctgttctctcctgtgaaaggctttgcaaagtcacattaagtttgcatgacctgttatccctggggccctatttcatagaggctggccctattagtgatttccaaaaacaatatggaagtgccttttgatgtcttacaataagagaagaagccaatggaaatgaaagagattggcaaaggggaaggatgatgccatgtagatcctgtttgacatttttatggctgtatttgtaaacttaaacacaccagtgtctgttcttgatgcagttgctatttaggatgagttaagtgcctggggagtccctcaaaaggttaaagggattcccatcattggaatcttatcaccagataggcaagtttatgaccaaacaagagagtactggctttatcctctaacctcatattttctcccacttggcaagtcctttgtggcatttattcatcagtcagggtgtccgattggtcctagaacttccaaaggctgcttgtcatagaagccattgcatctataaagcaacggctcctgttaaatggtatctcctttctgaggctcctactaaaagtcatttgttacctaaacttatgtgcttaacaggcaatgcttctcagaccacaaagcagaaagaagaagaaaagctcctgactaaatcagggctgggcttagacagagttgatctgtagaatatctttaaaggagagatgtcaactttctgcactattcccagcctctgctcctccctgtctaccctctcccctccctctctccctccacttcaccccacaatcttgaaaaacttcctttctcttctgtgaacatcattggccagatccattttcagtggtctggatttctttttattttcttttcaacttgaaagaaactggacattaggccactatgtgttgttactgccactagtgttcaagtgcctcttgttttcccagagatttcctgggtctgccagaggcccagacaggctcactcaagctctttaactgaaaagcaacaagccactccaggacaaggttcaaaatggttacaacagcctctacctgtcgccccagggagaaaggggtagtgatacaagtctcatagccagagatggttttccactccttctagatattcccaaaaagaggctgagacaggaggttattttcaattttattttggaattaaatacttttttccctttattactgttgtagtccctcacttggatatacctctgttttcacgatagaaataagggaggtctagagcttctattccttggccattgtcaacggagagctggccaagtcttcacaaacccttgcaacattgcctgaagtttatggaataagatgtattctcactcccttgatctcaagggcgtaactctggaagcacagcttgactacacgtcatttttaccaatgattttcaggtgacctgggctaagtcatttaaactgggtctttataaaagtaaaaggccaacatttaattattttgcaaagcaacctaagagctaaagatgtaatttttcttgcaattgtaaatcttttgtgtctcctgaagacttcccttaaaattagctctgagtgaaaaatcaaaagagacaaaagacatcttcgaatccatatttcaagcctggtagaattggcttttctagcagaacctttccaaaagttttatattgagattcataacaacaccaagaattgattttgtagccaacattcattcaatactgttatatcagaggagtaggagagaggaaacatttgacttatctggaaaagcaaaatgtacttaagaataagaataacatggtccattcacctttatgttatagatatgtctttgtgtaaatcatttgttttgagttttcaaagaatagcccattgttcattcttgtgctgtacaatgaccactgttattgttactttgacttttcagagcacacccttcctctggtttttgtatatttattgatggatcaataataatgaggaaagcatgatatgtatattgctgagttgaaagcacttattggaaaatattaaaaggctaacattaaaagactaaaggaaacaga

SEQ ID NO: 18234 - DNA, 1768 bp, Artificial Sequence
  derived and/or modified sequence
gcggaccccagcctctgccaggttcggtccgccatcctcgtcccgtcctccgccggcccctgccccgcgcccagggatcctccagctcctttcgcccgcgccctccgttcgctccggacaccatggacaagttttggtggcacgcagcctggggactctgcctcgtgccgctgagcctggcgcagatcgatttgaatataacctgccgctttgcaggtgtattccacgtggagaaaaatggtcgctacagcatctctcggacggaggccgctgacctctgcaaggctttcaatagcaccttgcccacaatggcccagatggagaaagctctgagcatcggatttgagacctgcagctccacctgaagaagattgtacatcagtcacagacctgcccaatgcctttgatggaccaattaccataactattgttaaccgtgatggcacccgctatgtccagaaaggagaatacagaacgaatcctgaagacatctaccccagcaaccctactgatgatgacgtgagcagcggctcctccagtgaaaggagcagcacttcaggaggttacatcttttacaccttttctactgtacaccccatcccagacgaagacagtccctggatcaccgacagcacagacagaatccctgctaccagagaccaagacacattccaccccagtggggggtcccataccactcatggatctgaatcagatggacactcacatgggagtcaagaaggtggagcaaacacaacctctggtcctataaggacaccccaaattccagaatggctgatcatcttggcatccctcttggccttggctttgattcttgcagtttgcattgcagtcaacagtcgaagaaggtgtgggcagaagaaaaagctagtgatcaacagtggcaatggagctgtggaggacagaaagccaagtggactcaacggagaggccagcaagtctcaggaaatggtgcatttggtgaacaaggagtcgtcagaaactccagaccagtttatgacagctgatgagacaaggaacctgcagaatgtggacatgaagattggggtgtaacacctacaccattatcttggaaagaaacaaccgttggaaacataaccattacagggagctgggacacttaacagatgcaatgtgctactgattgtttcattgcgaatcttttttagcataaaattttctactctttttgttttttgtgttttgttctttaaagtcaggtccaatttgtaaaaacagcattgctttctgaaattagggcccaattaataatcagcaagaatttgatcgttccagttcccacttggaggcctttcatccctcgggtgtgctatggatggcttctaacaaaaactacacatatgtattcctgatcgccaacctttcccccaccagctaaggacatttcccagggttaatagggcctggtccctgggaggaaatttgaatgggtccattttgcccttccatagcctaatccctgggcattgctttccactgaggttgggggttggggtgtactagttacacatcttcaacagaccccctctagaaatttttcagatgcttctgggagacacccaaagggtgaagctatttatctgtagtaaactatttatctgtgtttttgaaatattaaaccctggatcagtcctttgatcagtataattttttaaagttactttgtcagaggcacaaaagggtttaaactgattcataataaatatctgtacttcttcgatcttca

SEQ ID NO: 18235 - DNA, 1086 bp, Artificial Sequence
  derived and/or modified sequence
atggacaagttctggtggcacgccgcctggggcctgtgcctggtgcccctgagcctggcccagatcgacctgaacatcacctgcagattcgccggcgtgttccacgtggagaagaacggcagatacagcatcagcagaaccgaggccgccgacctgtgcaaggccttcaacagcaccctgcccaccatggcccagatggagaaggccctgagcatcggcttcgagacctgcagatacggcttcatcgagggccacgtggtgatccccagaatccaccccaacagcatctgcgccgccaacaacaccggcgtgtacatcctgaccagcaacaccagccagtacgacacctactgcttcaacgccagcgccccccccgaggaggactgcaccagcgtgaccgacctgcccaacgccttcgacggccccatcaccatcaccatcgtgaacagagacggcaccagatacgtgcagaagggcgagtacagaaccaaccccgaggacatctaccccagcaaccccaccgacgacgacgtgagcagcggcagcagcagcgagagaagcagcaccagcggcggctacatcttctacaccttcagcaccgtgcaccccatccccgacgaggacagcccctggatcaccgacagcaccgacagaatccccgccaccagagaccaggacaccttccaccccagcggcggcagccacaccacccacggcagcgagagcgacggccacagccacggcagccaggagggcggcgccaacaccaccagcggccccatcagaaccccccagatccccgagtggctgatcatcctggccagcctgctggccctggccctgatcctggccgtgtgcatcgccgtgaacagcagaagaagatgcggccagaagaagaagctggtgatcaacagcggcaacggcgccgtggaggacagaaagcccagcggcctgaacggcgaggccagcaagagccaggagatggtgcacctggtgaacaaggagagcagcgagacccccgaccagttcatgaccgccgacgagaccagaaacctgcagaacgtggacatgaagatcggcgtgtag

SEQ ID NO: 18236 - protein, 139 aa, Artificial Sequence
  derived and/or modified sequence
MDKFWWHAAWGLCLVPLSLAQIDLNITCRFAGVFHVEKNGRYSISRTEAADLCKAFNSTLPTMAQMEKALSIGFETCSLHCSQQSKKVWAEEKASDQQWQWSCGGQKAKWTQRRGQQVSGNGAFGEQGVVRNSRPVYDS

SEQ ID NO: 18237 - DNA, 420 bp, Artificial Sequence
  derived and/or modified sequence
atggacaagttctggtggcatgcagcttggggactgtgcctagtgcccctatctctggcccagatcgatctgaacatcacctgccggttcgcgggagtgttccacgtcgagaagaacggaagatattcaatctcaagaacagaagccgccgatctgtgtaaggcattcaatagtaccttaccaacgatggcgcagatggaaaaggcactttccatcggctttgagacatgctctttgcactgtagtcagcagtccaagaaagtatgggcggaagagaaagcgagcgatcaacagtggcaatggtcttgcggtggtcagaaagcaaagtggacacaaaggcgggggcagcaggtcagcggcaatggcgctttcggagaacagggggtggtgaggaacagtcgcccagtctatgatagctag

SEQ ID NO: 18238 - DNA, 243 bp, Artificial Sequence
  derived and/or modified sequence
atggacaagttctggtggcatgctgcgtggggactgtgcttagtgcccctttcactggcacagatcgacctgaacatcacatgccggtttgctggcgtcttccacgttgaaaaaaacgggagatactcaatcagcaggaccgaggccgccgacttgtgtaaggcctttaacagtacactccccaccatggcacagatggagaaggctctgtccatcggctttgagacatgctcatccacttag

SEQ ID NO: 18239 - DNA, 237 bp, Artificial Sequence
  derived and/or modified sequence
atggataaattttggtggcatgcggcctggggcctgtgccttgtccccctctcgcttgcacaaattgatcttaatattacctgcagattcgcgggggtcttccatgtcgagaaaaacggtcgatactctatatccaggactgaggctgctgacttatgtaaagctttcaactctaccctgcctacgatggctcagatggaaaaggctttgtccattggtttcgagacatgccggtag

SEQ ID NO: 18240 - DNA, 420 bp, Artificial Sequence
  derived and/or modified sequence
atggacaagttctggtggcacgccgcctggggcctgtgcctggtgcccctgagcctggcccagattgacctgaacatcacctgccgctttgctggggtcttccacgtggagaagaatggccgctacagcatcagcaggacagaagctgctgacctgtgcaaggccttcaacagcaccctgcccaccatggcccagatggagaaggccctgagcatcggctttgagacctgcagcctgcactgcagccagcagagcaagaaggtgtgggccgaggagaaggccagtgaccagcagtggcagtggagctgtggcggccagaaggccaagtggacccagaggcggggccagcaggtgtctggaaatggagccttcggggagcagggcgtggtgaggaacagcaggcctgtgtatgacagctag

SEQ ID NO: 18241 - DNA, 243 bp, Artificial Sequence
  derived and/or modified sequence
atggacaagttctggtggcacgccgcctggggcctgtgcctggtgcccctgagcctggcccagattgacctgaacatcacctgccgctttgctggggtcttccacgtggagaagaatggccgctacagcatcagcaggacagaagctgctgacctgtgcaaggccttcaacagcaccctgcccaccatggcccagatggagaaggccctgagcatcggctttgagacctgcagcagcacctag

SEQ ID NO: 18242 - DNA, 237 bp, Artificial Sequence
  derived and/or modified sequence
atggacaagttctggtggcacgccgcctggggcctgtgcctggtgcccctgagcctggcccagattgacctgaacatcacctgccgctttgctggggtcttccacgtggagaagaatggccgctacagcatcagcaggacagaagctgctgacctgtgcaaggccttcaacagcaccctgcccaccatggcccagatggagaaggccctgagcatcggctttgagacctgcaggtag

SEQ ID NO: 18243 - DNA, 420 bp, Artificial Sequence
  derived and/or modified sequence
atggacaagttctggtggcacgccgcctggggcctgtgcctggtgcccctttctctcgcccagatcgacctcaatattacctgcaggttcgcaggagtgttccacgtcgagaagaacggccgatatagtatctctagaacagaggcagctgatctgtgtaaagcctttaattcaactttgccaacgatggctcagatggaaaaggccttgtctatcggcttcgagacgtgcagcctgcactgtagccaacagtcaaaaaaagtgtgggcagaggagaaagcttctgaccagcagtggcaatggtcatgcggaggccagaaggctaagtggacacagaggagaggacaacaggtatccggtaatggcgccttcggggagcaaggcgtcgtgaggaactctcggcctgtgtacgactcatag

SEQ ID NO: 18244 - DNA, 243 bp, Artificial Sequence
  derived and/or modified sequence
atggacaagttctggtggcacgccgcctggggcctgtgcctggtgcccttgagccttgcacagatcgatctcaacattacatgcagatttgccggagtttttcacgtcgaaaaaaatggcaggtattctatcagtcggacagaagcagcagacctctgcaaggcttttaattccactctgcctaccatggctcagatggagaaggctctgagcatcgggttcgagacctgttcatctacttag

SEQ ID NO: 18245 - DNA, 237 bp, Artificial Sequence
  derived and/or modified sequence
atggacaagttctggtggcacgccgcctggggcctgtgcctggtgcccttgtcgctggcgcaaatcgacctcaacattacctgcaggttcgccggcgtttttcacgttgagaagaatgggagatatagtatttcaagaactgaggcagccgacttatgcaaagcgttcaactctactttgccaacaatggcccagatggagaaggccttgtcaattggattcgagacatgccgctag

SEQ ID NO: 18246 - DNA, 420 bp, Artificial Sequence
  derived and/or modified sequence
atggacaagttttggtggcatgcggcatgggggctctgtcttgtgccactgagtctcgcccagatcgacctgaatatcacctgcagatttgcgggagttttccacgtcgagaaaaacggcaggtattcaataagcaggaccgaagccgctgatctctgcaaagcgtttaactccactctgccaactatggcccagatggagaaagccttgagcattggattcgagacatgttcactgcactgcagtcagcaatcaaagaaagtgtgggctgaggaaaaggctagcgatcagcaatggcagtggagttgcggtgggcaaaaggctaagtggacgcaacggcgaggccagcaggtatccggcaacggagcattcggggagcaaggcgtcgtgagaaactctcgtccagtttacgactcctag

SEQ ID NO: 18247 - DNA, 243 bp, Artificial Sequence
  derived and/or modified sequence
atggacaagttctggtggcatgcagcatggggcctatgcctagtacccctgtctttagctcaaattgatctaaatattacctgccgcttcgctggagtgttccatgtagaaaaaaatggacggtactccattagtcggacagaggccgctgacttgtgcaaagcttttaatagcaccctccctacaatggcccagatggagaaagctttaagcattggctttgagacgtgctcttccacttag

SEQ ID NO: 18248 - DNA, 237 bp, Artificial Sequence
  derived and/or modified sequence
atggacaagttctggtggcatgctgcctggggcttgtgtctggttccactgagtctcgcccaaatcgacttgaacatcacatgtaggtttgcaggagtctttcatgtggaaaagaacgggagatactccatatctcgtaccgaagccgcagacctctgcaaggcatttaactccacactgcctaccatggctcaaatggaaaaagccctaagcattggattcgaaacgtgcagatag

SEQ ID NO: 18249 - DNA, 484 bp, Artificial Sequence
  derived and/or modified sequence
ccgttcgctccggacaccatggacaagttttggtggcacgcagcctggggactctgcctcgtgccgctgagcctggcgcagatcgatttgaatataacctgccgctttgcaggtgtattccacgtggagaaaaatggtcgctacagcatctctcggacggaggccgctgacctctgcaaggctttcaatagcaccttgcccacaatggcccagatggagaaagctctgagcatcggatttgagacctgcagtttgcattgcagtcaacagtcgaagaaggtgtgggcagaagaaaaagctagtgatcaacagtggcaatggagctgtggaggacagaaagccaagtggactcaacggagaggccagcaagtctcaggaaatggtgcatttggtgaacaaggagtcgtcagaaactccagaccagtttatgacagctgatgagacaaggaacctgcagaatgtggacatgaagattggggtgtaa

SEQ ID NO: 18250 - DNA, 1052 bp, Artificial Sequence
  derived and/or modified sequence
agtgcgtctctgggcgcaggggccagtggggctcggaggcacaggcaccccgcgacactccaggttccccgacccacgtccctggcagccccgattatttacagcctcagcagagcacggggcgggggcagaggggcccgcccgggagggctgctacttcttaaaacctctgcgggctgcttagtcacagccccccttgcttgggtgtgtccttcgctcgctccctccctccgtcttaggtcactgttttcaacctcgaataaaaactgcagccaacttccgaggcagcctcattgcccagcggaccccagcctctgccaggttcggtccgccatcctcgtcccgtcctccgccggcccctgccccgcgcccagggatcctccagctcctttcgcccgcgccctccgttcgctccggacaccatggacaagttttggtggcacgcagcctggggactctgcctcgtgccgctgagcctggcgcagatcgatttgaatataacctgccgctttgcaggtgtattccacgtggagaaaaatggtcgctacagcatctctcggacggaggccgctgacctctgcaaggctttcaatagcaccttgcccacaatggcccagatggagaaagctctgagcatcggatttgagacctgcaggtaagagaccagcacccgaccactggggaaagctggcggcctgggaccaggcagctgggcttagaactggaaggctcctttcccacagctgaatggattattgcctaaggagtcaaccccacgtattaatttggccaagtcaatctgcaacctgtatgacaactggagtttaaagtcagctaaagacacctttgtgaatcatagagcgggaacccagaggaagccattaggggtcctctcggctggaatcctcttgtctaacctgcttccacagagctctcctggctttgaagaagctgcagtatcattgtcagaaccacaagaaaacataaaccaaataacagtgtttgaaataaatatgtggctgttagagtcttggccctgcagacttggatca

SEQ ID NO: 18251 - DNA, 420 bp, Artificial Sequence
  derived and/or modified sequence
atggacaagttctggtggcacgccgcctggggcctgtgcctggtgcccctgagcctggcccagatcgacctgaacatcacctgcagattcgccggcgtgttccacgtggagaagaacggcagatacagcatcagcagaaccgaggccgccgacctgtgcaaggccttcaacagcaccctgcccaccatggcccagatggagaaggccctgagcatcggcttcgagacctgcagcctgcactgcagccagcagagcaagaaggtgtgggccgaggagaaggccagcgaccagcagtggcagtggagctgcggcggccagaaggccaagtggacccagagaagaggccagcaggtgagcggcaacggcgccttcggcgagcagggcgtggtgagaaacagcagacccgtgtacgacagctag

SEQ ID NO: 18252 - DNA, 243 bp, Artificial Sequence
  derived and/or modified sequence
atggacaagttctggtggcacgccgcctggggcctgtgcctggtgcccctgagcctggcccagatcgacctgaacatcacctgcagattcgccggcgtgttccacgtggagaagaacggcagatacagcatcagcagaaccgaggccgccgacctgtgcaaggccttcaacagcaccctgcccaccatggcccagatggagaaggccctgagcatcggcttcgagacctgcagcagcacctag

SEQ ID NO: 18253 - DNA, 237 bp, Artificial Sequence
  derived and/or modified sequence
atggacaagttctggtggcacgccgcctggggcctgtgcctggtgcccctgagcctggcccagatcgacctgaacatcacctgcagattcgccggcgtgttccacgtggagaagaacggcagatacagcatcagcagaaccgaggccgccgacctgtgcaaggccttcaacagcaccctgcccaccatggcccagatggagaaggccctgagcatcggcttcgagacctgcagatag

SEQ ID NO: 18254 - DNA, 438 bp, Artificial Sequence
  derived and/or modified sequence
atgttgagcgtgcagcccgataccaagccaaaagggtgtgccgggtgcaatcgcaagatcaaggatcgctatctgctgaaggcgctcgacaagtactggcatgaggactgtctgaagtgtgcttgctgcgattgtagattaggtgaagtcgggagcaccctctatacgaaagccaacctaatcttatgcaggagagactatctgcggctgttcggggtcactggcaactgcgctgcttgttctaagctcatcccggccttcgagatggttatgagagccaaagataacgtttatcaccttgattgcttcgcatgccagctgtgtaaccagcgattctgcgttggggacaagttcttcctgaagaacaatatgattctctgccagactgactacgaagaggggctgatgaaagagggctatgccccgcaggttaggtag

SEQ ID NO: 18255 - DNA, 438 bp, Artificial Sequence
  derived and/or modified sequence
atgctgtcggtgcagcctgacaccaaacccaagggctgcgccggctgcaatcgcaagattaaggatcgctacctgctcaaggctctggataagtactggcatgaggactgtctgaaatgcgcatgctgcgattgccggctgggggaggtgggctccaccctgtataccaaagctaatctcatcttatgccggagagattacttgagactgttcggcgtcacaggcaactgcgccgcatgctcaaagctaatacccgcgttcgaaatggtcatgcgcgctaaggataatgtctaccatctggattgtttcgcatgccagctgtgcaaccagagattctgcgtcggagacaagttcttcctgaagaacaatatgattctatgccagaccgactatgaagaaggtttgatgaaagaagggtacgccccacaggtacgttag

SEQ ID NO: 18256 - DNA, 438 bp, Artificial Sequence
  derived and/or modified sequence
atgctcagcgttcagccggacactaagccgaaaggctgtgctggctgcaatcgtaagataaaagaccgctacctactcaaggccttggataaatattggcacgaagactgccttaagtgtgcgtgctgcgattgcaggctgggtgaggtcgggtcaacactgtataccaaagccaatctgatcctctgcagaagagactatctgcgcctgttcggagtgactggaaattgcgctgcctgttctaagctcatacctgccttcgagatggtgatgagggccaaagacaatgtatatcatctggattgcttcgcctgccagctgtgtaatcagaggttttgcgtgggcgacaagttcttcctgaaaaacaacatgatcctgtgccagaccgactatgaggaggggctaatgaaggaaggatatgccccccaagtaagatag

SEQ ID NO: 18257 - DNA, 438 bp, Artificial Sequence
  derived and/or modified sequence
atgttatccgtgcagcctgacaccaagcccaagggctgcgctggctgcaaccgtaagattaaggatcgttatctgttaaaagctctggataagtattggcacgaggattgcctgaaatgtgcctgttgcgattgcaggctgggtgaggtaggaagtaccttatatactaaagctaacctaattctgtgcagaagggactatctgcgcctgttcggtgtgactggcaactgcgccgcgtgtagtaagctgataccggcctttgagatggtgatgagggccaaggacaacgtgtatcatcttgattgctttgcttgccagctgtgtaaccaacgcttctgcgtaggggacaagttcttcctgaagaacaatatgatcctctgtcagactgactatgaggaggggctgatgaaggaaggttacgccccgcaggtgcggtag

SEQ ID NO: 18258 - DNA, 438 bp, Artificial Sequence
  derived and/or modified sequence
atgttatccgtccagcccgacacgaaacccaaagggtgtgcaggttgcaaccgcaaaataaaggaccggtatctcctgaaggccttggacaaatattggcacgaagattgtctgaagtgcgcttgctgtgattgtcgcttaggagaggtcggatcaacactgtacactaaggccaatttaatattgtgtcggagggattacctgcggctgttcggcgtcacagggaattgcgcagcctgctctaaactaatacccgcgtttgaaatggttatgcgagccaaggacaatgtgtatcatctcgactgctttgcctgccaactgtgtaaccagagattctgtgtaggggataaattcttcttgaaaaacaatatgatactgtgtcagacggattacgaggaggggctgatgaaagagggctacgcaccacaggtaaggtag

SEQ ID NO: 18259 - DNA, 438 bp, Artificial Sequence
  derived and/or modified sequence
atgttgtctgtgcagccggacactaaacccaagggatgcgcaggttgtaatagaaagatcaaagaccgctatctgctgaaggcattggataagtactggcacgaggactgcctgaaatgcgcatgctgcgattgtagacttggcgaggtgggttcgaccctctataccaaagccaatctgattctgtgcagacgcgactaccttcggctcttcggggtgacaggtaactgcgccgcttgcagtaaactgatccctgcatttgagatggtgatgcgcgcaaaggataacgtgtaccatctcgattgcttcgcctgccagctgtgcaaccagcggttttgcgtgggcgacaaatttttcctgaaaaacaacatgattctgtgccagactgactacgaggaaggactgatgaaggaggggtacgctccccaggtcaggtag

SEQ ID NO: 18260 - DNA, 438 bp, Artificial Sequence
  derived and/or modified sequence
atgctctccgtccagcctgacaccaagccgaaggggtgcgctggctgcaatcgcaaaatcaaagacagatatctgctcaaggcactcgataagtattggcacgaggattgtctgaagtgtgcatgctgcgattgccgcctgggagaagtcggatctaccctgtatacaaaagcaaacttgatcttatgccgtagggattatttgcgtctgttcggggtcaccggcaattgtgcggcatgctcgaaactgattcccgcatttgagatggtgatgcgcgccaaggacaacgtttatcatctcgactgcttcgcctgccaactgtgcaaccagcgcttttgcgtaggcgataagtttttcttgaagaacaatatgatcctctgtcagactgattatgaagagggactgatgaaagagggctatgctcctcaggtgcgttag

SEQ ID NO: 18261 - DNA, 357 bp, Artificial Sequence
  derived and/or modified sequence
atgctctccgtccagcctgatactaagcccaaagggtgcgctggatgcaatcgcaagatcaaggacaggtatctgttgaaggcgttggacaaatactggcacgaggactgccttaaatgcgcctgctgtgactgcaggctaggggaggtgggcagcacgttgtataccaaagccaacctgattctgtgcaggagggattacctgagactcttcggcgtgacaggaaactgcgcagcctgctccaagctgatccctgccttcgaaatggttatgagagccaaggacaacgtttatcacttggactgctttgcatgccagttgtgtaaccagcgcttctgcgtgggtgataagttttag

SEQ ID NO: 18262 - DNA, 177 bp, Artificial Sequence
  derived and/or modified sequence
atgctttcagtgcagcccgataccaagccaaaggggtgtgccgggtgtaatcgaaaaatcaaagatcgctacctacttaaagctctggataaatattggcatgaagactgcttgaagtgtgcatgttgtgactgtagactcggggaggtcggctcaacactttatactaaagcttag

SEQ ID NO: 18263 - DNA, 294 bp, Artificial Sequence
  derived and/or modified sequence
atgctgtctgttcagcctgacaccaagccaaagggttgtgctggctgcaacaggaaaattaaagaccgctatctcctgaaggctctggataaatattggcatgaagactgcctgaaatgtgcatgctgtgactgtcgccttggagaggtgggatccactctgtatacgaaggccaatctgattctctgccgccgtgactacctgcgcctgtttggagtgaccggcaattgtgcagcgtgcagtaagctgattccagcattcgaaatggtgatgcgtgcaaaggacaatgtctag

SEQ ID NO: 18264 - DNA, 357 bp, Artificial Sequence
  derived and/or modified sequence
atgttgagcgttcagccagatacaaagcctaagggttgcgcaggttgtaaccgcaagatcaaagaccgctatctcctgaaggccctggataagtactggcacgaagattgcctgaaatgcgcctgctgtgactgtcgccttggtgaggtaggttcaaccttatataccaaagcgaacctgattctgtgtaggagggactatctaagattatttggagtgacaggcaactgcgcggcctgctccaaactcatcccggcctttgaaatggttatgagggcgaaagataacgtctatcacttagattgtttcgcgtgtcagctttgtaatcagcgcttttgcgttggagacaaattctag

SEQ ID NO: 18265 - DNA, 255 bp, Artificial Sequence
  derived and/or modified sequence
atgctgagtgttcagcctgacaccaaacccaaaggatgcgcaggctgtaaccgcaagattaaagatcgctatctgctcaaggctctggataaatactggcacgaggactgcctaaagtgcgcatgttgcgattgccgcctgggtgaggttggcagtactctgtatacaaaagccaacctgattctttgtaggcgcgattaccttcgcctctttggggttaccgggaattgcgcggcctgttcaaagctgatctag

SEQ ID NO: 18266 - DNA, 438 bp, Artificial Sequence
  derived and/or modified sequence
atgctgtcagtgcagcccgatacaaaacccaaggggtgcgccggctgtaacaggaaaataaaagaccggtacctgctgaaggccctcgataaatactggcatgaagactgcctgaagtgcgcgtgttgcgactgccggctcggggaagtggggtccacactttacaccaaggccaatttaattttatgcaggcgggattacctgcgtctctttggtgtgactggtaattgtgccgcttgctcaaagttgatcccagcatttgagatggttatgcgcgcgaaagacaatgtatatcacctggactgtttcgcttgtcaactgtgcaaccaaaggttttgtgtcggggacaagtttttcttgaaaaataatatgattctgtgtcagactgactatgaagaaggtctgatgaaggagggatatgctccacaggtgcgctag

SEQ ID NO: 18267 - DNA, 438 bp, Artificial Sequence
  derived and/or modified sequence
atgctctcagtgcaacctgacacaaagcccaaaggttgtgccggatgtaacagaaaaatcaaggacagatatctcttgaaagccttagacaagtattggcacgaggattgcctaaaatgtgcatgctgcgactgtcgattaggggaggtgggctctacactttacactaaagccaacctgatcctttgtcgtagagactacctgcggttgttcggcgttaccgggaactgtgccgcatgctctaaattgattccagcctttgagatggtaatgagggctaaagataacgtctatcacctagactgttttgcatgtcagctttgcaatcaaagattctgtgtgggagataagttctttctcaaaaacaacatgattctgtgtcagactgactacgaagagggcctgatgaaggaaggatacgctccccaggtccgctag

SEQ ID NO: 18268 - DNA, 378 bp, Artificial Sequence
  derived and/or modified sequence
atgctctccgtccagcctgacactaaacccaaaggatgcgccgggtgtaatcgcaagattaaagatcggtacctgcttaaggcacttgacaaatattggcatgaggattgcctcaaatgcgcatgctgcgattgtcgctgggagagactgtttggcgtgaccggcaattgcgcggcctgtagcaagctgattcccgcttttgagatggtgatgagggccaaagacaatgtgtatcatctggattgttttgcgtgccagctctgtaaccaaagattctgcgtgggcgacaaatttttcctcaaaaacaatatgatcctttgccagaccgactatgaggaggggctcatgaaggaagggtacgccccacaagtaagatag

SEQ ID NO: 18269 - DNA, 267 bp, Artificial Sequence
  derived and/or modified sequence
atgctgtcagtacaaccagacactaaacccaaagggtgtgccggatgtaatcgcaagatcaaggaccgctatctcctgaaggcgctggacaaatattggcacgaagactgcttaaaatgcgcgtgctgtgactgtcgcttgggagaggtgggctcaactctttacacgaaggccaatctgattctatgccggagagactaccttcgactctttggcgtaaccggaaactgtgctgcctgctcaaaactcatccccgcatttgagtag

SEQ ID NO: 18270 - DNA, 333 bp, Artificial Sequence
  derived and/or modified sequence
atgctgtccgttcagccggacaccaaacccaaggggtgtgctgggtgcaatcggaagattaaggatcgctacctgctgaaagcattggacaagtattggcatgaggattgtctgaaatgtgcttgctgcgactgccggttgggcgaagtgggtagcaccctatataccaaagccaatctgattctttgtcgccgggattatctcagactgttcggggtcaccggaaattgcgccgcctgttccaagcttattccagcgtttgagatggtgatgagggcaaaggacaacgtgtaccacctagactgcttcgcctgtcagctgtgcaaccagtag

SEQ ID NO: 18271 - DNA, 357 bp, Artificial Sequence
  derived and/or modified sequence
atgctgtcggtgcagccagatacaaagcctaaaggctgcgctggctgcaatcggaagattaaagatcgctatctcctgaaggctttagataaatactggcacgaggactgcctgaagtgcgcctgttgtgactgccgcctcggtgaggtgggatccaccttatacactaaagctaacctgatcctgtgccgtagggattacctaaggctgttcggagtgacaggcaattgtgcggcctgctctaaactcattcccgcatttgaaatggtaatgcgggccaaagacaatgtgtaccatcttgactgctttgcatgccagctctgtaaccagagattttgtgtcggcgataaattctag

SEQ ID NO: 18272 - DNA, 438 bp, Artificial Sequence
  derived and/or modified sequence
atgctgtctgtgcagcctgacaccaagcccaagggctgtgccggctgcaacaggaagatcaaggaccgctacctgctgaaggccctggacaagtactggcatgaggactgcctgaagtgtgcctgctgtgactgccgcctgggggaggtgggcagcaccctgtacaccaaggccaacctgatcctgtgccggcgggactacctgcggctgtttggagtgacaggcaactgtgccgcctgcagcaagctgatcccagcctttgagatggtgatgagggccaaggacaacgtgtaccacctggactgctttgcctgccagctgtgcaaccagcgcttctgtgtgggggacaagttcttcctgaagaacaacatgatcctgtgccagacagattatgaggagggcctgatgaaggagggctacgccccccaggtgaggtag

SEQ ID NO: 18273 - DNA, 357 bp, Artificial Sequence
  derived and/or modified sequence
atgctgtctgtgcagcctgacaccaagcccaagggctgtgccggctgcaacaggaagatcaaggaccgctacctgctgaaggccctggacaagtactggcatgaggactgcctgaagtgtgcctgctgtgactgccgcctgggggaggtgggcagcaccctgtacaccaaggccaacctgatcctgtgccggcgggactacctgcggctgtttggagtgacaggcaactgtgccgcctgcagcaagctgatcccagcctttgagatggtgatgagggccaaggacaacgtgtaccacctggactgctttgcctgccagctgtgcaaccagcgcttctgtgtgggggacaagttctag

SEQ ID NO: 18274 - DNA, 177 bp, Artificial Sequence
  derived and/or modified sequence
atgctgtctgtgcagcctgacaccaagcccaagggctgtgccggctgcaacaggaagatcaaggaccgctacctgctgaaggccctggacaagtactggcatgaggactgcctgaagtgtgcctgctgtgactgccgcctgggggaggtgggcagcaccctgtacaccaaggcctag

SEQ ID NO: 18275 - DNA, 294 bp, Artificial Sequence
  derived and/or modified sequence
atgctgtctgtgcagcctgacaccaagcccaagggctgtgccggctgcaacaggaagatcaaggaccgctacctgctgaaggccctggacaagtactggcatgaggactgcctgaagtgtgcctgctgtgactgccgcctgggggaggtgggcagcaccctgtacaccaaggccaacctgatcctgtgccggcgggactacctgcggctgtttggagtgacaggcaactgtgccgcctgcagcaagctgatcccagcctttgagatggtgatgagggccaaggacaacgtgtag

SEQ ID NO: 18276 - DNA, 255 bp, Artificial Sequence
  derived and/or modified sequence
atgctgtctgtgcagcctgacaccaagcccaagggctgtgccggctgcaacaggaagatcaaggaccgctacctgctgaaggccctggacaagtactggcatgaggactgcctgaagtgtgcctgctgtgactgccgcctgggggaggtgggcagcaccctgtacaccaaggccaacctgatcctgtgccggcgggactacctgcggctgtttggagtgacaggcaactgtgccgcctgcagcaagctgatctag

SEQ ID NO: 18277 - DNA, 378 bp, Artificial Sequence
  derived and/or modified sequence
atgctgtctgtgcagcctgacaccaagcccaagggctgtgccggctgcaacaggaagatcaaggaccgctacctgctgaaggccctggacaagtactggcatgaggactgcctgaagtgtgcctgctgtgactgccgctgggagcggctgtttggagtgacaggcaactgtgccgcctgcagcaagctgatcccagcctttgagatggtgatgagggccaaggacaacgtgtaccacctggactgctttgcctgccagctgtgcaaccagcgcttctgtgtgggggacaagttcttcctgaagaacaacatgatcctgtgccagacagattatgaggagggcctgatgaaggagggctacgccccccaggtgaggtag

SEQ ID NO: 18278 - DNA, 267 bp, Artificial Sequence
  derived and/or modified sequence
atgctgtctgtgcagcctgacaccaagcccaagggctgtgccggctgcaacaggaagatcaaggaccgctacctgctgaaggccctggacaagtactggcatgaggactgcctgaagtgtgcctgctgtgactgccgcctgggggaggtgggcagcaccctgtacaccaaggccaacctgatcctgtgccggcgggactacctgcggctgtttggagtgacaggcaactgtgccgcctgcagcaagctgatcccagcctttgaatag

SEQ ID NO: 18279 - DNA, 333 bp, Artificial Sequence
  derived and/or modified sequence
atgctgtctgtgcagcctgacaccaagcccaagggctgtgccggctgcaacaggaagatcaaggaccgctacctgctgaaggccctggacaagtactggcatgaggactgcctgaagtgtgcctgctgtgactgccgcctgggggaggtgggcagcaccctgtacaccaaggccaacctgatcctgtgccggcgggactacctgcggctgtttggagtgacaggcaactgtgccgcctgcagcaagctgatcccagcctttgagatggtgatgagggccaaggacaacgtgtaccacctggactgctttgcctgccagctgtgcaaccagtag

SEQ ID NO: 18280 - DNA, 438 bp, Artificial Sequence
  derived and/or modified sequence
atgctgagcgtgcagcccgacaccaagcccaagggctgcgccggctgcaaccgcaagataaaggacagatacctattaaaggccctcgacaaatactggcacgaggattgtttaaagtgcgcctgttgtgattgccgcctgggtgaagtgggcagcaccttgtatacaaaagctaacctgatcttgtgtagacgggattacctgcggctatttggagtcaccggtaactgcgctgcttgtagcaagctcattccggcctttgaaatggttatgagagccaaggacaatgtataccatctcgactgtttcgcatgtcaactgtgtaaccagaggttttgcgtgggcgacaagtttttcctgaaaaataacatgatcctgtgccagaccgactacgaggagggtctgatgaaggagggttatgccccacaggttagatag

SEQ ID NO: 18281 - DNA, 438 bp, Artificial Sequence
  derived and/or modified sequence
atgctgagcgtgcagcccgacaccaagcccaagggctgcgccggctgtaaccgcaagattaaagatcggtatctgctgaaggctcttgataagtattggcacgaagactgtctgaagtgcgcgtgctgcgactgcagattgggtgaggtggggtccacgctgtacaccaaggctaacctaatattatgtcggcgtgattacttgcggctgttcggggtgacaggtaattgtgctgcctgttctaagttaatccccgcgttcgagatggtaatgagggctaaggataacgtgtaccatctggattgcttcgcttgccaattgtgcaatcaacgcttttgcgtcggagacaaattcttcctgaaaaataacatgattctgtgccagacagattatgaagagggcctgatgaaggagggatacgcacctcaggtgaggtag

SEQ ID NO: 18282 - DNA, 438 bp, Artificial Sequence
  derived and/or modified sequence
atgctgagcgtgcagcccgacaccaagcccaagggctgcgccggctgcaaccgtaaaatcaaggatcgctatctcttgaaggccctggataaatactggcatgaggactgccttaagtgtgcatgctgtgactgccgactaggtgaagtgggctctacactgtatactaaggccaacctaatcctgtgtcgcagggattatctgcggctctttggcgtgacagggaattgcgccgcctgctctaagttgatccctgcatttgagatggtaatgagggccaaagacaacgtataccacctggattgtttcgcctgccagctgtgtaatcagcgcttctgtgtaggtgacaaattcttcctcaagaataacatgatactttgccagaccgattatgaagaaggtctcatgaaggaggggtatgctcctcaggtgcggtag

SEQ ID NO: 18283 - DNA, 438 bp, Artificial Sequence
  derived and/or modified sequence
atgctgagcgtgcagcccgacaccaagcccaagggctgcgccggctgcaaccgcaagataaaagaccgctacctgcttaaggccctcgataagtactggcacgaagactgcctcaagtgcgcttgctgcgattgtaggcttggagaggtcggctctaccctgtataccaaggccaaccttatcctttgtcgccgcgactatcttaggttattcggcgtcaccgggaattgcgcagcctgctcaaaacttatccccgcttttgagatggtgatgagagccaaggataatgtgtatcaccttgactgcttcgcctgccagttgtgtaaccagcggttttgcgtgggggataaatttttcctcaagaacaatatgatcctgtgccagactgactacgaggagggccttatgaaagagggctacgcaccccaagtgcgttag

SEQ ID NO: 18284 - DNA, 438 bp, Artificial Sequence
  derived and/or modified sequence
atgctgagcgtgcagcccgacaccaagcccaagggctgcgccggctgtaacaggaagattaaagatcggtatttactaaaagcattagataaatactggcatgaagattgtttgaagtgcgcctgctgtgattgtcgactaggcgaagtgggatcaacgttgtataccaaagcgaatctcatcctctgtaggcgcgattacttgcggctattcggagtaactgggaactgcgccgcatgcagtaaactgattccagcttttgaaatggtgatgcgggccaaggacaatgtataccacctggactgttttgcgtgtcaactctgtaaccagagattctgcgttggggataagtttttcctgaaaaataatatgatactctgccagaccgattatgaggaggggctcatgaaggagggttatgccccccaggtgcgctag

SEQ ID NO: 18285 - DNA, 438 bp, Artificial Sequence
  derived and/or modified sequence
atgctgagcgtgcagcccgacaccaagcccaagggctgcgccggctgcaaccgcaagattaaggatcggtatctcctgaaagccctcgataagtattggcacgaagactgtttaaaatgtgcatgttgcgattgccggttgggggaggttggtagcaccctttataccaaggccaacttaattctctgccgcagggactacttaagactctttggggtaactggcaattgcgcagcctgtagtaagttgattccggcttttgaaatggtgatgagggccaaggataacgtttaccaccttgactgttttgcatgccagttgtgcaaccaacggttttgcgtgggtgacaagttcttcctcaagaataacatgatattgtgtcaaaccgactacgaggagggtcttatgaaggagggctacgcaccccaggtgcggtag

SEQ ID NO: 18286 - DNA, 438 bp, Artificial Sequence
  derived and/or modified sequence
atgctgagcgtgcagcccgacaccaagcccaagggctgcgccggctgcaataggaagataaaagacaggtacttgctgaaggctctggataagtactggcacgaggactgtctgaaatgtgcctgttgtgattgtagactcggcgaggtaggcagtaccttgtacacaaaggccaacctgatcctctgccggagggattacctccgcttgtttggagtcacggggaattgtgccgcttgtagcaagctgataccggcatttgagatggtaatgagagctaaggacaacgtgtatcacctggattgcttcgcctgtcagctgtgtaatcagagattctgcgtcggcgacaagttctttcttaagaacaatatgatcctgtgccagacagattatgaggaaggtctcatgaaagagggttatgcaccgcaggtgagatag

SEQ ID NO: 18287 - DNA, 357 bp, Artificial Sequence
  derived and/or modified sequence
atgctgagcgtgcagcccgacaccaagcccaagggctgcgccggctgtaatcgcaaaatcaaggacagatatctcctgaaggccctggataaatattggcacgaggattgtctcaaatgcgcttgctgcgattgtagattgggagaagtcggctccaccctgtatacgaaagctaatctgatcctatgtcgcagagattaccttcgcctattcggggtcaccggtaattgtgccgcttgctccaaactaattcccgcgtttgaaatggtgatgcgggccaaggacaacgtgtatcacttggactgtttcgcatgccagttgtgcaatcagcgcttttgtgtcggggataaattttag

SEQ ID NO: 18288 - DNA, 177 bp, Artificial Sequence
  derived and/or modified sequence
atgctgagcgtgcagcccgacaccaagcccaagggctgcgccggctgtaatcgtaaaatcaaagatagatacttgctcaaagctctggataagtactggcacgaggactgccttaagtgcgcctgttgcgactgcagattaggggaggtcgggagcactctgtacactaaagcgtag

SEQ ID NO: 18289 - DNA, 294 bp, Artificial Sequence
  derived and/or modified sequence
atgctgagcgtgcagcccgacaccaagcccaagggctgcgccggctgcaacaggaagatcaaggacagatatctgctgaaggccttagacaagtactggcacgaagattgtctgaagtgtgcctgctgcgactgtcgcttgggggaggttggcagcacattgtacaccaaggcaaaccttatcctttgtcgccgtgattacttgagactctttggggtgaccgggaactgtgccgcttgcagcaagctgataccagccttcgaaatggtgatgcgagctaaagacaatgtctag

SEQ ID NO: 18290 - DNA, 357 bp, Artificial Sequence
  derived and/or modified sequence
atgctgagcgtgcagcccgacaccaagcccaagggctgcgccggctgcaaccgcaagattaaagacagatacctactgaaggccctggacaaatactggcacgaagattgcttgaagtgtgcttgttgcgactgccggctaggcgaagtggggagtacactctacaccaaagccaacctgatcctgtgcaggcgagactatctacgcttgttcggtgttaccggtaattgtgcggcctgttcaaagttaatccctgccttcgagatggtcatgagggctaaggataacgtataccacctagactgcttcgcctgtcagttgtgcaatcaaagattttgcgttggcgacaagttttag

SEQ ID NO: 18291 - DNA, 255 bp, Artificial Sequence
  derived and/or modified sequence
atgctgagcgtgcagcccgacaccaagcccaagggctgcgccggctgtaaccgaaagattaaagacaggtatctattaaaggcattagataagtattggcacgaggactgcttaaaatgtgcttgctgtgactgcagactgggtgaagtcggctccacactctataccaaggccaacctgattttgtgccgccgcgactacttacgactattcggcgtaacagggaattgcgcggcctgttctaaactgatttag

SEQ ID NO: 18292 - DNA, 438 bp, Artificial Sequence
  derived and/or modified sequence
atgctgagcgtgcagcccgacaccaagcccaagggctgcgccggctgtaatagaaaaattaaagatcgctatctgctaaaggcacttgacaagtactggcatgaagactgcctaaagtgtgcctgttgcgactgccggctcggcgaagttgggtctaccctgtataccaaagctaatctcatcttatgtagaagagactacctccggttattcggggtgaccgggaactgtgccgcctgctccaaactaattccggctttcgagatggtgatgcgtgcgaaagacaatgtctaccatctagactgtttcgcatgtcagctgtgcaatcagcgtttttgcgtgggagacaagttcttcctgaaaaataacatgatcctctgccaaactgactacgaggagggactgatgaaggagggttatgccccacaggtccgctag

SEQ ID NO: 18293 - DNA, 438 bp, Artificial Sequence
  derived and/or modified sequence
atgctgagcgtgcagcccgacaccaagcccaagggctgcgccggctgtaacagaaaaattaaggaccggtatctcctgaaggccctggacaagtattggcacgaggactgtctaaagtgtgcttgctgtgactgccgacttggggaagtcggaagcacactgtacaccaaggccaacctcattctttgtaggcgggattacctgcgcctgttcggcgtaaccggaaattgcgctgcttgttccaaattaattccagcttttgaaatggtgatgagagcaaaagacaatgtgtaccacttagactgcttcgcgtgtcagttatgtaaccaaaggttctgtgttggggacaaatttttcctcaaaaataacatgattttgtgtcagactgactatgaggaaggccttatgaaagagggctatgctccccaggtgcgttag

SEQ ID NO: 18294 - DNA, 378 bp, Artificial Sequence
  derived and/or modified sequence
atgctgagcgtgcagcccgacaccaagcccaagggctgcgccggctgtaaccggaagattaaagaccggtacctgcttaaggcactggacaaatattggcacgaggattgtttaaagtgcgcttgttgtgattgccgctgggagcgcttgtttggcgtgacgggaaactgtgcagcgtgttccaagcttattcctgccttcgaaatggtgatgagagctaaagacaacgtgtaccacctcgattgttttgcttgccagctctgtaatcagcggttctgcgttggggacaagttctttctgaaaaataacatgattctgtgccagacagactacgaagaaggactgatgaaggaaggatatgcaccacaggtgcgatag

SEQ ID NO: 18295 - DNA, 267 bp, Artificial Sequence
  derived and/or modified sequence
atgctgagcgtgcagcccgacaccaagcccaagggctgcgccggctgcaacagaaagatcaaggatagatacctgctgaaagcacttgacaagtattggcacgaggactgcctcaagtgtgcgtgctgtgattgtcgtttgggcgaggttgggtcaaccctgtacactaaagctaatctgattctgtgtaggagagactacctccgtctgttcggagtgactgggaattgcgctgcttgttctaagttaatcccggcgttcgaatag

SEQ ID NO: 18296 - DNA, 333 bp, Artificial Sequence
  derived and/or modified sequence
atgctgagcgtgcagcccgacaccaagcccaagggctgcgccggctgtaaccgaaagataaaagatcgctatctgctaaaggccctggacaaatattggcacgaagattgcctgaagtgtgcttgctgtgactgtcggcttggagaggtgggttctactctatatacaaaagcaaacctcatcctgtgcagaagggactatctccgcttgttcggcgtgacaggcaattgcgccgcttgttcaaaacttattcccgcgttcgaaatggtgatgcgagccaaagataatgtctaccacttggattgttttgcatgccagctatgtaatcagtag

SEQ ID NO: 18297 - DNA, 357 bp, Artificial Sequence
  derived and/or modified sequence
atgctgagcgtgcagcccgacaccaagcccaagggctgcgccggctgtaatcgaaaaatcaaagaccgatatctcctgaaagcattggataagtattggcacgaagattgcctgaagtgcgcctgttgcgactgccggctgggggaggttgggagcacattgtatactaaagccaatctgatcctgtgccggcgagactatctccggctgttcggggttactggcaattgcgctgcttgttctaagctcatccccgcgtttgagatggtgatgcgtgctaaggacaacgtataccacctggactgttttgcctgccagctttgtaatcagcgtttctgcgtcggtgacaagttctag

SEQ ID NO: 18298 - DNA, 438 bp, Artificial Sequence
  derived and/or modified sequence
atgctatcggtgcaacctgataccaagcctaaagggtgcgcgggttgcaatcggaaaattaaagacaggtacctcctgaaggcgcttgataaatactggcatgaggattgtctcaagtgcgcttgctgtgactgtcggctgggcgaagttgggtctacgctttataccaaggctaatctcattctgtgccgtcgggattacctcaggctctttggcgtcaccggcaattgtgccgcttgctctaagttgatacccgctttcgaaatggttatgagagctaaagacaatgtataccatctcgactgttttgcctgtcagctatgcaaccagcggttctgtgtgggcgacaaattcttcttgaagaacaatatgattctgtgtcagaccgattacgaagagggtctgatgaaagagggctatgctccacaggtgaggtag

SEQ ID NO: 18299 - DNA, 438 bp, Artificial Sequence
  derived and/or modified sequence
atgctgtcagtgcaaccagataccaagcctaaaggctgtgctggctgcaataggaaaattaaagatagatacctgctcaaagcccttgacaagtactggcatgaggattgtctgaagtgtgcttgttgcgattgccgcctgggcgaggtagggtccaccttgtacacgaaggcgaatcttattctatgccgccgagactatctaaggctgtttggcgtcacagggaactgtgcagcctgttccaaattgattccagcatttgaaatggtaatgcgggctaaggacaacgtgtaccacctcgattgtttcgcatgccagctatgcaatcagcgtttctgcgtgggcgataagtttttcctcaaaaacaatatgatcctgtgccagacggactatgaggaaggtctaatgaaagaggggtacgccccacaggttcggtag

SEQ ID NO: 18300 - DNA, 438 bp, Artificial Sequence
  derived and/or modified sequence
atgctgagtgtccagccagacaccaagccaaaggggtgtgcagggtgcaaccggaaaattaaggatcggtatcttctcaaggcgttagacaagtactggcatgaagactgtttgaagtgtgcttgttgtgattgccgcctgggggaagtaggatccactctgtatacaaaggctaatctgatactgtgccgaagagactacttgcggcttttcggcgttacaggaaattgcgccgcatgcagcaaactgatccctgccttcgaaatggtaatgagagccaaggacaacgtctatcatttggattgcttcgcttgtcagctgtgcaaccaacgattctgcgtgggcgacaaattttttctcaaaaacaatatgatactctgtcaaactgactacgaagagggccttatgaaggagggttacgcaccccaagtgaggtag

SEQ ID NO: 18301 - DNA, 438 bp, Artificial Sequence
  derived and/or modified sequence
atgcttagcgtgcagcccgacacaaaacctaagggctgtgcaggctgtaacagaaagatcaaggacagatatctgctgaaagcactggataagtactggcatgaagattgtctgaaatgcgcctgttgcgattgccgactgggcgaggtgggctctaccctctataccaaggctaatctgattttatgccgccgagactacctgcgcctgtttggggtaaccggaaactgcgccgcttgctctaaactgatacccgctttcgaaatggttatgagagccaaggacaacgtttaccacctagattgttttgcatgtcaactgtgcaaccaacggttctgcgtgggagacaaattctttttaaagaacaatatgattctctgccaaacagattacgaggagggactgatgaaagaaggctatgccccacaagtcagatag

SEQ ID NO: 18302 - DNA, 438 bp, Artificial Sequence
  derived and/or modified sequence
atgctgagtgtgcaacccgacacaaagccaaaggggtgcgcaggatgtaaccgcaaaatcaaagatcgctacttactgaaggcactcgacaagtactggcacgaggattgtttgaagtgcgcttgctgtgattgtcgtctgggagaggtaggatctaccttatataccaaggcgaatcttattctgtgtaggagagattatctccgcctgtttggcgtgacggggaactgcgcggcttgttcgaaactcattcccgctttcgaaatggtgatgcgggcaaaagataacgtgtaccacttagattgcttcgcttgtcagctgtgcaaccagaggttttgcgtgggagacaaattctttctaaagaataatatgattttgtgccagaccgactacgaggaaggtctgatgaaggagggttacgctccccaggtgagatag

SEQ ID NO: 18303 - DNA, 438 bp, Artificial Sequence
  derived and/or modified sequence
atgctgtctgtgcagcctgataccaagccgaagggctgcgcaggatgcaaccggaaaataaaggaccgctacctgctaaaggctctagacaagtattggcacgaggactgcctgaagtgcgcatgttgtgattgtagactcggtgaagttggatctacattatatactaaagctaacctaatactgtgccgacgagactatctccgcctgtttggcgtaacaggtaattgcgcagcgtgttcaaaactgatccctgcattcgagatggtgatgcgagcaaaagacaacgtgtaccatctggactgcttcgcgtgccagctgtgcaatcaaaggttctgcgtcggcgataagttctttctcaagaacaatatgattctgtgtcaaaccgactacgaggagggcttgatgaaagaaggatatgcaccccaggtgcgctag

SEQ ID NO: 18304 - DNA, 438 bp, Artificial Sequence
  derived and/or modified sequence
atgttgtccgtgcaacctgatacaaagcccaaaggttgtgcaggctgcaaccgaaaaattaaagatcgctatctattaaaggcactagataagtactggcacgaagattgcctgaagtgcgcttgctgcgactgtagactgggcgaagtggggagcacgctgtacactaaggccaacctgatactgtgccggcgagactatctcaggctcttcggtgttaccggaaattgtgccgcatgctccaaactgatacctgcctttgaaatggtaatgcgggctaaggataatgtctatcatctagactgtttcgcatgccagctgtgcaatcaacgattctgtgttggggataaattcttcctcaagaacaacatgatcctgtgccagaccgactatgaggagggactgatgaaggagggctatgccccacaagtgcgctag

SEQ ID NO: 18305 - DNA, 357 bp, Artificial Sequence
  derived and/or modified sequence
atgttatccgtgcagcctgatactaagcctaaaggctgcgcgggatgcaatcggaagatcaaagatcgatatttactcaaggcgctggacaagtattggcatgaagattgtttgaagtgtgcctgctgtgactgtcgccttggagaggtgggctcgactctctacactaaagccaacctgatcctgtgccggagagattacctccgactgtttggcgtgaccggtaattgtgctgcatgtagcaagttaatccctgccttcgagatggtgatgagggcaaaagataacgtttaccacctcgattgtttcgcttgtcagctatgcaaccagaggttctgtgttggagacaagttttag

SEQ ID NO: 18306 - DNA, 177 bp, Artificial Sequence
  derived and/or modified sequence
atgctttccgtgcaaccagacacaaaaccaaaggggtgtgcgggttgcaacaggaagatcaaggaccggtacctattaaaagcattggataagtattggcacgaggactgccttaagtgcgcatgttgtgactgtcgcctgggtgaagtggggtccactttgtacacaaaggcctag

SEQ ID NO: 18307 - DNA, 294 bp, Artificial Sequence
  derived and/or modified sequence
atgctgagcgtccagccggataccaagcctaagggctgcgccggatgtaacaggaagatcaaggatagatatcttttgaaggcacttgacaagtattggcatgaggattgtctcaagtgcgcttgttgtgactgccgtcttggcgaggtgggatctacgctgtatacaaaagcgaatttaatactgtgtagaagggattatctaagactgttcggagtcacaggaaattgtgctgcatgctccaagctcattcctgctttcgaaatggtgatgagggccaaggacaatgtctag

SEQ ID NO: 18308 - DNA, 357 bp, Artificial Sequence
  derived and/or modified sequence
atgctgtcagttcagccagataccaagcccaagggctgcgctggatgcaataggaaaattaaggatcgatacctccttaaggccttggacaaatactggcatgaggattgcctgaaatgtgcctgttgtgactgtaggctgggggaggtgggttctaccctgtacacaaaggccaacttgattctatgtaggagggattacttgcggttattcggagtaaccggaaactgcgcagcctgtagcaagttaatcccggcatttgagatggtcatgagggccaaggacaatgtatatcacctggattgcttcgcatgtcaactctgcaatcagagattttgcgttggagacaagttctag

SEQ ID NO: 18309 - DNA, 255 bp, Artificial Sequence
  derived and/or modified sequence
atgctgtccgttcagcctgatacgaagcccaaaggctgtgccggatgtaacaggaaaatcaaggaccggtatctcctgaaagccctggacaagtattggcacgaggactgtcttaaatgcgcatgttgtgactgccggctaggggaagtaggcagcaccctctatactaaggccaacttgattctgtgtaggcgagactatctgcgtcttttcggagtgacaggtaactgtgctgcttgttctaaattaatctag

SEQ ID NO: 18310 - DNA, 438 bp, Artificial Sequence
  derived and/or modified sequence
atgctgtccgtccagcccgataccaagccaaaaggctgcgccggatgcaatagaaaaattaaggaccgttacctcctgaaggcactggacaagtattggcacgaagattgcctgaaatgtgcgtgttgcgattgccggctcggggaagttggatcgaccttatacacgaaagctaacctgatcttgtgtcggagagattatctacggctatttggagtaaccggtaattgtgctgcatgttctaaattgattcctgcctttgagatggtgatgcgagccaaggacaacgtgtaccacctggactgttttgcatgtcagctgtgcaatcagcgattctgcgtgggcgacaagttcttcttgaaaaacaatatgatactttgccagaccgattatgaagaggggctgatgaaagaggggtacgcacctcaggtgcggtag

SEQ ID NO: 18311 - DNA, 438 bp, Artificial Sequence
  derived and/or modified sequence
atgctgagcgtccaaccggacacaaagccaaagggatgtgcaggatgcaaccggaaaatcaaggaccgatacttgctgaaggccctggacaagtattggcacgaggactgcctgaagtgcgcatgctgtgactgtaggcttggggaggtcgggtcgaccctctacaccaaagcaaatctgatcctgtgccgccgtgattacctcaggctgttcggcgtgaccggtaattgcgcagcatgctcaaaattaattcctgccttcgagatggtgatgcgggctaaggataacgtgtaccaccttgactgtttcgcttgtcagctttgcaaccaacgcttttgcgtcggcgacaaatttttcttgaaaaacaacatgattctgtgccaaacggactatgaggagggcttaatgaaagagggctatgctccacaggtcaggtag

SEQ ID NO: 18312 - DNA, 378 bp, Artificial Sequence
  derived and/or modified sequence
atgcttagtgtgcagccggacaccaagccaaaggggtgtgctggctgcaaccgcaagattaaggacagatatttattaaaagcattagacaagtactggcatgaagactgtctgaagtgcgcgtgctgcgattgtaggtgggaaaggctgtttggcgtaaccgggaattgtgcagcttgctccaagttaattccagcattcgagatggtgatgcgggctaaggacaacgtttaccatctagactgcttcgcttgccagctgtgcaaccagagattctgtgttggagataagttctttctcaagaacaatatgatcctctgccagactgattatgaggaagggctaatgaaggagggttacgctccgcaggttcgttag

SEQ ID NO: 18313 - DNA, 267 bp, Artificial Sequence
  derived and/or modified sequence
atgttgtcagtccagcccgatacaaagccaaaagggtgcgcgggatgtaacaggaagataaaagatagatacctgctgaaggcactcgacaaatattggcacgaagattgtcttaagtgtgcctgttgtgattgtaggttgggagaggtgggctctactctgtatactaaagcgaatctgatactgtgtcgtcgggactatctgcgattattcggggtgactgggaactgtgctgcatgtagcaaattaatacctgcttttgaatag

SEQ ID NO: 18314 - DNA, 333 bp, Artificial Sequence
  derived and/or modified sequence
atgctatcagtgcagcctgatacgaagcctaaaggatgcgcaggctgtaatcggaagatcaaagacaggtacctcctgaaggccctggataaatactggcacgaggattgcctgaagtgcgcatgctgtgactgtaggcttggtgaggtgggatccactctttacacgaaagccaatctgattttgtgccgtcgcgattacctcagacttttcggggtgaccggtaactgtgcagcgtgctctaaacttatcccagccttcgagatggttatgcgcgctaaggacaacgtctaccacttggattgtttcgcttgccagttgtgtaatcagtag

SEQ ID NO: 18315 - DNA, 357 bp, Artificial Sequence
  derived and/or modified sequence
atgcttagcgtgcagcctgatacaaagccaaaaggatgtgccggttgcaataggaaaattaaggataggtatctcctgaaagctttagacaagtattggcacgaggattgcctcaagtgcgcctgttgtgattgcagattgggcgaggttggctctaccctctatacgaaggctaacctgatcctatgtagaagagactacctgcgcctcttcggagtgaccggcaattgtgcagcttgctccaagcttattcccgcttttgagatggtgatgagggccaaggacaacgtgtatcatctcgactgctttgcatgccaactttgtaaccagcggttctgcgttggagataagttttag

SEQ ID NO: 18316 - DNA, 438 bp, Artificial Sequence
  derived and/or modified sequence
atgctgagcgtgcagcccgacaccaagcccaagggctgcgccggctgcaacagaaagatcaaggacagatacctgctgaaggccctggacaagtactggcacgaggactgcctgaagtgcgcctgctgcgactgcagactgggcgaggtgggcagcaccctgtacaccaaggccaacctgatcctgtgcagaagagactacctgagactgttcggcgtgaccggcaactgcgccgcctgcagcaagctgatccccgccttcgagatggtgatgagagccaaggacaacgtgtaccacctggactgcttcgcctgccagctgtgcaaccagagattctgcgtgggcgacaagttcttcctgaagaacaacatgatcctgtgccagaccgactacgaggagggcctgatgaaggagggctacgccccccaggtgagatag

SEQ ID NO: 18317 - DNA, 357 bp, Artificial Sequence
  derived and/or modified sequence
atgctgagcgtgcagcccgacaccaagcccaagggctgcgccggctgcaacagaaagatcaaggacagatacctgctgaaggccctggacaagtactggcacgaggactgcctgaagtgcgcctgctgcgactgcagactgggcgaggtgggcagcaccctgtacaccaaggccaacctgatcctgtgcagaagagactacctgagactgttcggcgtgaccggcaactgcgccgcctgcagcaagctgatccccgccttcgagatggtgatgagagccaaggacaacgtgtaccacctggactgcttcgcctgccagctgtgcaaccagagattctgcgtgggcgacaagttctag

SEQ ID NO: 18318 - DNA, 177 bp, Artificial Sequence
  derived and/or modified sequence
atgctgagcgtgcagcccgacaccaagcccaagggctgcgccggctgcaacagaaagatcaaggacagatacctgctgaaggccctggacaagtactggcacgaggactgcctgaagtgcgcctgctgcgactgcagactgggcgaggtgggcagcaccctgtacaccaaggcctag

SEQ ID NO: 18319 - DNA, 294 bp, Artificial Sequence
  derived and/or modified sequence
atgctgagcgtgcagcccgacaccaagcccaagggctgcgccggctgcaacagaaagatcaaggacagatacctgctgaaggccctggacaagtactggcacgaggactgcctgaagtgcgcctgctgcgactgcagactgggcgaggtgggcagcaccctgtacaccaaggccaacctgatcctgtgcagaagagactacctgagactgttcggcgtgaccggcaactgcgccgcctgcagcaagctgatccccgccttcgagatggtgatgagagccaaggacaacgtgtag

SEQ ID NO: 18320 - DNA, 255 bp, Artificial Sequence
  derived and/or modified sequence
atgctgagcgtgcagcccgacaccaagcccaagggctgcgccggctgcaacagaaagatcaaggacagatacctgctgaaggccctggacaagtactggcacgaggactgcctgaagtgcgcctgctgcgactgcagactgggcgaggtgggcagcaccctgtacaccaaggccaacctgatcctgtgcagaagagactacctgagactgttcggcgtgaccggcaactgcgccgcctgcagcaagctgatctag

SEQ ID NO: 18321 - DNA, 378 bp, Artificial Sequence
  derived and/or modified sequence
atgctgagcgtgcagcccgacaccaagcccaagggctgcgccggctgcaacagaaagatcaaggacagatacctgctgaaggccctggacaagtactggcacgaggactgcctgaagtgcgcctgctgcgactgcagatgggagagactgttcggcgtgaccggcaactgcgccgcctgcagcaagctgatccccgccttcgagatggtgatgagagccaaggacaacgtgtaccacctggactgcttcgcctgccagctgtgcaaccagagattctgcgtgggcgacaagttcttcctgaagaacaacatgatcctgtgccagaccgactacgaggagggcctgatgaaggagggctacgccccccaggtgagatag

SEQ ID NO: 18322 - DNA, 267 bp, Artificial Sequence
  derived and/or modified sequence
atgctgagcgtgcagcccgacaccaagcccaagggctgcgccggctgcaacagaaagatcaaggacagatacctgctgaaggccctggacaagtactggcacgaggactgcctgaagtgcgcctgctgcgactgcagactgggcgaggtgggcagcaccctgtacaccaaggccaacctgatcctgtgcagaagagactacctgagactgttcggcgtgaccggcaactgcgccgcctgcagcaagctgatccccgccttcgagtag

SEQ ID NO: 18323 - DNA, 333 bp, Artificial Sequence
  derived and/or modified sequence
atgctgagcgtgcagcccgacaccaagcccaagggctgcgccggctgcaacagaaagatcaaggacagatacctgctgaaggccctggacaagtactggcacgaggactgcctgaagtgcgcctgctgcgactgcagactgggcgaggtgggcagcaccctgtacaccaaggccaacctgatcctgtgcagaagagactacctgagactgttcggcgtgaccggcaactgcgccgcctgcagcaagctgatccccgccttcgagatggtgatgagagccaaggacaacgtgtaccacctggactgcttcgcctgccagctgtgcaaccagtag

SEQ ID NO: 18324 - protein, 1170 aa, Artificial Sequence
  derived and/or modified sequence
MTNPSDRVLPANSMAESREGDFGCTVMELRKLMELRSRDALTQINVHYGGVQNLCSRLKTSPVEGLSGNPADLEKRRQVFGHNVIPPKKPKTFLELVWEALQDVTLIILEIAAIISLVLSFYRPAGEENELCGQVATTPEDENEAQAGWIEGAAILFSVIIVVLVTAFNDWSKEKQFRGLQCRIEQEQKFSIIRNGQLIQLPVAEIVVGDIAQVKYGDLLPADGILIQGNDLKIDESSLTGESDHVKKSLDKDPMLLSGTHVMEGSGRMVVTAVGVNSQTGIILTLLGVNEDDEGEKKKKGKKQGVPENRNKAKTQDGVALEIQPLNSQEGIDNEEKDKKAVKVPKKEKSVLQGKLTRLAVQIGKAGLLMSALTVFILILYFVIDNFVINRRPWLPECTPIYIQYFVKFFIIGITVLVVAVPEGLPLAVTISLAYSVKKMMKDNNLVRHLDACETMGNATAICSDKTGTLTMNRMTVVQAYIGGIHYRQIPSPDVFLPKVLDLIVNGISINSAYTSKILPPEKEGGLPRQVGNKTECALLGFVTDLKQDYQAVRNEVPEEKLYKVYTFNSVRKSMSTVIRNPNGGFRMYSKGASEIILRKCNRILDRKGEAVPFKNKDRDDMVRTVIEPMACDGLRTICIAYRDFDDTEPSWDNENEILTELTCIAVVGIEDPVRPEVPDAIAKCKQAGITVRMVTGDNINTARAIATKCGILTPGDDFLCLEGKEFNRLIRNEKGEVEQEKLDKIWPKLRVLARSSPTDKHTLVKGIIDSTVGEHRQVVAVTGDGTNDGPALKKADVGFAMGIAGTDVAKEASDIILTDDNFTSIVKAVMWGRNVYDSISKFLQFQLTVNVVAVIVAFTGACITQDSPLKAVQMLWVNLIMDTFASLALATEPPTESLLKRRPYGRNKPLISRTMMKNILGHAFYQLIVIFILVFAGEKFFDIDSGRKAPLHSPPSQHYTIVFNTFVLMQLFNEINSRKIHGEKNVFSGIYRNIIFCSVVLGTFICQIFIVEFGGKPFSCTSLSLSQWLWCLFIGIGELLWGQFISAIPTRSLKFLKEAGHGTTKEEITKDAEGLDEIDHAEMELRRGQILWFRGLNRIQTQIDVINTFQTGASFKGVLRRQNMGQHLDVKLVPSSSYVAVAPVKSSPTTSVPAVSSPPMGNQSGQSVP

SEQ ID NO: 18325 - protein, 129 aa, Artificial Sequence
  derived and/or modified sequence
  misc_feature (1)..(1): Xaa can be any naturally occurring amino acid
XIGELLWGQFISAIPTRSLKFLKEAGHGTTKEEITKDAEGLDEIDHAEMELRRGQILWFRGLNRIQTQIDVINTFQTGASFKGVLRRQNMGQHLDVKLVPSSSYVAVAPVKSSPTTSVPAVSSPPMGSE

SEQ ID NO: 18326 - protein, 1158 aa, Artificial Sequence
  derived and/or modified sequence
MTNPSDRVLPANSMAESREGDFGCTVMELRKLMELRSRDALTQINVHYGGVQNLCSRLKTSPVEGLSGNPADLEKRRQVFGHNVIPPKKPKTFLELVWEALQDVTLIILEIAAIISLVLSFYRPAGEENELCGQVATTPEDENEAQAGWIEGAAILFSVIIVVLVTAFNDWSKEKQFRGLQCRIEQEQKFSIIRNGQLIQLPVAEIVVGDIAQVKYGDLLPADGILIQGNDLKIDESSLTGESDHVKKSLDKDPMLLSGTHVMEGSGRMVVTAVGVNSQTGIILTLLGVNEDDEGEKKKKAKTQDGVALEIQPLNSQEGIDNEEKDKKAVKVPKKEKSVLQGKLTRLAVQIGKAGLLMSALTVFILILYFVIDNFVINRRPWLPECTPIYIQYFVKFFIIGITVLVVAVPEGLPLAVTISLAYSVKKMMKDNNLVRHLDACETMGNATAICSDKTGTLTMNRMTVVQAYIGGIHYRQIPSPDVFLPKVLDLIVNGISINSAYTSKILPPEKEGGLPRQVGNKTECALLGFVTDLKQDYQAVRNEVPEEKLYKVYTFNSVRKSMSTVIRNPNGGFRMYSKGASEIILRKCNRILDRKGEAVPFKNKDRDDMVRTVIEPMACDGLRTICIAYRDFDDTEPSWDNENEILTELTCIAVVGIEDPVRPEVPDAIAKCKQAGITVRMVTGDNINTARAIATKCGILTPGDDFLCLEGKEFNRLIRNEKGEVEQEKLDKIWPKLRVLARSSPTDKHTLVKGIIDSTVGEHRQVVAVTGDGTNDGPALKKADVGFAMGIAGTDVAKEASDIILTDDNFTSIVKAVMWGRNVYDSISKFLQFQLTVNVVAVIVAFTGACITQDSPLKAVQMLWVNLIMDTFASLALATEPPTESLLKRRPYGRNKPLISRTMMKNILGHAFYQLIVIFILVFAGEKFFDIDSGRKAPLHSPPSQHYTIVFNTFVLMQLFNEINSRKIHGEKNVFSGIYRNIIFCSVVLGTFICQIFIVEFGGKPFSCTSLSLSQWLWCLFIGIGELLWGQFISAIPTRSLKFLKEAGHGTTKEEITKDAEGLDEIDHAEMELRRGQILWFRGLNRIQTQIDVINTFQTGASFKGVLRRQNMGQHLDVKLVPSSSYVAVAPVKSSPTTSVPAVSSPPMGNQSGQSVP

SEQ ID NO: 18327 - protein, 1134 aa, Artificial Sequence
  derived and/or modified sequence
MTNPSDRVLPANSMAESREGDFGCTVMELRKLMELRSRDALTQINVHYGGVQNLCSRLKTSPVEGLSGNPADLEKRRQVFGHNVIPPKKPKTFLELVWEALQDVTLIILEIAAIISLVLSFYRPAGEENELCGQVATTPEDENEAQAGWIEGAAILFSVIIVVLVTAFNDWSKEKQFRGLQCRIEQEQKFSIIRNGQLIQLPVAEIVVGDIAQVKYGDLLPADGILIQGNDLKIDESSLTGESDHVKKSLDKDPMLLSGTHVMEGSGRMVVTAVGVNSQTGIILTLLGVNEDDEGEKKKKGKKQGVPENRNKAKTQDGVALEIQPLNSQEGIDNEEKDKKAVKVPKKEKSVLQGKLTRLAVQIGKAGLLMSALTVFILILYFVIDNFVINRRPWLPECTPIYIQYFVKFFIIGITVLVVAVPEGLPLAVTISLAYSVKKMMKDNNLVRHLDACETMGNATAICSDKTGTLTMNRMTVVQAYIGGIHYRQIPSPDVFLPKVLDLIVNGISINSAYTSKILPPEKEGGLPRQVGNKTECALLGFVTDLKQDYQAVRNEVPEEKLYKVYTFNSVRKSMSTVIRNPNGGFRMYSKGASEIILRKCNRILDRKGEAVPFKNKDRDDMVRTVIEPMACDGLRTICIAYRDFDDTEPSWDNENEILTELTCIAVVGIEDPVRPEVPDAIAKCKQAGITVRMVTGDNINTARAIATKCGILTPGDDFLCLEGKEFNRLIRNEKGEVEQEKLDKIWPKLRVLARSSPTDKHTLVKGIIDSTVGEHRQVVAVTGDGTNDGPALKKADVGFAMGIAGTDVAKEASDIILTDDNFTSIVKAVMWGRNVYDSISKFLQFQLTVNVVAVIVAFTGACITQDSPLKAVQMLWVNLIMDTFASLALATEPPTESLLKRRPYGRNKPLISRTMMKNILGHAFYQLIVIFILVFAGEKFFDIDSGRKAPLHSPPSQHYTIVFNTFVLMQLFNEINSRKIHGEKNVFSGIYRNIIFCSVVLGTFICQFISAIPTRSLKFLKEAGHGTTKEEITKDAEGLDEIDHAEMELRRGQILWFRGLNRIQTQIDVINTFQTGASFKGVLRRQNMGQHLDVKLVPSSSYVAVAPVKSSPTTSVPAVSSPPMGNQSGQSVP

SEQ ID NO: 18328 - protein, 117 aa, Artificial Sequence
  derived and/or modified sequence
  misc_feature (1)..(1): Xaa can be any naturally occurring amino acid
XGGKPFSCTSLSLSQWLWCLFIGIGELLWGQFISAIPTRSLKFLKEAGHGTTKEEITKDAEGLDEIDHAEMELRRGQILWFRGLNRIQTQHLLQDSDLLPDKEEAIISSSLFPSCNF

SEQ ID NO: 18329 - DNA, 3513 bp, Artificial Sequence
  derived and/or modified sequence
atgaccaatcctagcgatcgggtcctgcctgccaatagtatggccgagagtagagaaggcgacttcggctgcactgttatggaactgaggaagcttatggagctccgatccagggacgccttaacacagatcaacgtgcactacgggggggtgcaaaacctgtgttctcggctgaaaacttctccggtcgaggggctctccggtaaccccgcagacttggaaaagagaagacaagtctttggccataatgttattcccccgaaaaagcccaagacattcctggagttggtctgggaggctctgcaagacgtgactctaatcattcttgaaatagcagccatcatttccctggtgctgagcttctatcgtcctgcaggcgaagaaaacgaactctgcggacaggtagccacaacccccgaggatgaaaatgaggcacaagccggttggatcgagggggccgccattctgttttctgtcataattgtagtgctcgtcacggcttttaatgactggtcaaaagaaaagcagtttagaggcctgcagtgtcgcatcgaacaagagcagaagttcagtataatcaggaatgggcaactgatacagctgcctgtggcggaaatagttgtgggtgatatcgcccaagtgaagtacggagatctgctgcccgcggacggcatactgatccaggggaacgacctcaaaatcgatgagagcagcctaacaggagagagcgaccatgttaagaagtcattagacaaagatcctatgctcctgtcaggaacacacgtgatggagggatctggcaggatggtggttactgcagttggcgttaactcacaaacaggtatcattctgacgctgctcggggtcaacgaggatgacgagggcgaaaagaagaagaagggaaaaaaacagggggtgccagagaaccgcaataaggctaaaactcaggatggagtggctttagaaatccagccattgaactcccaggaagggatcgataatgaagagaaagataagaaagccgtgaaagtaccaaagaaagagaaaagcgtcttgcagggaaagctgacaagactggctgttcagatcggaaaggccgggctgctgatgtccgcgctgactgtgtttattttgattctatacttcgtgattgataacttcgtaattaataggcgaccttggctcccggagtgcacccctatttacattcaatattttgtgaaattcttcatcattgggatcaccgtcctggtagtggcggtgcctgagggactcccattagccgtgaccatctctctggcatactccgtaaaaaaaatgatgaaagacaataatttggtgagacatctagatgcttgcgaaacaatgggaaatgccacagcgatttgctctgataagactggcactctcaccatgaatcgtatgactgttgttcaagcatacattggtggcatccactatcggcagattccaagccccgacgttttcctccccaaagtcctggatctgatcgtgaacgggataagtatcaattccgcgtatacatcaaagatccttcctcctgaaaaggagggtggtctgccacggcaggtcggcaataagacggaatgcgctttactcggctttgtgacagatctcaaacaggactatcaggcagtacgcaacgaggtgccagaagaaaagctgtacaaggtgtatacattcaactctgtgcgcaaatccatgagtaccgttattaggaaccctaacggcggtttcagaatgtactccaaaggtgcatccgagatcatccttcggaaatgtaataggatccttgacagaaagggtgaagctgtgcccttcaaaaataaggacagagatgacatggttaggactgttattgagcccatggcgtgcgatgggttgaggaccatatgcatcgcatacagagactttgacgacactgaaccatcttgggataatgagaatgaaatcctgaccgagctgacgtgcatcgctgtggtgggaattgaagacccagtgagacctgaagtccctgacgctatcgcgaagtgcaagcaggcagggatcactgtgcggatggtaaccggtgataatataaatactgcccgggctatagctactaaatgcggtatactgaccccgggtgacgactttttatgtctagagggcaaggaattcaacagactgattcgtaacgagaagggtgaggtggagcaagaaaagttagataagatttggcccaagttgagagtgctggctcgttcttccccaactgataaacatacccttgtgaagggcattattgacagtactgttggcgagcaccgacaggtagttgctgttactggcgatgggacgaacgacgggccagctcttaaaaaagccgatgtgggttttgccatgggaatagctggaaccgacgtggccaaagaggcttccgacataattctgacagacgacaattttaccagtattgtgaaggctgtaatgtggggtagaaatgtgtatgactctatatctaagtttctccagttccagctgaccgtcaatgtggtcgccgtgattgttgcttttactggagcctgtatcacccaagacagcccacttaaggcggtgcagatgctctgggtgaaccttatcatggacaccttcgccagcctcgccctcgcaacagagccacccactgagagtttgctgaagcggagaccttacgggagaaacaagcccctcatatcacgcactatgatgaaaaacattctcggccatgcgttctatcagcttattgtgatttttatactggtgtttgctggggagaagtttttcgatatagattccggacgaaaagctccgctccattcaccaccaagccagcattatactattgtatttaacacatttgtactgatgcaattgtttaacgagatcaattcaagaaagattcatggggaaaaaaacgtattctctggtatctaccggaacataatcttttgttccgtggtcctcggaacgtttatttgccagatctttatcgtcgagttcggaggcaaacctttttcttgcacctcactcagcctgagccagtggctttggtgcctgttcatcggtattggcgagctgctgtggggccaattcattagtgctatccctacgcgctccctgaaatttctaaaagaggccggacacggcacaaccaaagaggagattacaaaagacgcagaagggctggatgaaattgaccacgcggagatggaactgagaagagggcagatcttatggtttagggggctcaatcgcatccagactcagattgatgtcattaataccttccagaccggagcctcatttaagggcgtgctcaggagacaaaacatgggacagcatttggatgtgaaactggtgccttcatcttcatatgtggccgtcgcccccgtgaaatcctccccgacaacttcggtccctgccgtttccagtcctcctatgggcaaccagtccgggcaatcggtcccttag

SEQ ID NO: 18330 - DNA, 390 bp, Artificial Sequence
  derived and/or modified sequence
tagattggagagcttctttggggccaattcatctctgcaatccccactaggagccttaaattcctgaaggaagccggacatggcactaccaaggaggaaatcacaaaggatgcagaaggcctggacgagatagaccacgctgaaatggagcttaggcgcggccaaatactatggtttcgcggacttaaccgcatccaaacgcagatcgatgtgatcaatacatttcagactggggcctcttttaagggagtgctcagacgacagaacatgggccaacacctggacgtgaaacttgtgccttcatcatcctacgtggctgtagcccctgtgaagtcgtctcccactacctcagtgcccgccgtgagttcaccccctatggggtctgagtag

SEQ ID NO: 18331 - DNA, 3513 bp, Artificial Sequence
  derived and/or modified sequence
atgaccaatcccagtgatagagttctgccagctaatagcatggccgagtctcgagagggagacttcggatgtaccgtcatggagttgcggaagctgatggagcttcgttcacgagatgccctgactcaaatcaacgtccattatgggggggtgcagaatttatgctctcgccttaagacctcacccgtggaggggctcagtggaaacccagcagacctcgagaagcgccgtcaggtctttgggcacaacgtcatcccccccaagaaaccaaaaacgtttctggaattggtgtgggaagccctgcaggatgttactctaattattttagaaatcgcagctatcataagtttggttctgtctttttaccgccctgcgggtgaagagaacgaactatgcggacaggtcgcgaccaccccggaagatgagaatgaagcccaggccgggtggatagagggggccgcaatactgttttctgtgatcatagttgttttggttactgcgttcaacgattggtccaaagaaaaacagttcaggggacttcaatgcaggattgagcaagagcagaaattttctatcattagaaacggccagctcatacagctaccagtggcagagatcgtagtcggagacatcgctcaagtaaaatatggcgacttgctgcccgctgatggcatcctcatccaggggaatgatttgaagatcgacgaatctagcctcaccggcgagagtgatcacgtcaagaagtcgctggacaaggatccgatgctattgagcggcacccacgtaatggaagggagcggcagaatggtggtcactgcagtgggagtgaacagccagactggaatcatacttacccttctcggggtcaatgaagatgacgagggggagaagaaaaaaaaagggaaaaagcagggtgtccctgaaaataggaataaagcaaagacacaggacggggtggctcttgagattcaacccctgaacagccaggaagggatcgacaatgaggaaaaagataagaaagcagtcaaagtgcccaaaaaggaaaagtcagtgttacaaggcaagctgactcggctcgcagtccagattggcaaagccggcctactcatgagcgccttgaccgtgtttattcttattctgtactttgtgattgacaatttcgtgattaatcgccgtccctggctccctgaatgtacacccatctacatccaatatttcgtcaagttttttattattgggatcaccgttttggtggtggccgtgcctgaaggactcccccttgccgtcactatctcgctggcgtactccgttaaaaaaatgatgaaagacaacaacctggtaagacacctcgacgcctgcgagacaatgggcaacgcgactgccatctgtagcgataaaacaggcactctgaccatgaatagaatgactgtggtgcaagcttacatcgggggaatccattaccgccaaatcccgtctcccgatgtcttcttaccaaaggtgctggatctgatcgttaacggaatctccattaactccgcgtacaccagcaaaatcctcccccccgaaaaggaaggtggactgccacgacaggtagggaataaaaccgagtgcgcgctcctgggattcgttacagatctcaagcaggactaccaggccgtgcgcaatgaagtccccgaagaaaagctgtacaaggtatacacttttaattcagtgaggaagtccatgagcaccgtgattagaaacccaaatggaggattccggatgtattctaagggcgccagcgaaatcattctacggaagtgtaacaggatactcgatcgcaaaggagaagctgttccttttaagaacaaagacagagacgacatggttcggaccgtgatcgagcccatggcttgtgacgggctgagaacaatctgcatcgcatatagggattttgacgacaccgagccaagctgggataatgaaaatgagatcttgacggagctgacatgtatcgcggtggtcgggatcgaggatcctgtgcgccctgaagtgccagacgcaatcgccaaatgcaaacaggctggtatcaccgttcggatggttaccggggataatataaacactgcacgagcaattgccactaagtgcggaatcctcacgcctggagatgacttcctctgtctggagggcaaggaattcaatcgactgattcgtaatgaaaagggcgaggtggaacaagagaaattagataagatttggccaaagttaagggtacttgcccggtcctcacctaccgataaacacaccctcgtcaaagggatcattgatagtacggttggcgaacacaggcaggtagtggccgtcaccggtgacggcacaaatgacggtcctgctctaaaaaaggcagatgtggggttcgcaatgggcatagcagggactgatgtcgctaaggaggcctccgacattattcttacagatgacaacttcacaagcattgtgaaggcagtcatgtgggggagaaatgtgtacgacagcatcagcaaattcctccaattccagctcaccgtgaatgttgtcgcggtgatcgtcgcattcactggcgcctgtatcacccaggactcacctctgaaagccgttcagatgctgtgggtgaatctgattatggacacatttgccagcctggctcttgcgacagagccacccaccgaatcactgcttaaaaggaggccatatgggaggaacaagccgctgatctccagaaccatgatgaagaatattctggggcacgccttctatcagttgattgtgatctttatactggtgtttgccggagagaagttttttgatatcgactctgggcgcaaagcgccactgcatagccctccttcacagcactatacaatcgtctttaatacctttgtcctgatgcagttattcaatgagattaactcacggaaaatccatggggagaagaacgtctttagcggcatctaccgcaatatcattttttgcagcgtagtgcttggcacctttatctgccagatttttatcgtggaattcggaggaaaaccgttttcttgtacttctctttctctgagtcagtggctatggtgcctctttattggcattggcgagctgctgtgggggcaattcatctcagcaattcctacacggagcttgaaatttcttaaagaggccgggcacggcactacaaaagaagagattacgaaggacgccgaaggcctggatgagatagatcacgccgaaatggagttgcgaagggggcagatcttgtggtttaggggcctgaaccgtattcagacgcaaatagacgtaattaacacctttcaaaccggagccagctttaagggagtcctgcgccggcagaatatggggcagcatctcgacgtcaagctggtaccctcctcttcctatgttgccgtcgcccctgttaaatcctctcctacgaccagcgttcccgctgtgagttcgcctcccatggggaaccaaagcggacagtcggtgccttag

SEQ ID NO: 18332 - DNA, 3477 bp, Artificial Sequence
  derived and/or modified sequence
atgacaaacccttcagaccgggtgctgcccgcaaacagtatggcggagtctcgagaaggagatttcggttgtactgtcatggaactgaggaagttgatggaactccgatcccgcgatgctcttacacagattaatgtgcactacggcggggtgcagaatctatgctctagacttaaaacgtctcccgttgaggggctgagcggtaatcctgcagacttggaaaagagacggcaggtgttcgggcacaatgtcatcccccctaagaagcctaaaacattcctcgaacttgtgtgggaggccttgcaggacgttactctcattattctcgaaatcgctgcaatcataagtttagttttatcattttaccggcctgcaggggaggagaatgaactgtgtggtcaggtagcgactaccccagaagatgagaacgaagcacaggccggatggatcgagggggcggccatactgttcagcgtgatcatagttgtgctggttactgcgtttaacgattggtctaaagagaagcagtttcgtggattgcaatgccgtatcgagcaggagcagaagttctctatcatacggaatggtcagctgattcagctaccagtcgctgaaattgtggtgggtgacatcgctcaggtcaagtacggcgatctgctgccagccgacggaattctgatccaggggaatgacttgaaaatcgatgagagctcactaacgggcgagtccgaccatgtaaagaagagcttggacaaagatccaatgctgctctccggaactcatgtgatggaggggagtggacgcatggtcgtcacggccgtaggggtcaactcgcagacgggcattattctcacgcttctgggtgtcaatgaggatgacgagggcgaaaagaagaagaaggcgaaaacccaggacggtgtggctctggagatacaaccacttaactcgcaggagggaattgacaacgaggagaaggacaagaaggccgttaaagtgcccaagaaggagaagagtgtcctgcagggaaagctgactcgacttgctgttcagatcggaaaggccgggttgctcatgagcgctttaacagtgttcatcctgattttgtactttgtcatcgacaacttcgtcattaacaggcgtccatggctaccagaatgcactcccatttatatccagtatttcgtgaagtttttcattatagggatcaccgtgttagtggtagcggtccccgagggactgcctctggcggtcaccatttcactggcttattccgtaaagaagatgatgaaggacaataacttggtacgtcatctggacgcttgcgaaactatgggaaacgctacggctatctgttcagacaagacggggacactgaccatgaatagaatgacagtagtccaagcatatatcggtggcatccactaccgccagattcccagccctgatgtctttcttccaaaggtgctcgatctgatcgtgaacggcatttccattaactccgcatacacctctaagattcttcctcccgagaaggagggcggtttaccacggcaggtgggcaacaaaacggaatgcgcacttttaggatttgtcaccgatctgaaacaagattaccaagccgtgcggaatgaagtcccagaggagaaactatacaaggtctacaccttcaactctgttcgaaaaagcatgtcaactgtgattcgcaatccaaacggcggatttaggatgtattcaaaaggagcgagcgagatcatcctccggaaatgcaatcgtatcttagaccggaagggagaagccgtgccctttaaaaacaaggacagggacgacatggtgaggacggtgatcgagccaatggcctgcgatggtctcagaactatctgcatcgcatacagggacttcgatgatacagagccgtcttgggacaatgaaaatgagatcctgaccgagttaacatgcattgccgttgtgggcattgaagaccccgtgcgccccgaagtgccagatgctatcgccaagtgcaagcaggccggtattactgtgcggatggtcaccggcgataatatcaatacagcgcgggcaattgctactaagtgtgggatcctgactccaggcgacgacttcctgtgcttagaaggcaaggagtttaaccggctaatccggaatgagaagggtgaggtagagcaggaaaaactcgataaaatctggccaaagctgcgggttcttgccaggagcagccccactgacaaacatactctggtgaaaggaattatcgactccactgtcggtgaacaccgccaagtcgtagccgttactggagatggcaccaacgacggccccgccctgaagaaggctgacgtgggattcgccatggggatagccggcaccgacgtcgctaaggaggcaagcgatataattttaacagatgataatttcacttctattgttaaggcagtgatgtggggccgcaatgtatacgactcaataagtaaatttcttcaatttcagctcacagtcaacgtcgttgcggtgattgtagccttcaccggagcctgcatcactcaggattctccacttaaagccgtacagatgctgtgggtcaaccttattatggatacattcgcaagtctggccttagcgaccgaaccaccaacggagtccttgctgaaaagacgaccatatggaagaaacaaaccactgatctcccggacaatgatgaaaaatatcttaggccatgccttctaccagctaattgtgatttttatccttgtgtttgcaggtgagaaattttttgacatcgactcaggtaggaaggcccccttgcattccccaccctcccagcattataccattgtattcaacacgttcgtgcttatgcagttatttaacgagatcaattctagaaaaatacatggcgagaagaatgtcttcagcggcatataccggaacattattttctgtagcgtggttttgggcacctttatctgccagatctttatagtcgaattcggaggtaagccattctcatgcacatctttatctctctctcagtggctgtggtgcctctttatcggtataggcgagctcctgtggggccaatttattagcgcaatccctaccaggagtctgaagtttcttaaagaagcaggccatggaacaacaaaggaggaaattacaaaggatgcagaaggactggacgagatcgatcacgcagaaatggaacttagaaggggtcagattttatggttcagggggctgaacagaatccagactcagatcgatgtaatcaacactttccaaaccggcgcttctttcaagggcgtgttaaggcgacagaatatgggccagcatttggacgtgaagctggtccctagttcatcctacgtggcagtcgctcccgttaaaagctcacccactacctcagtgcccgccgtaagtagcccgcctatggggaatcagtcaggacagtctgtgccatag

SEQ ID NO: 18333 - DNA, 3405 bp, Artificial Sequence
  derived and/or modified sequence
atgaccaatccttcggacagggtcctgcctgccaattcaatggccgagtcaagagagggcgattttggttgtaccgtgatggagttgcgaaagctgatggaactgcgcagccgagatgccctgacacagatcaacgtgcattatggcggggttcaaaatttgtgctcccggctgaagacctctccagtggaaggcctgtccgggaatcccgctgacttagaaaagcggcgacaggtctttggacacaatgtaatcccccctaagaagcccaagacattcctggaactggtatgggaggcactccaggatgtgacgctgataatcctggagattgccgcaatcatttccctagtgctaagtttttaccgccctgccggggaagaaaatgaattatgtggccaagttgccacaactccagaggacgaaaacgaagcacaggccggctggattgagggcgcagccatccttttctctgtgataattgttgtgttggtgactgccttcaatgactggagcaaagaaaagcagttccgcgggctccaatgtagaatagagcaggagcagaaattttcaattatcaggaacggtcaactgattcagctgcccgtagccgagatagtggtgggagacatcgcacaggtgaagtatggcgatctcctgccggctgatggaatcctgatccagggaaacgatctgaagatcgatgagtctagcctgacaggagaaagcgaccatgtgaagaagtcgctcgacaaggatccaatgcttctgagcggcacacatgtcatggaggggagcggcaggatggttgtgaccgctgtgggagtaaactctcagacggggattatcctgaccctgctgggcgtgaacgaggacgacgagggagaaaagaaaaaaaagggtaagaagcaaggagttcccgaaaataggaataaggctaaaacacaggacggtgtcgccctcgaaatacagcccttaaactctcaggaaggcattgacaatgaagaaaaagacaagaaggccgtaaaagtgccgaaaaaggagaagtcagtgttgcagggaaaattaactcgactggccgtccagatagggaaggccggactcctcatgtccgcccttaccgtatttatacttattctctattttgtgattgacaattttgtaattaaccgtagaccttggctgcccgaatgcacccctatctatatccaatacttcgtcaaattctttattatcggcattactgtgctggtcgtggcagtgcccgagggtttgccccttgccgtcacaatatcattggcgtactctgtgaaaaaaatgatgaaggataataatttagtaagacacttggatgcttgtgaaacaatgggcaacgccactgccatttgctctgacaaaactggcaccctcactatgaacaggatgaccgtagtgcaggcatacattgggggcatacactatcggcagatcccttcacctgacgtgtttctgccaaaggtcctcgacctcatcgtgaacgggatctctattaatagcgcttacacctcgaagatcctcccccctgaaaaagagggagggctaccccggcaagtggggaataaaacagaatgcgccctcctgggttttgtcaccgacctgaaacaggactaccaggctgtgagaaacgaagtgcccgaagaaaaattatataaagtttataccttcaactcagtgcgcaaaagtatgtccaccgtcatcagaaatccgaatgggggcttccgcatgtattcaaagggtgcatcagagataatactgagaaaatgcaatagaattttagaccggaaaggagaggccgtcccatttaaaaataaggaccgcgacgacatggttcgtaccgttattgagcccatggcttgcgacggtctaagaaccatctgcatcgcctatcgcgatttcgacgataccgaaccatcatgggacaacgaaaatgagattttgaccgagcttacctgtattgcagtggtgggtattgaggaccctgttcggccagaagtgccagacgcaatcgccaagtgcaagcaggctggcataaccgtgaggatggtgacaggcgacaacatcaacacagccagagcaatagctacgaagtgcggtattctcaccccaggggacgactttttgtgtctcgaaggcaaggaattcaatagattaatacgcaacgagaagggagaggtagaacaagagaaacttgacaaaatttggccaaagctgcgcgtactggcacgctcaagccctactgacaagcatactctggttaagggaatcatcgactccactgtgggcgaacaccgtcaggtggtcgcagtgacaggggatgggaccaacgatggccccgccctgaagaaggccgatgtgggttttgccatgggcatcgccggtacagacgtcgccaaagaagcttctgacatcatcctcactgacgacaacttcacgtccattgttaaagcagtcatgtggggcaggaacgtgtatgattccatatcaaagtttctgcagtttcagctgaccgtaaatgtcgtggccgttattgttgcctttaccggtgcatgcatcacacaggacagtcctcttaaagccgttcaaatgctgtgggtcaacctcattatggatacctttgcttcactagcactggccactgagcccccgaccgagagccttctcaaaagacgaccatacggccggaataagcctcttattagccggaccatgatgaaaaacatcctgggccacgccttctatcaactcatcgtgattttcatactcgtgtttgccggcgagaaattctttgacattgactctggccgcaaggcacccctgcattcacccccttcccaacattacaccattgtttttaacacatttgtgctgatgcagctattcaacgagattaacagtaggaaaattcacggtgaaaaaaatgtgttctctgggatctaccgcaatatcatcttttgctcggtagtgctgggtacgtttatctgtcaatttatctctgctatccccaccagaagcttaaaatttttgaaggaagcaggtcacggcaccacaaaagaggaaataacgaaggacgccgaagggctggacgaaattgatcacgcagaaatggaacttcggcggggacagatcctttggtttagaggtctgaatcggattcagactcagattgatgtaataaatacttttcagaccggcgcctcctttaagggagttcttcgccggcagaacatggggcagcacctggacgtgaagctggtgccatcatccagctacgtggccgttgccccagtcaaaagcagccccacgacctcggtgcctgccgtaagctcccctccaatggggaaccagagcgggcaatctgtgccctag

SEQ ID NO: 18334 - DNA, 3513 bp, Artificial Sequence
  derived and/or modified sequence
atgaccaaccccagcgacagagtgctgcctgccaacagcatggccgagagccgggagggggactttggctgcaccgtgatggagctgaggaagctgatggagctgcggagcagagatgccctgacccagatcaacgtgcactacggcggcgtgcagaacctgtgcagccggctgaagaccagccctgtggagggcctgagcggcaacccagctgacctggagaagaggcggcaggtgtttggccacaacgtcatcccccccaagaagcccaagaccttcctggagctggtgtgggaggccctgcaggatgtgaccctcatcatcctggagattgctgccatcatcagcctggtgctgtccttctacagacctgctggggaggagaatgagctgtgtggccaggtggccaccaccccagaagatgaaaatgaggcccaggccggctggattgagggcgccgccatcctcttcagcgtcatcatcgtggtgctggtgacagccttcaatgactggagcaaggagaagcagttccggggcctgcagtgccgcatcgagcaggagcagaagttcagcatcatcagaaatggccagctgatccagctgcctgtggccgagatcgtggtgggggacatcgcccaggtgaagtacggggacctgctgcctgcagatggcatcctgatccagggcaatgacctgaagattgatgagagcagcctgaccggggagagtgaccacgtgaagaagagcctggacaaggaccccatgctgctgagcggcacccacgtgatggagggcagcggccgcatggtggtgacagctgtgggcgtgaacagccagacaggcatcatcctgaccctgctgggcgtgaatgaagatgatgaaggagagaagaagaagaagggcaagaagcagggcgtgcctgagaacagaaacaaggccaagacccaggatggagtggccctggagatccagcccctgaacagccaggagggcatcgacaatgaggagaaggacaagaaggctgtgaaggtgcccaagaaggagaagtctgtgctgcagggcaagctgacccggctggccgtgcagatcggcaaggccggcctgctgatgtctgccctgaccgtcttcatcctgatcctgtacttcgtcatcgacaactttgtgatcaacagaagaccctggctgcctgaatgtacccccatctacatccagtactttgtgaagttcttcatcatcggcatcaccgtgctggtggtggccgtgcctgagggcctgcccctggccgtgaccatcagcctggcctacagcgtgaagaagatgatgaaggacaacaacctggtgcgccacctggatgcctgtgagaccatgggaaatgccacagccatctgcagcgacaagacaggcaccctgaccatgaacaggatgacagtggtgcaggcctacatcggcggcatccactaccggcagatccccagcccagatgtgttcctgcccaaggtgctggacctgattgtgaatggcatcagcatcaacagcgcctacaccagcaagatcctgcccccagagaaggagggcggcctgccccggcaggtgggcaacaagacagaatgtgccctgctgggctttgtgacagacctgaagcaggactaccaggccgtgagaaatgaggtgcctgaggagaagctgtacaaggtgtacaccttcaacagcgtgaggaagtccatgagcaccgtcatccggaaccccaatggaggcttcaggatgtacagcaaaggagccagcgagatcatcctgaggaagtgcaaccgcatcctggacaggaagggggaggccgtgcccttcaagaacaaggacagagatgacatggtgaggacagtgattgagcccatggcctgtgatggcctgcggaccatctgcatcgcctacagagactttgatgacacagagcccagctgggacaatgaaaatgagatcctgacagagctgacctgcatcgctgtggtgggcattgaagatcctgtgcggcctgaggtgcctgatgccatcgccaagtgcaagcaggccggcatcaccgtgaggatggtgactggagacaacatcaacacagcccgggccatcgccaccaagtgtggcatcctgaccccaggagatgacttcctgtgcctggagggcaaggagttcaacagactcatcagaaatgaaaaaggagaggtggagcaggagaagctggacaagatctggcccaagctgcgggtgctggcccggagcagccccacagacaagcacaccctggtgaagggcatcatcgacagcacagtgggggagcaccggcaggtggtggccgtgactggagatggcaccaatgatggccctgccctgaagaaggcagatgtgggctttgccatgggcattgctggaacagatgtggccaaggaggccagtgacatcatcctgacagatgacaacttcaccagcatcgtgaaggctgtgatgtggggcagaaatgtgtatgacagcatcagcaagttcctgcagttccagctgactgtgaatgtggtggccgtcatcgtggccttcaccggggcctgcatcacccaggacagccccctgaaggctgtgcagatgctgtgggtgaacctgatcatggacacctttgccagcctggccctggccacagagcccccaacagagagcctgctgaagaggcggccctatggaagaaacaagcccctcatcagcaggaccatgatgaagaacatcctgggccacgccttctaccagctgattgtcatcttcatcctggtgtttgctggggagaagttctttgacatcgacagcggcaggaaggcccccctgcacagcccccccagccagcactacaccatcgtgttcaacacctttgtgctgatgcagctgttcaatgagatcaacagcaggaagatccacggggagaagaatgtgttttctggcatctacagaaacatcatcttctgcagcgtggtgctgggcaccttcatctgccagatcttcatcgtggagtttggaggcaagcccttcagctgcaccagcctgagcctgagccagtggctgtggtgcctcttcatcggcattggagagctgctgtggggccagttcatcagcgccatccccaccaggagcctgaagttcctgaaggaggccggccacggcaccaccaaggaggagatcaccaaggatgctgagggcctggatgaaattgaccacgccgagatggagctgcggcggggccagatcctgtggttccggggcctgaaccgcatccagacccagattgatgtgatcaacaccttccagacaggagccagcttcaagggcgtgctgcggcggcagaacatgggccagcacctggatgtgaagctggtgcccagcagcagctatgtggccgtggcccctgtgaagagcagccccaccacctctgtgcctgctgtgagcagcccccccatgggcaaccagagcggccagagcgtgccctag

SEQ ID NO: 18335 - DNA, 390 bp, Artificial Sequence
  derived and/or modified sequence
tgaattggagagctgctgtggggccagttcatcagcgccatccccaccaggagcctgaagttcctgaaggaggccggccacggcaccaccaaggaggagatcaccaaggatgctgagggcctggatgaaattgaccatgctgagatggagctgcggcggggccagatcctgtggttccggggcctgaaccgcatccagacccagattgatgtgatcaacaccttccagacaggagccagcttcaagggcgtgctgcggcggcagaacatgggccagcacctggatgtgaagctggtgcccagcagcagctatgtggccgtggcccctgtgaagagcagccccaccacctctgtgcctgctgtgagcagcccccccatgggcagcgagtag

SEQ ID NO: 18336 - DNA, 3477 bp, Artificial Sequence
  derived and/or modified sequence
atgaccaaccccagcgacagagtgctgcctgccaacagcatggccgagagccgggagggggactttggctgcaccgtgatggagctgaggaagctgatggagctgcggagcagagatgccctgacccagatcaacgtgcactacggcggcgtgcagaacctgtgcagccggctgaagaccagccctgtggagggcctgagcggcaacccagctgacctggagaagaggcggcaggtgtttggccacaacgtcatcccccccaagaagcccaagaccttcctggagctggtgtgggaggccctgcaggatgtgaccctcatcatcctggagattgctgccatcatcagcctggtgctgtccttctacagacctgctggggaggagaatgagctgtgtggccaggtggccaccaccccagaagatgaaaatgaggcccaggccggctggattgagggcgccgccatcctcttcagcgtcatcatcgtggtgctggtgacagccttcaatgactggagcaaggagaagcagttccggggcctgcagtgccgcatcgagcaggagcagaagttcagcatcatcagaaatggccagctgatccagctgcctgtggccgagatcgtggtgggggacatcgcccaggtgaagtacggggacctgctgcctgcagatggcatcctgatccagggcaatgacctgaagattgatgagagcagcctgaccggggagagtgaccacgtgaagaagagcctggacaaggaccccatgctgctgagcggcacccacgtgatggagggcagcggccgcatggtggtgacagctgtgggcgtgaacagccagacaggcatcatcctgaccctgctgggcgtgaatgaagatgatgaaggagagaagaagaagaaggccaagacccaggatggagtggccctggagatccagcccctgaacagccaggagggcatcgacaatgaggagaaggacaagaaggctgtgaaggtgcccaagaaggagaagtctgtgctgcagggcaagctgacccggctggccgtgcagatcggcaaggccggcctgctgatgtctgccctgaccgtcttcatcctgatcctgtacttcgtcatcgacaactttgtgatcaacagaagaccctggctgcctgaatgtacccccatctacatccagtactttgtgaagttcttcatcatcggcatcaccgtgctggtggtggccgtgcctgagggcctgcccctggccgtgaccatcagcctggcctacagcgtgaagaagatgatgaaggacaacaacctggtgcgccacctggatgcctgtgagaccatgggaaatgccacagccatctgcagcgacaagacaggcaccctgaccatgaacaggatgacagtggtgcaggcctacatcggcggcatccactaccggcagatccccagcccagatgtgttcctgcccaaggtgctggacctgattgtgaatggcatcagcatcaacagcgcctacaccagcaagatcctgcccccagagaaggagggcggcctgccccggcaggtgggcaacaagacagaatgtgccctgctgggctttgtgacagacctgaagcaggactaccaggccgtgagaaatgaggtgcctgaggagaagctgtacaaggtgtacaccttcaacagcgtgaggaagtccatgagcaccgtcatccggaaccccaatggaggcttcaggatgtacagcaaaggagccagcgagatcatcctgaggaagtgcaaccgcatcctggacaggaagggggaggccgtgcccttcaagaacaaggacagagatgacatggtgaggacagtgattgagcccatggcctgtgatggcctgcggaccatctgcatcgcctacagagactttgatgacacagagcccagctgggacaatgaaaatgagatcctgacagagctgacctgcatcgctgtggtgggcattgaagatcctgtgcggcctgaggtgcctgatgccatcgccaagtgcaagcaggccggcatcaccgtgaggatggtgactggagacaacatcaacacagcccgggccatcgccaccaagtgtggcatcctgaccccaggagatgacttcctgtgcctggagggcaaggagttcaacagactcatcagaaatgaaaaaggagaggtggagcaggagaagctggacaagatctggcccaagctgcgggtgctggcccggagcagccccacagacaagcacaccctggtgaagggcatcatcgacagcacagtgggggagcaccggcaggtggtggccgtgactggagatggcaccaatgatggccctgccctgaagaaggcagatgtgggctttgccatgggcattgctggaacagatgtggccaaggaggccagtgacatcatcctgacagatgacaacttcaccagcatcgtgaaggctgtgatgtggggcagaaatgtgtatgacagcatcagcaagttcctgcagttccagctgactgtgaatgtggtggccgtcatcgtggccttcaccggggcctgcatcacccaggacagccccctgaaggctgtgcagatgctgtgggtgaacctgatcatggacacctttgccagcctggccctggccacagagcccccaacagagagcctgctgaagaggcggccctatggaagaaacaagcccctcatcagcaggaccatgatgaagaacatcctgggccacgccttctaccagctgattgtcatcttcatcctggtgtttgctggggagaagttctttgacatcgacagcggcaggaaggcccccctgcacagcccccccagccagcactacaccatcgtgttcaacacctttgtgctgatgcagctgttcaatgagatcaacagcaggaagatccacggggagaagaatgtgttttctggcatctacagaaacatcatcttctgcagcgtggtgctgggcaccttcatctgccagatcttcatcgtggagtttggaggcaagcccttcagctgcaccagcctgagcctgagccagtggctgtggtgcctcttcatcggcattggagagctgctgtggggccagttcatcagcgccatccccaccaggagcctgaagttcctgaaggaggccggccacggcaccaccaaggaggagatcaccaaggatgctgagggcctggatgaaattgaccacgccgagatggagctgcggcggggccagatcctgtggttccggggcctgaaccgcatccagacccagattgatgtgatcaacaccttccagacaggagccagcttcaagggcgtgctgcggcggcagaacatgggccagcacctggatgtgaagctggtgcccagcagcagctatgtggccgtggcccctgtgaagagcagccccaccacctctgtgcctgctgtgagcagcccccccatgggcaaccagagcggccagagcgtgccctag

SEQ ID NO: 18337 - DNA, 3405 bp, Artificial Sequence
  derived and/or modified sequence
atgaccaaccccagcgacagagtgctgcctgccaacagcatggccgagagccgggagggggactttggctgcaccgtgatggagctgaggaagctgatggagctgcggagcagagatgccctgacccagatcaacgtgcactacggcggcgtgcagaacctgtgcagccggctgaagaccagccctgtggagggcctgagcggcaacccagctgacctggagaagaggcggcaggtgtttggccacaacgtcatcccccccaagaagcccaagaccttcctggagctggtgtgggaggccctgcaggatgtgaccctcatcatcctggagattgctgccatcatcagcctggtgctgtccttctacagacctgctggggaggagaatgagctgtgtggccaggtggccaccaccccagaagatgaaaatgaggcccaggccggctggattgagggcgccgccatcctcttcagcgtcatcatcgtggtgctggtgacagccttcaatgactggagcaaggagaagcagttccggggcctgcagtgccgcatcgagcaggagcagaagttcagcatcatcagaaatggccagctgatccagctgcctgtggccgagatcgtggtgggggacatcgcccaggtgaagtacggggacctgctgcctgcagatggcatcctgatccagggcaatgacctgaagattgatgagagcagcctgaccggggagagtgaccacgtgaagaagagcctggacaaggaccccatgctgctgagcggcacccacgtgatggagggcagcggccgcatggtggtgacagctgtgggcgtgaacagccagacaggcatcatcctgaccctgctgggcgtgaatgaagatgatgaaggagagaagaagaagaagggcaagaagcagggcgtgcctgagaacagaaacaaggccaagacccaggatggagtggccctggagatccagcccctgaacagccaggagggcatcgacaatgaggagaaggacaagaaggctgtgaaggtgcccaagaaggagaagtctgtgctgcagggcaagctgacccggctggccgtgcagatcggcaaggccggcctgctgatgtctgccctgaccgtcttcatcctgatcctgtacttcgtcatcgacaactttgtgatcaacagaagaccctggctgcctgaatgtacccccatctacatccagtactttgtgaagttcttcatcatcggcatcaccgtgctggtggtggccgtgcctgagggcctgcccctggccgtgaccatcagcctggcctacagcgtgaagaagatgatgaaggacaacaacctggtgcgccacctggatgcctgtgagaccatgggaaatgccacagccatctgcagcgacaagacaggcaccctgaccatgaacaggatgacagtggtgcaggcctacatcggcggcatccactaccggcagatccccagcccagatgtgttcctgcccaaggtgctggacctgattgtgaatggcatcagcatcaacagcgcctacaccagcaagatcctgcccccagagaaggagggcggcctgccccggcaggtgggcaacaagacagaatgtgccctgctgggctttgtgacagacctgaagcaggactaccaggccgtgagaaatgaggtgcctgaggagaagctgtacaaggtgtacaccttcaacagcgtgaggaagtccatgagcaccgtcatccggaaccccaatggaggcttcaggatgtacagcaaaggagccagcgagatcatcctgaggaagtgcaaccgcatcctggacaggaagggggaggccgtgcccttcaagaacaaggacagagatgacatggtgaggacagtgattgagcccatggcctgtgatggcctgcggaccatctgcatcgcctacagagactttgatgacacagagcccagctgggacaatgaaaatgagatcctgacagagctgacctgcatcgctgtggtgggcattgaagatcctgtgcggcctgaggtgcctgatgccatcgccaagtgcaagcaggccggcatcaccgtgaggatggtgactggagacaacatcaacacagcccgggccatcgccaccaagtgtggcatcctgaccccaggagatgacttcctgtgcctggagggcaaggagttcaacagactcatcagaaatgaaaaaggagaggtggagcaggagaagctggacaagatctggcccaagctgcgggtgctggcccggagcagccccacagacaagcacaccctggtgaagggcatcatcgacagcacagtgggggagcaccggcaggtggtggccgtgactggagatggcaccaatgatggccctgccctgaagaaggcagatgtgggctttgccatgggcattgctggaacagatgtggccaaggaggccagtgacatcatcctgacagatgacaacttcaccagcatcgtgaaggctgtgatgtggggcagaaatgtgtatgacagcatcagcaagttcctgcagttccagctgactgtgaatgtggtggccgtcatcgtggccttcaccggggcctgcatcacccaggacagccccctgaaggctgtgcagatgctgtgggtgaacctgatcatggacacctttgccagcctggccctggccacagagcccccaacagagagcctgctgaagaggcggccctatggaagaaacaagcccctcatcagcaggaccatgatgaagaacatcctgggccacgccttctaccagctgattgtcatcttcatcctggtgtttgctggggagaagttctttgacatcgacagcggcaggaaggcccccctgcacagcccccccagccagcactacaccatcgtgttcaacacctttgtgctgatgcagctgttcaatgagatcaacagcaggaagatccacggggagaagaatgtgttttctggcatctacagaaacatcatcttctgcagcgtggtgctgggcaccttcatctgccagttcatcagcgccatccccaccaggagcctgaagttcctgaaggaggccggccacggcaccaccaaggaggagatcaccaaggatgctgagggcctggatgaaattgaccacgccgagatggagctgcggcggggccagatcctgtggttccggggcctgaaccgcatccagacccagattgatgtgatcaacaccttccagacaggagccagcttcaagggcgtgctgcggcggcagaacatgggccagcacctggatgtgaagctggtgcccagcagcagctatgtggccgtggcccctgtgaagagcagccccaccacctctgtgcctgctgtgagcagcccccccatgggcaaccagagcggccagagcgtgccctag

SEQ ID NO: 18338 - DNA, 3513 bp, Artificial Sequence
  derived and/or modified sequence
atgaccaaccccagcgaccgggtgctgcccgccaacagcatggccgagagtcgggagggggactttggttgcacggtgatggagctgcggaagctgatggaacttcgtagccgagacgccctgactcagatcaatgtgcactacgggggcgttcagaatctgtgttctagattaaaaacttcgcccgtggaaggccttagcggcaaccccgccgatctggaaaaacgccgacaggtgttcgggcataacgtgattccccctaaaaagcccaagactttcttggaactggtctgggaggccctccaggacgtaacactaatcatattagaaatcgcagctatcatcagtcttgtgctttctttttatagacccgccggtgaggaaaacgagttgtgcggccaagttgccacaacccctgaagatgagaacgaagctcaagctggttggattgaaggggcagccattctgtttagtgtgattatcgtggtgcttgttactgctttcaacgactggtcaaaagagaaacaattcaggggtttgcagtgtagaatcgagcaggaacaaaagttttcaatcatcaggaacggacagcttatacagttaccagttgctgagattgtggttggtgatatcgcccaggtgaagtacggcgatctgctgcccgccgacggaatcctgatccaaggaaacgacctgaagattgatgagagtagtctgaccggtgaatccgaccatgtcaaaaagtccctcgacaaggatcctatgctgttgtcaggaacacacgtgatggagggctcgggtcggatggttgtaactgcggtgggggtgaattctcagactggtatcatcctcacgcttctcggtgtgaacgaggatgatgagggtgaaaagaaaaagaaaggaaaaaaacagggtgtccctgagaatcgcaataaggccaaaacacaagacggagtcgccttggaaatccagccattgaattcgcaagagggaattgataacgaggagaaggataagaaggcagtgaaagttccaaagaaggaaaaatccgtattacagggtaagctaacacgactcgcagtacagataggaaaagctgggctgctgatgagtgctcttaccgtgtttatcctgatcctgtattttgtcatagataatttcgtcatcaacaggaggccctggctaccggagtgcacccccatttatatccagtacttcgtgaagttttttattataggcataactgttcttgtggtcgctgtgcccgagggcctacctctggctgttacaatctctcttgcctactccgtcaaaaaaatgatgaaggataacaacctggtgcgccacctcgatgcctgtgagaccatgggcaacgcaaccgccatctgcagcgacaaaacaggcacgcttactatgaaccggatgacggtggttcaagcttatattggaggaattcactatcgccaaatccctagtccagatgtgtttctgccgaaggtactggatcttattgttaacggtatctcaatcaactcagcttacacttcaaaaatcctgccccctgagaaagaggggggactcccacgtcaggttggtaataagactgaatgtgccctgcttggcttcgtgacggacctgaagcaggactatcaggcggtccgtaacgaggttcctgaggagaaactttataaagtctatacgtttaattcagttcgaaaatccatgagcacagttattagaaaccccaatggcgggttccgaatgtatagtaagggggcttccgagatcattctgagaaagtgtaacaggatactggatcgcaagggtgaagccgttccatttaagaacaaagacagggatgatatggtcagaaccgttatcgagccaatggcatgcgacgggctgcgcaccatctgcatcgcatatcgcgatttcgacgacacagaaccctcgtgggacaatgagaatgagatcctcacagagctcacttgtatagctgtagtcgggatcgaagatcccgtacggccagaggtccctgacgccatcgccaagtgtaagcaagcaggaatcactgtgcgaatggtaaccggggataacatcaacacggcccgcgccatcgccacaaaatgcggcatcctgactcccggcgacgactttttgtgtctggaaggcaaagaattcaatcgacttattagaaacgagaaaggagaagtggagcaggagaagctggacaagatctggcctaaactaagggtccttgcacggtcgagtcccacggataaacacactctcgtaaaagggatcatagatagcacagttggagagcatcgccaggtggttgctgtcaccggagatggcaccaacgacggccccgccttgaagaaagccgatgtgggattcgccatgggaattgcgggtactgatgttgctaaggaggcaagcgacattattctgactgatgacaacttcacctctatcgtcaaggcagtgatgtggggtcggaacgtttacgattcaataagcaagttccttcagttccagctaacagtcaacgtggtcgcagtgatcgtcgccttcacaggggcttgcatcactcaggattccccactgaaggcggtgcaaatgctatgggtcaatcttattatggatacttttgccagcctcgcattggctaccgagcccccgacggagtctctccttaagcgaagaccctatggtagaaacaagcctctgatctctagaactatgatgaaaaacatactcggtcatgccttttaccagctgatcgttatttttatccttgtgtttgcaggagaaaagttcttcgacatcgacagtgggagaaaagcacctctgcacagcccgccctctcagcactatacaatcgtgtttaacactttcgtgctcatgcagttgttcaacgagatcaacagtagaaaaattcatggagagaagaacgtattctccggaatataccggaacatcattttttgttcagtcgtcctgggcaccttcatctgccaaatctttatagttgaatttgggggcaaacccttttcttgtaccagtctctctctgagtcagtggttatggtgtctgttcatcggtataggtgaactactgtggggtcagtttatcagtgctatccctactcgcagcctgaaattcttgaaagaagcagggcatggaaccacgaaggaggagatcaccaaagatgcggagggcttggacgagatagatcatgccgaaatggagctgcgccgaggccagattctgtggttcagaggactgaataggatccagacgcagattgatgtaattaatactttccagaccggtgccagtttcaaaggagtcctgcgcaggcagaacatgggacagcatctggacgtaaaactcgtgccaagctcaagttatgtggcggtggccccagtaaaatcctcacccactacctctgtgcctgcagtgagttctcctcccatgggcaaccagtccgggcagtcagtgccctag

SEQ ID NO: 18339 - DNA, 390 bp, Artificial Sequence
  derived and/or modified sequence
tgaatcggcgagctgctgtggggccagttcatcagcgccatccccactaggtctctcaagttcttgaaagaagccggtcatggaaccaccaaggaggagattacaaaggatgccgagggtctggacgaaatagaccatgccgagatggagctgaggcgaggacagattctgtggttcagaggactgaataggattcagacccagattgacgtcattaacacctttcagacaggtgcatcttttaagggagttttaagacggcagaacatggggcagcacctggatgtgaagctcgtgccgtctagtagttatgtcgcagtggcacctgttaagtcatctcccactacttccgtgccagccgtgtcgtcccccccaatgggaagcgagtag

SEQ ID NO: 18340 - DNA, 3513 bp, Artificial Sequence
  derived and/or modified sequence
atgaccaaccccagcgaccgggtgctgcccgccaacagcatggccgaaagtcgtgagggggatttcggatgcaccgtcatggaactccgcaaattgatggagcttcggagtcgtgacgcccttacacagattaacgtccattacggaggcgttcagaatctctgtagccgcctgaagacgtctcctgtggagggactaagtgggaaccccgctgatctggaaaagaggagacaggtttttggacacaacgtcatccctccaaagaagccaaagaccttcttagagctggtctgggaggcactccaggatgttacactgattattctggagatcgccgctattatctccttggtgctgagcttctaccggcctgctggagaggaaaacgagctgtgcgggcaggtagctacgactccagaggatgaaaatgaggctcaggctggctggatcgagggagccgctattctctttagcgtgattatcgtcgtgctggtgacagcattcaacgattggtcgaaagaaaaacaattccgcggtctgcagtgccggatcgaacaagagcaaaaattctccattataagaaacggccaactcatccagctaccagtggccgagatagtagtcggcgacatcgcacaggtaaaatacggagacctattacctgcggacggtatattgatacaagggaacgatttgaagatcgacgagtccagtcttactggtgaaagtgatcatgtgaagaaaagtcttgataaggaccctatgcttctctccgggacacacgttatggaaggctccggcagaatggtggtgacagcagtgggagtgaattcacagaccggcattatcctgactctattgggcgtcaacgaagacgatgagggcgagaagaagaagaagggaaagaaacagggggtgccggagaacagaaacaaggctaaaactcaggacggggtggccctggagatccaacctctgaactcacaagagggaattgacaacgaagaaaaggacaagaaggccgtgaaggtgcccaagaaggaaaagtcagtgctccaggggaagttgactaggctagctgttcagatcggaaaagccgggcttttaatgtcggctctgactgtgttcattcttattctctacttcgtgatcgacaatttcgttataaaccggcgcccatggttacccgaatgtactccaatttacattcaatacttcgtcaagtttttcatcatcggaatcacagtgctagtcgtggccgttccggagggcctgcccctggcagtgacaatcagcctggcatacagtgtgaagaaaatgatgaaagataataatctggtgcgccaccttgacgcttgtgaaaccatgggaaacgctactgctatctgttccgataaaacaggcacactcaccatgaaccgcatgacggtggtccaggcctatatcggaggaattcattataggcagattcccagccctgatgtgttccttccaaaggtcttggacctcattgtaaatggaatcagtatcaactccgcatacacatcaaagattctgccacctgagaaggaaggaggcttgccacgacaggttgggaacaaaaccgaatgtgcgctgctgggatttgtcaccgatcttaagcaggactaccaggctgttcgcaatgaagtgccagaggaaaagctgtataaagtgtacacattcaattccgtgcggaagagtatgagtactgtgattcggaacccaaacggaggttttcgaatgtactcaaagggcgcctcggagataatattaaggaagtgcaatcggatcctcgaccgaaagggggaagcagtgccattcaaaaataaagacagagacgatatggttcgcactgtcatcgaaccgatggcgtgtgatggcctgaggactatttgcattgcgtaccgcgactttgacgacacagaaccctcctgggacaacgagaatgaaattttgactgagctcacctgcattgccgtggttggcattgaagaccccgtcaggccggaggtgcctgacgccatcgccaaatgtaaacaagccgggattaccgtgcgtatggtgacaggcgacaatattaatacagctcgggctattgccaccaagtgcggtatcctcacccccggagatgattttctttgcctcgagggcaaagaattcaaccgcctgatcaggaacgagaagggtgaggtggagcaggagaaactcgacaagatttggcccaagctgagggtcctcgccaggagttctccaaccgacaagcataccctcgtgaaagggatcatcgactccacagtcggcgagcataggcaagttgtggccgtgactggcgatgggacaaacgacggccctgcactaaagaaagccgacgtcggattcgcaatgggaatagccggcacggatgtggccaaagaagccagtgatataattctgacggacgataatttcaccagcatcgtgaaggccgtaatgtgggggcggaatgtgtatgactcgatctccaaatttttgcagtttcagctaacagtcaacgtggtcgcagtgatcgtggcctttactggagcttgcataacacaggattcccctctgaaggctgtgcagatgctatgggtgaacctgattatggacacatttgcgagcctagcactcgcaactgagcctcccacagagagccttttaaagcggagaccatacggccggaataaacccctcatatctagaaccatgatgaaaaacatcctaggccacgctttttaccagctgatcgtcattttcatcctagtattcgcgggagaaaaattcttcgacatagacagcgggcgcaaggcgcccctacattcaccaccatctcagcactataccattgtatttaacaccttcgttcttatgcagctgtttaatgagattaactcaaggaaaatccatggtgagaagaacgtgttcagcggaatctacaggaatatcattttttgtagcgtcgtgctggggacgtttatttgtcaaatattcatcgtagagttcggggggaagcctttcagttgcacatccctgagtcttagccagtggctgtggtgcctcttcataggaataggagaactcttgtggggacagttcatcagtgccatacctactcgatcgttaaagtttctcaaagaagctggccacgggaccactaaagaagagatcacgaaggatgctgaaggattggacgaaatcgatcacgcagaaatggagttgcgacgaggtcagatactttggtttcgcggcctgaacaggatccaaactcagattgatgtcatcaacacgttccagaccggcgcctctttcaaaggtgtcctgaggcggcagaatatggggcagcatctggatgtgaagcttgtacccagcagttcgtatgtcgctgttgctccagtgaagtcctcccccaccaccagcgtgcctgcagtgagcagcccccctatggggaaccagtctgggcaatctgtcccatag

SEQ ID NO: 18341 - DNA, 3477 bp, Artificial Sequence
  derived and/or modified sequence
atgaccaaccccagcgaccgggtgctgcccgccaacagcatggccgagtcccgagaaggagatttcgggtgtacagtgatggagctgaggaagttaatggagcttcgtagccgagatgccctgacacagattaatgtccactacggtggagttcagaatctgtgctcccgcctgaagactagccctgtagagggcttgagcggcaaccctgctgacttagaaaagcgaaggcaggtgttcggacataatgtgatcccaccgaagaagccaaaaactttcctagagctggtttgggaagccctccaggacgtaacactcattattctggagatcgcagcgatcatatcattagtcctcagtttctatcgccctgccggtgaagagaacgaattatgcggtcaggtggctactaccccagaagacgaaaacgaagcccaggccggctggatcgagggtgctgccatcctgttctctgtgatcatagtagtgctcgtgacagcctttaacgactggtcaaaagaaaaacagtttcgcggcttgcagtgccgtatagaacaggaacagaaattttcaattattcggaacgggcagcttatccagctgcccgtcgcagagattgtcgtaggggatattgcccaggtcaaatacggcgatctcttgcccgccgatggaatattgatccagggcaatgatttgaaaatagacgagagctcattgacaggagagagcgatcacgttaaaaagagcctagataaggacccaatgctcctgtccggcacccatgtcatggagggctctggtaggatggtagtgaccgccgtgggagttaacagtcagacaggaataatcctcacgttgctcggcgtgaacgaagatgacgagggtgaaaaaaagaagaaggctaagacacaggatggtgtggcgctcgagattcagcctctcaactctcaggagggcattgacaacgaagaaaaggataagaaggcggtgaaagttcccaaaaaggaaaagagcgttttgcaaggaaaattgacccgcctggctgtgcaaatcggcaaagctggactcctaatgtcagccctcactgtgtttatcttgatcctgtactttgttatcgataatttcgttattaataggagaccttggctccctgaatgtacccccatctacatccagtacttcgtgaagtttttcattatcgggattaccgtgctggtggtcgcagttcccgagggtctcccactcgcagttaccatcagccttgcgtactctgtgaaaaagatgatgaaggacaacaacttagtccgccatctggacgcctgcgaaactatggggaacgccacagccatctgctccgacaagacaggcaccctgacgatgaacaggatgaccgtggtacaggcttatatcggtggaatccattaccggcagattccaagccctgatgtgtttctccccaaggtcctcgatctcattgtcaacggaatatccattaacagcgcatatacgagcaagattcttcctcctgagaaagaggggggcctgcccaggcaggtcggaaataaaactgagtgcgcactccttggattcgtgactgatctcaagcaggactatcaggctgttaggaacgaggtacctgaagagaagctgtataaggtgtatacattcaatagcgtgcggaaaagcatgtccacagtgatccgcaacccaaatggcggctttcggatgtactcaaagggggcctctgagatcatcctcaggaaatgcaatcgcatactggaccggaagggcgaggcggtgccttttaaaaataaggaccgcgacgacatggtgcgcaccgtgattgagccaatggcttgcgacggcttacgcaccatatgtatagcctacagagactttgatgacaccgaaccaagctgggacaatgaaaacgagattctaaccgaactgacatgcatagccgtggtaggcatcgaggaccccgtcaggcctgaggtgcctgacgctattgccaaatgtaagcaggctggaataaccgtgagaatggtcaccggtgataatatcaacacggcccgcgcaatcgcaacaaaatgtggaatcttaactcctggagatgactttctatgtctggagggcaaagaattcaaccggttgataagaaacgaaaaaggcgaagtggagcaagagaaactggataagatctggcccaagctccgggtgttggctagatctagccctaccgataagcacaccctggtgaaagggatcatcgactccacagtgggcgagcacaggcaagtggtcgccgtcaccggcgatggaactaacgatggcccagctctgaagaaggcagatgtgggattcgcaatgggaattgcaggaacagatgtagccaaggaagcctcagatatcattctgactgatgataacttcacctcgatcgtgaaggccgttatgtggggcaggaatgtctacgactcaataagcaaattcctgcaatttcagttaacagttaacgtggtcgcagtcatagtcgcctttaccggagcctgtattacccaggacagcccgcttaaagccgttcagatgttgtgggtgaacctcatcatggataccttcgcctctctcgctctagccaccgagcctccaacagagagcctccttaagcgcagaccatacggccggaataagcccctaatctcacgaactatgatgaagaatatccttggccatgccttctatcagctgattgttatcttcatccttgtgttcgcaggcgaaaagtttttcgacatagattccgggcggaaagccccactgcacagccccccgagccagcactataccattgtgtttaatacatttgtactcatgcaactctttaacgagataaactcacggaagattcacggggagaaaaatgtgttcagtggcatctatcgcaatatcattttttgtagcgtggtgctgggcaccttcatctgccagatattcatagtggagtttggtggcaaacctttttcatgtacttctctcagcttaagtcagtggctgtggtgtttatttatcgggattggagaactcctatggggacaattcattagcgccatacctaccaggtccctgaagttccttaaggaggccggccatggaaccacaaaggaagagataacaaaagacgccgaaggactggacgaaatagatcacgcagagatggagcttagacggggccagatcctgtggttccgggggctgaaccgcatccagactcaaatcgacgtgattaacactttccagactggcgcgagttttaagggggtcctgcgccgacagaacatgggccaacacctggatgtaaagcttgtgccaagttcttcctatgtggcagtcgcacccgtgaaaagcagtcctactactagtgtgcccgcagtgagcagcccacccatgggaaatcagagcggccagagtgttccgtag

SEQ ID NO: 18342 - DNA, 3405 bp, Artificial Sequence
  derived and/or modified sequence
atgaccaaccccagcgaccgggtgctgcccgccaacagcatggccgagagccgtgagggtgattttggatgcacagtgatggagctgagaaaattgatggaactgcggtctagggacgctctaacccaaatcaatgtgcactacggcggcgttcagaatctttgttctcgcttgaagacaagcccagttgagggtctgagtgggaaccccgcagacctcgagaaacgccggcaagtcttcggccataatgtgatacctcctaaaaaaccgaaaacctttcttgagctcgtttgggaggccctccaggacgtcaccctgattattcttgagatcgcagctattatttctctggtgctgtctttctatagaccagctggtgaggagaacgaactttgcggccaggtggccactactccagaggacgagaacgaggcccaggcaggatggattgagggagccgccatcctgttcagcgtcattatagttgtcctcgtgaccgcatttaacgattggtctaaggaaaagcagttcagaggcctgcaatgccgcatcgagcaggagcagaaattcagcataattcgtaatgggcaactcatacagcttcccgtggcagagatcgtagtgggagacatcgctcaagtgaaatatggggacttgttacctgccgacggaattttaatccagggaaacgatctcaagattgatgaatcctcgctcactggcgagagcgatcacgtgaaaaagtctctggacaaggaccctatgctgttatcgggaactcatgtgatggagggctcaggtaggatggtggttactgccgtaggagttaacagtcaaaccggtatcatcctcacccttcttggcgtgaacgaggatgatgaaggcgaaaaaaaaaaaaaagggaagaagcagggcgtgccagagaaccgcaacaaggctaagacccaagacggggtggccctagaaatccaacctcttaattcgcaggaaggaatcgataacgaagaaaaagataagaaagccgtaaaggtaccaaagaaggaaaaaagtgtactccagggcaagctcactaggcttgccgttcagattggcaaagcaggtttactcatgtctgctctcaccgtgtttatcctgatcttatactttgtgatagacaattttgttatcaaccggcggccttggctccccgaatgtaccccaatttacatacagtacttcgtgaagttctttatcattggcataaccgtcctggtggtggctgtacccgagggcttgcccctggctgtgacaatctccctggcttattcagtcaagaagatgatgaaggataacaacctggtgcggcacctggatgcctgcgagaccatgggtaatgccacggctatatgcagtgacaaaaccgggacacttacgatgaataggatgaccgttgtgcaggcctacataggtggcatccactacaggcagatcccttctcccgatgtctttctgcctaaagtcctcgatctgattgttaatggcatctcaatcaacagcgcttatacttccaagattctcccacctgagaaagagggaggtttgccacggcaggtaggcaataaaactgaatgcgccctgcttgggttcgtgacagacttaaaacaggattaccaggctgtccgcaatgaagtgcctgaggaaaagctctataaagtatacacattcaacagcgttcgcaaatcaatgagtaccgttatacgtaaccccaatggcgggttccggatgtatagcaaaggtgccagcgagattatcctacgcaaatgtaaccgtattcttgataggaaaggcgaggccgtgccatttaagaataaggatcgagatgacatggtacgtactgtgatcgagccgatggcttgtgacggcctccgtacaatctgtattgcctaccgagacttcgacgataccgagccatcttgggataatgagaatgagatcctgactgagctcacttgtattgcagtggtggggatcgaggatccagtccgccctgaagtaccggatgccattgccaaatgcaagcaggccggcattacagttaggatggtgacaggtgacaacatcaatactgcccgggccattgctacaaaatgtgggattcttacaccaggtgatgattttctttgcctggaaggcaaggaatttaaccggttgatcagaaacgaaaaaggggaagtcgaacaagagaaactcgacaaaatttggcctaaactgcgggtgcttgcccgctcctcaccaactgataaacatactctggtgaaagggatcatcgattccacagtgggagaacacaggcaggtggtcgctgttaccggcgacggaactaacgacgggcccgccctgaagaaagctgacgtgggatttgccatggggatcgccgggactgacgttgcgaaagaggcttccgacataatcctgaccgacgacaattttaccagcatcgtgaaggcagtcatgtgggggcgaaatgtctatgacagtatttcaaagttcctgcaatttcagctgactgtgaacgtcgtggccgtgatcgtggcctttactggggcttgtatcacacaagattctccactgaaagctgtccaaatgttgtgggttaacctcattatggatacttttgcctcccttgcgctcgctactgagccacccactgagtccctattaaaaagaaggccatacggaaggaacaaaccattaatcagtagaaccatgatgaagaatatcctgggccacgccttttaccagctcattgtgattttcatcctggtgttcgccggcgaaaagttctttgatatagatagcggtcggaaggcccccctccatagcccgccatcacagcattacaccatcgtctttaacacctttgtgctcatgcaattattcaatgagatcaacagcaggaagatccacggcgagaaaaatgttttttcagggatttacaggaacataatcttttgctctgtggtcctcgggacatttatttgtcagtttatctccgccatcccaacccgatctctgaagtttttgaaagaagctggtcacggaacaaccaaagaagaaataactaaggatgcagagggtttagacgagatcgatcacgcggaaatggagttaaggcgtggtcagatcctttggttcaggggcctgaatcgaattcaaacacagatcgacgtgatcaacacttttcagactggagcctccttcaagggcgtgctgcgtaggcaaaatatggggcaacacctagacgtcaagctcgtcccatccagtagttatgtggccgtagctccagtgaaaagctctccaactaccagcgtcccggcagtctcctcgcctcccatgggaaatcagtccggacaatccgtcccatag

SEQ ID NO: 18343 - DNA, 3513 bp, Artificial Sequence
  derived and/or modified sequence
atgactaacccatcggatagagtcctccccgctaattccatggctgagtccagagagggggattttggttgcaccgtgatggaactcagaaagctcatggagctaaggagcagagatgccttgacacaaattaatgtgcactacggcggtgtgcagaatctatgctcccgtctcaagacgagccctgtcgaagggctgtctggcaatcctgcagacttggaaaagaggcgccaggtattcggacacaatgtgattcccccaaagaagcccaaaacttttctagagctggtctgggaggcactgcaagacgtcacattaattattctagaaattgctgccattatctcactggtcctgtctttttataggccagccggtgaagagaacgaactgtgtgggcaggttgccactactcccgaggacgaaaatgaggcccaagcaggttggatcgagggagcagccatcttatttagcgtcattatcgttgtcttggtgacagctttcaacgattggtccaaggagaaacagttcaggggactgcagtgccggatagaacaagagcaaaagttctctattattcggaacggccagctgatccagctgcctgtggccgaaattgtggtcggcgatatcgctcaggttaagtacggagaccttctccccgctgatggaatactgatccagggcaacgaccttaagatagatgagtcatcactaaccggagaaagtgatcacgttaagaaaagccttgacaaagatcctatgttgctgtctggaactcatgtcatggagggctccggccgaatggtagtgactgccgtgggagtgaactcccagacaggcatcatcctgactctactgggtgtgaacgaggatgacgaaggcgaaaagaagaaaaaggggaagaagcagggggttcccgagaataggaataaggcaaaaacgcaagacggtgttgcgctggagattcaacctctcaattctcaggaaggcattgacaatgaggagaaagataaaaaggccgtgaaagtccctaaaaaagagaagtccgtgttgcagggaaagctgacacgactggcagtccagattggcaaagccggtttgttaatgtccgctcttactgtgttcattctgatcttgtacttcgtcatcgataatttcgtgattaatcgacgcccttggctgcctgaatgcacccctatctatatccagtattttgtaaagttttttattataggaattaccgtgctggtcgtagctgtccccgaaggccttcccctggcagtcaccatctcactcgcctactccgtaaaaaaaatgatgaaagacaacaacctggtgagacaccttgatgcttgtgaaacaatgggaaacgcaaccgccatttgctctgacaagactggtacattgaccatgaacagaatgaccgtggttcaggcctacatcggcggtattcattacagacagatcccctcccccgatgtttttctccccaaggtgttggacctgatagtgaacggaatctctatcaacagcgcctatacctctaaaatactgccgccagagaaggaagggggactgcccagacaggtgggaaataaaacagagtgcgccctgctgggctttgtgaccgacctgaagcaggattaccaggccgtgcggaacgaagttcccgaggaaaaactgtacaaagtgtacacattcaacagtgtgcgcaagtcgatgtccactgtgatcagaaatccaaatgggggattcagaatgtactcaaaaggtgccagcgaaataatactgcggaagtgcaacagaattctggaccgcaaaggggaagccgtgcccttcaagaataaagacagggacgatatggtgcgcactgttatcgaaccaatggcatgcgacggcctacgcactatatgcatagcctaccgggacttcgacgataccgagccatcttgggacaatgaaaatgaaatcctcacggagctgacgtgcattgccgtcgtgggcatcgaggatcccgttcgaccggaggtccctgacgccatcgctaagtgtaagcaggctggtattaccgtgagaatggtgacaggcgataatatcaatacggccagggccattgccactaaatgcggcattcttacccccggagacgattttctgtgtctcgagggtaaagagttcaaccgactgatcagaaacgagaagggcgaggtggagcaggagaaactggacaagatctggccaaaactcagagtgttggctagaagttctccaaccgataaacatactctggttaagggcattattgacagtacagtaggggagcaccggcaagttgtcgccgtaacaggcgatggtacaaacgacggccctgccctgaaaaaggcagacgttggcttcgctatggggatcgccggaactgacgtggcaaaggaagcatccgacatcattctgaccgacgataacttcacttcaattgtcaaggccgtgatgtgggggagaaacgtgtatgactctatcagtaaatttctccagtttcagctgactgtgaacgtcgtggctgtgatcgtcgcatttaccggtgcctgtatcacacaagactcccccctgaaggctgttcagatgctctgggtgaatctgattatggacacctttgcctccctggccctggcaactgagcccccaacagagagcctgctcaagcgacgcccttatgggcgaaataagccactgatctctaggactatgatgaagaatattctcgggcatgcattttaccagctcatcgttatttttatcctggtgtttgcaggcgagaaattcttcgacattgattccggcaggaaggcaccactgcactctcccccatcacagcactacactattgtcttcaatacatttgtgctaatgcagctttttaatgagattaatagtaggaaaatccacggtgagaagaatgtcttctccggcatataccgcaacataattttctgctctgtggtgctggggacgtttatttgtcagatctttattgtggaatttgggggtaaacctttctcctgtacttcactgagtctgagccagtggctctggtgcctgtttattggcatcggagaattgctctgggggcagttcatctcagcgattccaaccagaagcctcaaattcctgaaagaagccggtcatggcactacaaaggaagaaattactaaggatgctgagggcctggatgagatcgaccatgcagaaatggagctgagacggggacagattttgtggttccgcggactaaaccgaattcagacccagatcgatgtaatcaacacatttcagaccggcgcttctttcaagggcgtgttgcggcgtcaaaatatgggccagcacctggatgtcaaactcgtcccatcctccagttacgtggcggttgcccctgtgaaatctagccctactacttcagtgccagccgtttcgtcgcctcccatgggcaaccaaagcggacaaagtgtgccatag

SEQ ID NO: 18344 - DNA, 390 bp, Artificial Sequence
  derived and/or modified sequence
tgaattggggagctcctctgggggcagttcatatcagccattcccacacgctctctgaagtttctcaaagaggccggacacggcaccacgaaggaggaaattaccaaggacgctgagggactggatgagattgatcatgcggaaatggaactgcgcagggggcagatcctgtggttcagaggtctgaatagaattcaaactcagatcgatgtaatcaatacattccagactggagcctcattcaaaggcgttctacgcagacagaacatgggccagcacctggatgtcaaattggtcccttcgtcgtcttatgtggccgttgctcccgtgaaatcctcaccaacaactagcgttcccgcagtgtcctctccacctatgggctccgaatag

SEQ ID NO: 18345 - DNA, 3513 bp, Artificial Sequence
  derived and/or modified sequence
atgacaaacccatctgatagagtgctgccagctaattcaatggccgaatctagagaaggggacttcggatgcactgtgatggagctgcggaagctcatggaacttaggtcacgggacgccctgacacagatcaatgtgcactatggcggtgtccaaaacttatgcagtcgactaaaaacatcgccggtggaaggtctgagtgggaaccccgcagacctggaaaaacggaggcaggtgtttgggcataacgtgattcctcccaagaagcccaagacatttcttgagttggtatgggaggccctgcaggatgtaaccctcataatcctagagattgcagcaatcatctcacttgtccttagcttctatcgcccagcgggagaggaaaatgaactgtgtggccaggttgccaccacacctgaggacgagaatgaagcccaagcaggctggatcgaaggcgctgctatcctgtttagtgtaattatagtagtcctagtgaccgccttcaatgattggtctaaggaaaaacagtttaggggactgcagtgtcgaatagaacaggagcagaaattctctatcattcgaaatgggcaattgatccagctccccgtcgcagaaatcgtcgttggtgatatcgcccaggtgaagtacggcgacctcctgccagctgatggaattctaatacagggaaacgacctgaagattgacgaaagctcccttactggcgaaagcgatcacgtgaagaagtccttggacaaagatccgatgctgttaagcgggacacatgtgatggagggctcaggaagaatggtcgtcacagccgtcggggtaaactcccagacaggcatcatattgaccctgctgggcgtcaacgaggacgacgaaggtgaaaagaaaaaaaagggcaagaaacaaggcgtgcctgagaatagaaataaggctaagacgcaggacggtgtcgcgctcgaaatacaacccctgaattcccaggaaggcatcgacaatgaagagaaggataagaaggcggtcaaggtacctaaaaaagagaaatcagtactgcaaggcaagctgactagactggctgtacagatcggcaaagccggactactaatgtcagcactcaccgtcttcatactgattctctacttcgtgatcgataattttgttatcaatagacgtccatggctccccgaatgtacccctatctacatacagtatttcgtgaaattcttcatcatcgggatcacggtcctggttgtggctgtgcctgagggacttccactcgcagtgaccataagcctggcatacagtgtaaaaaaaatgatgaaagataacaacctcgtccgccatctggatgcgtgcgaaacaatgggcaatgcaactgccatctgttctgacaagactgggacactgaccatgaatcggatgaccgtagttcaagcgtatatcggcggaattcactacagacaaatcccatcacccgatgttttcctccccaaagtgttagacctgatagtgaacggaatctcgatcaattcagcgtatacatcaaaaatcctgccacctgagaaagaaggcggtctgcctagacaggtgggcaataaaactgagtgtgcgttgctcggatttgttacggaccttaagcaagactaccaggccgtgagaaatgaagttcccgaggagaagctgtataaggtttatacattcaattcggtaagaaaaagtatgtccactgtgataaggaatcccaacggaggattccggatgtactctaagggtgcctccgagattatcctcagaaagtgcaaccggatcctggaccggaaaggggaagcagtcccattcaagaataaagaccgggatgatatggtgcgtacagttattgagcccatggcttgtgatggccttaggacaatctgcatagcatacagagattttgatgatactgaacccagctgggacaatgaaaatgagattctaacggagctcacctgcatcgcagtggtgggcattgaggatcccgtgcgtcccgaagtacctgacgcgattgccaaatgtaagcaggccggaatcaccgttaggatggtgaccggggataacatcaacacagcacgtgccatagcaaccaagtgtggcattttgaccccaggcgacgatttcctatgtctggaaggcaaggagttcaaccggctgatcagaaacgagaagggcgaagtcgaacaggagaagctagataaaatctggcccaagctccgggttctggccagaagttccccaacagacaagcacacattggtcaagggaattattgacagcactgtgggcgaacatcggcaggtcgtagcggtgaccggcgacgggaccaacgatggacccgcacttaagaaggccgacgtcggctttgcaatgggaattgcaggcaccgatgtggccaaagaagctagcgacattatcctgactgatgacaacttcacttcgattgtcaaggctgttatgtggggtcggaacgtatatgatagcattagcaagttccttcagttccaattgaccgtgaacgtggtggccgttattgtggcattcactggcgcatgcattacccaggattcacccctgaaagccgtgcagatgttgtgggtgaacttgatcatggacaccttcgcaagccttgccctggccaccgagccccctaccgagtccctcttaaaacgcaggccttacggcagaaacaagccgctgatatcccggactatgatgaaaaatatactggggcatgcgttttatcagctgatcgtgatttttattctggtgtttgccggagaaaagttctttgatatcgatagtgggagaaaggcccctctgcactcccccccaagtcaacattatactatagtgttcaatacatttgtgcttatgcagttgttcaatgaaataaattctaggaagatacatggagagaaaaacgtgttctcaggtatatatcggaacatcatattttgtagtgtcgtcttgggtacatttatctgtcagatattcatcgttgagtttggtggcaagcccttctcttgcacttccttgtctttgagtcagtggttatggtgcctatttatcgggatcggagaacttttgtggggtcagttcattagcgccattccaacccgaagtctcaagtttcttaaagaggccggtcacggcacaaccaaagaggagatcacgaaggatgccgaaggactggacgaaatcgatcatgcggagatggaactgagacggggacaaatcctctggtttcgcggactcaaccggatccagacccaaattgacgtgatcaacacttttcagactggcgcttcctttaaaggcgtccttcgacgacaaaacatgggccagcaccttgatgtcaagttagtgccttcctcctcttacgtggcagtggctccggttaagtcctcccccacgacgtccgtgcctgccgtgtctagtcctcctatgggaaaccagagcggccagagtgtgccatag

SEQ ID NO: 18346 - DNA, 3477 bp, Artificial Sequence
  derived and/or modified sequence
atgacaaaccccagcgatcgggtcttgcctgccaacagcatggctgaaagtagggagggggacttcggttgtacggtgatggagttgcgtaaactgatggagcttagaagcagggacgctctgacccagattaacgtgcattacggtggagtgcagaacctgtgttcgcgactgaaaacgagccccgtggaggggctttccgggaatcccgctgatctggagaagagacggcaagtctttggccacaacgtcattcctcctaaaaagcctaagacattcctggagctcgtttgggaagcacttcaggacgtgaccctgataatactcgaaatcgcagcgattatctccctcgtgctttcattttaccgccctgctggcgaggaaaatgaattgtgcgggcaagtcgcaaccacgcctgaggacgaaaacgaggcacaagccggatggatcgaaggggctgccattctgttttctgtcataatcgtggtcctagtcacagcatttaacgactggtccaaagagaagcagttccgaggtctccagtgtaggatcgaacaggaacagaaattttccatcatccgtaatggtcagttaatacagctccctgtggccgagattgtcgtcggagacatcgcccaggtaaaatacggagacttgctccctgcggatggcatcttgatccagggaaatgacttgaaaatcgatgaatcctccctgacaggagagtccgaccacgtgaagaaaagcctggacaaggatcctatgctgcttagtgggactcacgtcatggagggatctggcagaatggtggtgactgcggtgggtgttaatagccagacggggattatattaacactgttgggagttaatgaggatgatgaaggagagaaaaagaagaaggccaaaactcaggatggcgtagctctggagatacaaccactgaactctcaggaaggtattgacaacgaggagaaagacaagaaggctgtgaaggtccctaaaaaggagaaatcagttttacaggggaagctgacacgcctggctgtgcaaatcggcaaggcgggactgctcatgagtgccctcacggtgttcattctcatactttactttgtgattgataatttcgtgattaaccggagaccctggctgcccgagtgtacacccatttacatacagtatttcgtaaaattcttcataatcggtatcacggtgctcgtcgtcgctgtccctgagggattacccctggccgttacaatttccctggcctattccgtcaagaagatgatgaaggataacaatctcgtgaggcatttggacgcttgcgagacaatgggcaatgccactgccatctgctcggataaaaccgggaccttgaccatgaaccgcatgacagtggttcaagcctacataggtggcatccactatcggcagattcctagccctgatgtgttcctgcccaaggtgctggatctgattgtgaatggcataagcataaacagcgcatatacaagcaaaatccttcctccagagaaggagggtggtctgcccaggcaagttgggaataaaaccgaatgtgcgctgcttggtttcgtaaccgatctcaaacaggattatcaggccgtgcgcaatgaagtccccgaggaaaagctgtacaaggtctacaccttcaatagcgtccgcaagtctatgagcaccgtaataagaaatccgaacgggggattccgaatgtactcaaagggagctagtgaaatcatcctcaggaagtgtaacaggatcctcgatcgtaagggggaagctgtcccctttaagaacaaggacagagacgacatggtgcggacagttattgaacccatggcttgtgacggccttaggacaatttgtatcgcttaccgagatttcgacgacactgaacccagctgggacaacgagaatgagatactgacagaactaacatgtatcgcagtagtaggcatagaggaccctgtgcggccagaagtccctgatgccatagctaaatgcaagcaagctggtattacagtcagaatggtcaccggcgacaacattaatacagccagagccattgctacgaagtgcggaatcctgacacctggtgacgattttctttgtcttgagggtaaggagttcaacagactcattagaaacgaaaagggagaagtagaacaggagaagttggacaaaatctggcccaagctgcgcgtcctcgccaggagctcacccacggataagcacactttggtgaaaggaatcatcgattcaaccgtaggggagcaccgacaggtcgtcgccgtgacaggagatggtaccaacgatggaccagcgctgaagaaagcggacgtggggtttgcgatgggcattgccggaacggacgtcgccaaagaagcatctgacataattctgaccgatgacaacttcacaagcatcgttaaggctgtcatgtggggcagaaacgtgtatgattcgatttctaagtttctgcagttccagctgactgtcaacgtggttgcagtgatcgtcgcttttaccggagcctgtattactcaagactctcctctaaaagccgttcagatgctctgggtgaatctaattatggacacttttgcttctcttgcgctggctacggagccaccgactgagagcttgttgaaaagacgcccttatggaagaaataagcccctcattagccgcacgatgatgaaaaacatattgggacacgccttctaccaactgatagtgatcttcattcttgtgttcgccggagaaaaattttttgatattgacagcggcagaaaggcaccattacattcacccccttctcagcactatactatcgtatttaataccttcgtcttgatgcagctgttcaatgaaatcaattcaagaaagatacacggtgagaagaacgttttcagtggcatctatcgtaatattattttctgttctgtggtgctgggaacgtttatctgtcagatatttatcgtggagttcggcggaaaacctttttcctgtacatctttgagcctaagccagtggctgtggtgtctattcatcggcatcggtgaattgctttggggacaatttattagcgctatcccaacacgttctctcaagtttctcaaggaagcaggccacgggactacaaaggaagaaattacgaaggacgccgagggcctcgacgagattgaccacgccgagatggaactacggcgaggccagattctttggtttaggggcctgaacagaatccaaacccagattgacgttattaatactttccaaacaggtgcctcatttaagggagtgttgagacgacagaatatgggacaacacctggacgttaagctggtgccaagctcaagttatgttgcagtggcacccgtcaagtcttccccaactaccagcgtacctgccgtgagctcccctccgatgggcaatcagtctggacagtctgtgccctag

SEQ ID NO: 18347 - DNA, 3405 bp, Artificial Sequence
  derived and/or modified sequence
atgacaaacccttccgatcgagtgctgccagcaaatagtatggccgaatctcgggagggcgattttggatgcactgtcatggaactaagaaaattgatggagctaagaagcagagacgcgctgacccagattaacgtccactacgggggtgtgcagaatctttgctcacgcctcaaaacatcccccgtggagggactttccggcaatcctgccgacctcgaaaaaaggcgtcaggtgtttggccataacgtgatcccacctaagaaaccaaagacgttccttgaactggtgtgggaagccttgcaggatgttaccctgataatcttggaaattgctgccatcatttccctggttctgtcattttataggccagcgggtgaagagaatgagctgtgcggacaggtcgcaaccacccccgaagatgagaacgaggcacaggctggctggattgagggcgcagcaatccttttcagcgttattatagtagtactggtgacagcgtttaacgactggtctaaagaaaaacagtttcgtgggctccaatgtcggattgagcaggaacaaaaattttcaattattcgaaatgggcagttgatccagctgcccgtcgctgaaatcgtagtgggagatatcgcacaggtcaaatatggagatctcctgcccgcagacggcatcctgattcaggggaatgacttaaaaatcgacgaaagctctctgacaggggaatctgatcacgtcaaaaaaagcctcgataaggacccaatgctgttgagcggaacccacgtcatggaaggcagcgggaggatggtcgtcacggccgtgggggttaactctcaaactggaatcatcctgaccctcctgggagtcaatgaggatgacgagggggaaaaaaagaagaagggcaaaaaacagggcgtgccggagaacagaaacaaagctaagacacaggacggggtggcactcgaaatacagccactgaattcacaggaggggatcgacaatgaggagaaggataagaaagctgtaaaagtaccgaaaaaagagaagtctgttctccaagggaaactgacacgcctagcagttcaaatcgggaaagcaggattgctgatgagtgcacttactgtgttcatcctgatcctgtactttgtaattgataacttcgtaattaaccgccgtccatggctgcccgagtgcactcccatctatattcagtatttcgtaaagttcttcattataggcataacagtcctggtcgtagccgtgcctgaagggctgcctcttgctgtgacaataagcctggcttacagtgtaaagaagatgatgaaggataacaacttggtcaggcatttggacgcttgtgagaccatggggaatgcgacagccatctgctccgacaagacagggacattaactatgaatagaatgactgtggtacaggcctatatcggcggaatccactatcgtcagatcccttcgcccgatgtgtttctcccaaaggtgttagacctcatcgtcaatgggatctccattaattccgcctacacttcaaagatattgccccctgagaaggaggggggacttccccgtcaagtgggcaataaaacggaatgcgccttgttagggttcgtgactgacctgaaacaggattaccaagccgtgcggaatgaagtacccgaagagaaattgtacaaggtgtatacgtttaactccgttagaaagtcaatgagtaccgtgattagaaatcctaatggaggattccggatgtactctaagggggcatctgagatcattctgcggaagtgtaatcgcattctcgacaggaagggtgaggcggtgccatttaaaaacaaagatcgggacgatatggtccggactgttatagagccaatggcgtgcgatggcctacggactatctgtattgcatatcgcgattttgatgacaccgaaccaagttgggacaatgagaacgaaatcctcaccgagttaacatgtatcgccgtggtggggattgaagacccagtgcgcccagaggtgccagatgcaattgcaaagtgtaagcaggccggaatcaccgtgagaatggtgacaggtgataatatcaacactgctcgggctatcgcaacgaagtgtgggatcctaactcccggagatgatttcttatgtctcgagggtaaagagtttaatagactgattcggaacgagaaaggagaggttgagcaggaaaagctggataagatatggcctaagctacgtgtcttggctaggagctctcctactgataagcacaccctggttaagggcattattgactctactgtaggagagcaccggcaggtcgtggctgtgaccggagatggcacaaatgacggtccagctctgaagaaagccgacgttggtttcgcaatggggatcgcgggtacagatgtggccaaggaggcctccgatatcatactgacagacgataacttcacgagtattgttaaggctgttatgtggggcagaaacgtatacgattcaatttcgaagtttttacaattccagctgacggtaaatgtcgttgccgtcattgtggcattcactggagcctgcataacccaggactctcccctgaaggcagtgcagatgttgtgggtcaatctgatcatggacaccttcgcttccttggctctcgctaccgagcctcccactgaaagcctgctcaaacggaggccttatggtagaaacaagccccttatcagccgaacgatgatgaaaaatattctcggccacgcattctatcagctgatagtgattttcattctggtatttgccggagaaaagtttttcgatatcgattccggcagaaaggcacccctgcattcaccaccctctcagcactataccattgtgtttaataccttcgtactgatgcaactattcaacgaaatcaacagccgcaagatacatggggagaaaaatgttttctcgggtatatacagaaacatcattttctgctctgtggtattaggcacctttatttgccagtttatatcagcaataccgaccaggagcctcaagtttctcaaggaggccggacatggcacaactaaagaggagattacgaaggatgcggagggccttgacgaaatcgatcacgctgagatggagctaaggcgcggtcagatcctgtggttcagaggactgaaccgtatccagactcagatagatgtcatcaatacctttcagacaggcgcttcctttaaaggtgtgctgcggagacagaacatgggacagcatctggacgtcaagttggtcccatcttcttcgtacgtagcggttgctcctgtgaaaagctcccccacgacaagtgttccagcagtcagctcaccacccatgggaaaccagtctggacagagcgttccctag

SEQ ID NO: 18348 - DNA, 4658 bp, Artificial Sequence
  derived and/or modified sequence
gctggttgttgctaaggttgctgccatggtaacatgcacatcctgtttacaccttcatctgggcaagttggtctaagctaggaacctacctaccctggacaactactatcatcaccacctggggacaccaatcatcgtgacacggagtccaccttccactcagttcccccatcctcttcctcctctcgctgccagacttcatacggaagaaaggatctagacttcggacggctactcgggagcttattgcacaagatatattcaatctattccctcactgggcccccagagaagcaagaagtaggaagaagttgagacagggaggcaggagacactggtcagttgaagggaaacgctacatcttctctggttgaggggcttggtaacagcaggcaaaatgacgaacccatcagaccgtgtcttgcctgccaactcgatggccgagagccgtgaaggggactttggctgcacagtaatggaactgaggaagctcatggagctgcgttcaagggatgcactgacccagattaatgtccactatggaggtgtacagaatctctgcagtagactgaaaacctcccctgtggaaggtctgtctgggaaccctgcagatctggagaaacgtaggcaggtgtttggacacaacgtgatcccccccaaaaagcccaagactttcttagaattagtgtgggaagctcttcaagatgtcacgcttatcatcctggagattgcagccatcatctccctggtcctgtccttttatcgccctgctggtgaagaaaatgaactgtgtggtcaagtcgcaactaccccagaagatgaaaatgaggcacaagctggctggattgagggggcagccatccttttctcagtgatcatcgtggtgttagtgactgcctttaatgattggagcaaagagaagcaattccgggggctgcagtgccgcattgaacaggagcaaaagttctccatcatccgaaacggtcaactcatccagctccctgtggctgagattgtggttggtgatattgcccaagtcaaatacggtgatctgctgcctgcagatggaatcctgatccaagggaatgatctgaagattgatgagagctctctgacaggggaatctgaccatgtcaagaagtccctggacaaagaccccatgttgctctcagggacccatgtcatggaaggttctggccggatggtggtgacagctgttggtgtcaactctcagactggaatcatccttactctcttgggggtcaatgaggatgacgaaggggagaaaaagaagaaaggtaaaaaacaaggagtccctgaaaatcgcaacaaagcaaagacccaagacggagtggccctggaaatccagccactcaacagccaggagggaatcgacaatgaggaaaaggacaagaaggcagtcaaggtgcctaaaaaggagaagtcagtgctgcagggcaagctgactcgcctggctgttcagattgggaaagccggtctgctcatgtctgctctcacggttttcatcctgattctatactttgtgattgacaactttgtgataaatcgcagaccatggctccctgagtgtactcccatctacatccagtactttgtcaagttcttcatcatcggcatcactgtactggtggtggctgtgccagaggggctgcctctggctgtcaccatctcactggcctactctgtgaagaaaatgatgaaagacaataacctagtacggcacttggatgcttgtgagaccatgggcaacgccaccgccatctgctctgataagacaggcacgttgaccatgaaccgcatgactgtggtacaagcttatattgggggcatccattaccgtcaaatcccaagccctgatgtcttcctgcccaaagtcctggacctcattgtcaatggcatttctatcaacagtgcttatacctccaagattctgcctccagagaaggagggaggcctgcctcggcaggtgggcaacaagaccgagtgtgctctgctaggctttgtcacagatctgaagcaggattatcaggctgtgcgtaatgaagtgcccgaggagaagctctacaaggtgtacacctttaactcagtgcgcaagtcaatgagcaccgtcatcaggaatcccaacggtggcttccgtatgtacagcaagggcgcctctgagatcatcttgcgcaagtgtaatcgaatcctggaccggaaaggggaagcagtgccattcaagaataaagacagagatgatatggtacgcactgtcatcgagcccatggcctgtgatggactccggactatctgcatagcttaccgggacttcgatgacacagagccctcttgggacaatgagaatgagatcctcaccgaactgacctgtatcgcggtggtgggcattgaggaccctgtgcgcccagaggtgccagatgctattgccaaatgcaaacaagctggcattactgtcagaatggtgacaggtgacaacatcaacacagcccgggccattgccaccaaatgtggcattctgacacctggggatgacttcctgtgcttagaaggcaaagaattcaaccggctcatccgcaacgagaaaggcgaggtagagcaagaaaagctggacaagatctggcctaagcttcgggtcctggcgcgatcttctcccactgacaagcacaccctggtgaaaggcataattgacagcactgttggggaacaccggcaggtcgtggctgtcactggtgatggcacaaatgacgggcctgctctgaagaaagcggatgttggttttgccatgggcatcgcaggcacagatgtagcaaaggaggcttcagacatcatcctaacagatgacaacttcaccagcattgtgaaggcagtgatgtggggacgaaatgtctatgacagcatctccaagttcctgcagttccagctcactgtcaatgtggtggccgtgattgtagccttcactggagcctgtatcactcaggattccccattgaaagctgtgcagatgttgtgggttaatctgatcatggacacttttgcttcattggccctggccacagagccccctacggaatctctgttgaagcggcgcccctatggccgaaataagcctctgatctcacgcactatgatgaagaacatcttgggccatgcattctatcagctcattgtcatctttatccttgtctttgcgggtgagaaattctttgatattgatagtgggaggaaggcacctctacattcaccacccagccagcactataccattgtttttaacaccttcgtgctgatgcagctcttcaatgaaatcaactcccgaaagatccatggagagaagaacgtcttttcaggcatctaccgcaacattatcttctgctctgtagtcttgggcacattcatctgccagattttcatcgtggaatttgggggtaaacccttcagttgtacaagcctcagcctgtctcagtggctgtggtgtctcttcattgggattggagaacttctgtggggccagttcatctccgcaatacctacccgatccctgaagttcctgaaggaggctgggcatggcaccaccaaagaggagatcaccaaggatgccgagggactggatgagattgaccatgctgagatggagctgcgccgaggccagatcctctggttccggggcctgaaccgtatccagactcagatcgacgtaattaacacattccagacgggagcctcttttaagggagtcctaaggcgacagaacatgggtcaacaccttgatgtaaaacttgttcctagttcatcctatgtagcagttgcaccagtcaaatcttcccccaccacttctgttcctgctgtttcatctcctcctatgggcaatcaaagtggtcaaagcgttccatagttccctccacgaaagcattcagaaaccctacaaccaaaagtccatccacagcttcatgacccaccctgaattcgccatagaggaggagttgccacgaacaccactcctggatgaggaagaggaggaaaatcctgacaaggcttctaagtttgggactagggtgctcctgttggatggtgaggtcactccatatgccaatacaaacaacaatgcggtggattgcaaccaagtgcagctcccccagtcggacagctctctacagagcctagagacatcagtttgaattttctttctctgactctcatccctattttacctatttccattttcgtctatcccatctatgaggtgatgatgggacttttcattgtcacgtcagctgctgtgttaacagcagtgtgtgtgaagtgaacctctacctgaccatgaagaggcaagagcacagacttacaaggatttcaacttaagcttgacttggggtttgtagcgggacccagtcaaaccccattcaggtcatggtagaatctactccttggtagtcacttgtcatttttaaagaaatgatgacaatcctcttggcatcaccccaccccacattctccccgatgttcctctcctgaattctggattttgtcctacaagtctgtgccatttataagctaagttgagggttcagagggagacaaatatccccaagtgaaatatgttgcggtagagatggaatgtataaaatccgccagtagtgtga

SEQ ID NO: 18349 - DNA, 613 bp, Artificial Sequence
  derived and/or modified sequence
ggattggagaacttctgtggggccagttcatctccgcaatacctacccgatccctgaagttcctgaaggaggctgggcatggcaccaccaaagaggagatcaccaaggatgccgagggactggatgagattgaccatgctgagatggagctgcgccgaggccagatcctctggttccggggcctgaaccgtatccagactcagatcgacgtaattaacacattccagacgggagcctcttttaagggagtcctaaggcgacagaacatgggtcaacaccttgatgtaaaacttgttcctagttcatcctatgtagcagttgcaccagtcaaatcttcccccaccacttctgttcctgctgtttcatctcctcctatgggcagtgagtgatagtctattatgatgcatgatttgctaaaatgaccacaagagagcacgtggcatccactttaaccaaccatggttatcttttccttttggtttttccctttgatattttgacttaagggaagaaaaagacaaaaatcctactctaaaaccagactgtgtgcccttgtattttatttttgtaatgtagaaaagctattaaaccttaactgttttaaagacaataa

SEQ ID NO: 18350 - DNA, 8905 bp, Artificial Sequence
  derived and/or modified sequence
ttggggagagctggtgagcaagagtctggcccgagttagctagagctgttgccatgacaagcattttcttaagaaagctctgctgttgagatcgtccaaagctgggggctgggagggggggcacgaacttcgtggggcaccatccctccgaagagagcaagatcagagacacccgcccagctctcctgcaccctttttctttcaggaacctgagaggtccttcccattggaggggcagggggaggagacccagcccactccccggccttagccagaaaggcaagagagcaaagccagcgtctctagcttggttgccacactggggagactggtgggtggtcaccccaccctaccctcatccatggaaacccggagggagagtcccgcctgaagaaacctggatctttgctagaaagagagagatccagttgtcatcggtatccaggaagctctcctcttcctcctcctgacgtctactactacagttgctggttgttgctaaggttgctgccatggtaacatgcacatcctgtttacaccttcatctgggcaagttggtctaagctaggaacctacctaccctggacaactactatcatcaccacctggggacaccaatcatcgtgacacggagtccaccttccactcagttcccccatcctcttcctcctctcgctgccagacttcatacggaagaaaggatctagacttcggacggctactcgggagcttattgcacaagatatattcaatctattccctcactgggcccccagagaagcaagaagtaggaagaagttgagacagggaggcaggagacactggtcagttgaagggaaacgctacatcttctctggttgaggggcttggtaacagcaggcaaaatgacgaacccatcagaccgtgtcttgcctgccaactcgatggccgagagccgtgaaggggactttggctgcacagtaatggaactgaggaagctcatggagctgcgttcaagggatgcactgacccagattaatgtccactatggaggtgtacagaatctctgcagtagactgaaaacctcccctgtggaaggtctgtctgggaaccctgcagatctggagaaacgtaggcaggtgtttggacacaacgtgatcccccccaaaaagcccaagactttcttagaattagtgtgggaagctcttcaagatgtcacgcttatcatcctggagattgcagccatcatctccctggtcctgtccttttatcgccctgctggtgaagaaaatgaactgtgtggtcaagtcgcaactaccccagaagatgaaaatgaggcacaagctggctggattgagggggcagccatccttttctcagtgatcatcgtggtgttagtgactgcctttaatgattggagcaaagagaagcaattccgggggctgcagtgccgcattgaacaggagcaaaagttctccatcatccgaaacggtcaactcatccagctccctgtggctgagattgtggttggtgatattgcccaagtcaaatacggtgatctgctgcctgcagatggaatcctgatccaagggaatgatctgaagattgatgagagctctctgacaggggaatctgaccatgtcaagaagtccctggacaaagaccccatgttgctctcagggacccatgtcatggaaggttctggccggatggtggtgacagctgttggtgtcaactctcagactggaatcatccttactctcttgggggtcaatgaggatgacgaaggggagaaaaagaagaaaggtaaaaaacaaggagtccctgaaaatcgcaacaaagcaaagacccaagacggagtggccctggaaatccagccactcaacagccaggagggaatcgacaatgaggaaaaggacaagaaggcagtcaaggtgcctaaaaaggagaagtcagtgctgcagggcaagctgactcgcctggctgttcagattgggaaagccggtctgctcatgtctgctctcacggttttcatcctgattctatactttgtgattgacaactttgtgataaatcgcagaccatggctccctgagtgtactcccatctacatccagtactttgtcaagttcttcatcatcggcatcactgtactggtggtggctgtgccagaggggctgcctctggctgtcaccatctcactggcctactctgtgaagaaaatgatgaaagacaataacctagtacggcacttggatgcttgtgagaccatgggcaacgccaccgccatctgctctgataagacaggcacgttgaccatgaaccgcatgactgtggtacaagcttatattgggggcatccattaccgtcaaatcccaagccctgatgtcttcctgcccaaagtcctggacctcattgtcaatggcatttctatcaacagtgcttatacctccaagattctgcctccagagaaggagggaggcctgcctcggcaggtgggcaacaagaccgagtgtgctctgctaggctttgtcacagatctgaagcaggattatcaggctgtgcgtaatgaagtgcccgaggagaagctctacaaggtgtacacctttaactcagtgcgcaagtcaatgagcaccgtcatcaggaatcccaacggtggcttccgtatgtacagcaagggcgcctctgagatcatcttgcgcaagtgtaatcgaatcctggaccggaaaggggaagcagtgccattcaagaataaagacagagatgatatggtacgcactgtcatcgagcccatggcctgtgatggactccggactatctgcatagcttaccgggacttcgatgacacagagccctcttgggacaatgagaatgagatcctcaccgaactgacctgtatcgcggtggtgggcattgaggaccctgtgcgcccagaggtgccagatgctattgccaaatgcaaacaagctggcattactgtcagaatggtgacaggtgacaacatcaacacagcccgggccattgccaccaaatgtggcattctgacacctggggatgacttcctgtgcttagaaggcaaagaattcaaccggctcatccgcaacgagaaaggcgaggtagagcaagaaaagctggacaagatctggcctaagcttcgggtcctggcgcgatcttctcccactgacaagcacaccctggtgaaaggcataattgacagcactgttggggaacaccggcaggtcgtggctgtcactggtgatggcacaaatgacgggcctgctctgaagaaagcggatgttggttttgccatgggcatcgcaggcacagatgtagcaaaggaggcttcagacatcatcctaacagatgacaacttcaccagcattgtgaaggcagtgatgtggggacgaaatgtctatgacagcatctccaagttcctgcagttccagctcactgtcaatgtggtggccgtgattgtagccttcactggagcctgtatcactcaggattccccattgaaagctgtgcagatgttgtgggttaatctgatcatggacacttttgcttcattggccctggccacagagccccctacggaatctctgttgaagcggcgcccctatggccgaaataagcctctgatctcacgcactatgatgaagaacatcttgggccatgcattctatcagctcattgtcatctttatccttgtctttgcgggtgagaaattctttgatattgatagtgggaggaaggcacctctacattcaccacccagccagcactataccattgtttttaacaccttcgtgctgatgcagctcttcaatgaaatcaactcccgaaagatccatggagagaagaacgtcttttcaggcatctaccgcaacattatcttctgctctgtagtcttgggcacattcatctgccagattttcatcgtggaatttgggggtaaacccttcagttgtacaagcctcagcctgtctcagtggctgtggtgtctcttcattgggattggagaacttctgtggggccagttcatctccgcaatacctacccgatccctgaagttcctgaaggaggctgggcatggcaccaccaaagaggagatcaccaaggatgccgagggactggatgagattgaccatgctgagatggagctgcgccgaggccagatcctctggttccggggcctgaaccgtatccagactcagatcgacgtaattaacacattccagacgggagcctcttttaagggagtcctaaggcgacagaacatgggtcaacaccttgatgtaaaacttgttcctagttcatcctatgtagcagttgcaccagtcaaatcttcccccaccacttctgttcctgctgtttcatctcctcctatgggcaatcaaagtggtcaaagcgttccatagttccctccacgaaagcattcagaaaccctacaaccaaaagtccatccacagcttcatgacccaccctgaattcgccatagaggaggagttgccacgaacaccactcctggatgaggaagaggaggaaaatcctgacaaggcttctaagtttgggactagggtgctcctgttggatggtgaggtcactccatatgccaatacaaacaacaatgcggtggattgcaaccaagtgcagctcccccagtcggacagctctctacagagcctagagacatcagtttgaattttctttctctgactctcatccctattttacctatttccattttcgtctatcccatctatgaggtgatgatgggacttttcattgtcacgtcagctgctgtgttaacagcagtgtgtgtgaagtgaacctctacctgaccatgaagaggcaagagcacagacttacaaggatttcaacttaagcttgacttggggtttgtagcgggacccagtcaaaccccattcaggtcatggtagaatctactccttggtagtcacttgtcatttttaaagaaatgatgacaatcctcttggcatcaccccaccccacattctccccgatgttcctctcctgaattctggattttgtcctacaagtctgtgccatttataagctaagttgagggttcagagggagacaaatatccccaagtgaaatatgttgcggtagagatggaatgtataaaatccgccagtagtgtgattgtttttcaatttttcccactttgaaaacttacacctaaaggcctgtaggcctctaactctttctgccctttcattcaaacctctccaaagttctttgtcttttgtcttcccttcctttccttttttttttttttttttatgatgattaagaaaatggaaaggatatggatgaattgtgtaaacttagatccttctcccttttggcccaaaagaacccttgatttagttccagaatccaaccagtttctttgttaaaagggtccttttgaagcaattaagtgctggtaagaatatttctctgttgttgccaggttaccttctgcttttaaattgccatcttgtaaagtgtatgtggttcttaagtgccagggagatcagccttgcccatgaaggttgcatatgtgtggtatacagtttttacctgaaagcctgagctttctcttattcctaaagtggtggcaaaagaatgaactgggtatgaccctgcccccttactgggcttggatattgaggaccagacgctgccaaatctaggacaagacagaccatcaaagcagacttttgtgggctcctctttggggtgaccactgctttcaaagccatctgccaaggctctccagggcaggacctgactggtggggaatgagtgttcagaagccttgggagaggccaaagagccattctagcatgatctgagaaaaccttcctgcagaggccagaaaccttgagcttaggtgcctggggaccagcttcgacattctctccagtttctgattctaatttttgccacgtgtcacaacttttccagtctctgagaaggtcccagcctttctcaaatattctgattttgaaaatatgtatccaaagtgggaggcccctgtgacattttgccaacttaaacgagaaaaagaccccccgcacccggcacactcccccttcctccagccccgcttcagccacatgctccagctgctgcccagtaaagccctgtgcctttttttcccctgaatactgcccaaagcatccccttcccatctgcctctcaggagttggggactttgctaggagattttttaagtgttccttactgggacaacgtggagccacgtttgcaggagctccatttgtatccctgctggtgttgacttctgtgtaggggccagttcatgtccctgactctcacctcccattagataaatgaagcccacccccctttctagagtgatgagagtcaagaagaggggatgtatgaacggccaaattcccatgtgagaggaagatgacctgatccacctagccttttcttctggatctgtcctccctcacccctttcacctgagctgtccacagtaggaaacataaagaaacaatgtcccctacatatccccatgactacataatccatcatcgtaggaaataggaaagcaaatttgattttggttttgtaaaacgtacatgcttcaataattcttttttgtgtcttaaatactcataggggaaaaaaacagctcacccaaggtgttaggtttcacatatatattcatcaactattttagaagatttaattctatcaaatcttgtattacctcagatcattttaaatagcaagccaataacgagctttgaaggctattttaccattcctgttcacaaaaggttctcatggtgcctgacaggttacccttgagggcttgtgtctactttttaaaagtcaatggttttttttcttgtgttctagtttccataataggagagaaaatatagaaatatatgcaaaaattatagttttctttagatcagaaactgatatttttgggtcagccatatgtattttgtttaaaggatttaaaataaagtgccgtcatgtagccctgtggaagggagcacataaccagctgtttggcatgacaggtgacttagtatatttgtaattggttttaaaaccaatacaccatactttctttctgcaaacagccatctttatacttagggaagaaaaattgttgggttctagacttttttaatataaattttgttgatatggaattaggtaagtttaagtgtctatgtgcatatgttttttatataagttttttctattcagtttcactgatccaactggcagtgggtaaatatggcataagttaataacacttttccccaaaatggtgctttggatttgaaaagggtctgatggggagaaggagaacgtatcatcctagcttcctctcttaataaacctagaaaaacgggtagtaaactgtggatagtcaggaaaacacccagcaagggacacagctgtcaggaaatgaatcttccccccaacccccaccatgcagatggatagacagaatctttcctgactagtcattaggatcaggggcctctgttggatttgtgtttcttgaagaatagctggcagagtggtataaaagacacgaatatctcctggtctataaggatactctgatttggggtttgcatttttcatggtttttatttcctgttccccctggagttttccattagtgagtttttgtgcaaggatcttatttgtgatgccttccctcccctagaaagattttgtgcaatatattaaatggggacagaattctaaatggataaaacaatggctggttctagccctgagtgacagtcttaaggctagatccttcccatagtatcatctgtcctctggaatgactctcctgtccctaaaggggttaagagagagatcacctagaaatccctctggacacttgtgggttctttagggtttgagtttcttcttccccttgagcttcagagaggagagttggcatggttaaatctgaatggttacctcactgctgaaaacccagaggggcgtggcacactcgcttgtgtggaaaagcctctaaatgcatcccttcctttctttcctgcttcctttgccttacaattgaagcagcccgtggtaccatcacagtatgcagagacttcctcacctttcatatctagggaccacccccgatgcattggtgagggtgggcacttataaatgcctgctattgttaagccattccagcctcttcctctgaatagaccagacgccctttcacttagttcagtgccagtccttttgccttcccaaccctgctgttaggcctgctgttccctttgctcttgattaggagagatggaaggagatgagctcccataactgaattggcctttggttcatgttttctccccatatgtatatatgccatatgtgaatatgccatatatatgtgccaacaaatctatctacgttgttcttttcaaattagcacgcagataggaattttgagtttcttcttcttttagtaactagtataacaagcactggtatttttgtacaaaaaagaaaaacaaaagattgactattgtggtctgcatgacataaacaaacaaatggtgatatcaaagcaacgtataccccagtccagtgtgtgttgccataatttgcaattcagcttaacagtgcacccaatctatatttgcattttgatattatttaagctctatgtacaaggttttgcatgtatttatatggttcttagggaaaaaaaatgctataaactgcaaatctgaaattcaaatgtgttgttccactgagaccagaagaagaagaggagttttaaaagggataatttgttggagccaataaagctttttgctgatgaacagaaaccaatactgctgtgcactgagaataaaaactcatgcccacttgt

SEQ ID NO: 18351 - DNA, 8869 bp, Artificial Sequence
  derived and/or modified sequence
ttggggagagctggtgagcaagagtctggcccgagttagctagagctgttgccatgacaagcattttcttaagaaagctctgctgttgagatcgtccaaagctgggggctgggagggggggcacgaacttcgtggggcaccatccctccgaagagagcaagatcagagacacccgcccagctctcctgcaccctttttctttcaggaacctgagaggtccttcccattggaggggcagggggaggagacccagcccactccccggccttagccagaaaggcaagagagcaaagccagcgtctctagcttggttgccacactggggagactggtgggtggtcaccccaccctaccctcatccatggaaacccggagggagagtcccgcctgaagaaacctggatctttgctagaaagagagagatccagttgtcatcggtatccaggaagctctcctcttcctcctcctgacgtctactactacagttgctggttgttgctaaggttgctgccatggtaacatgcacatcctgtttacaccttcatctgggcaagttggtctaagctaggaacctacctaccctggacaactactatcatcaccacctggggacaccaatcatcgtgacacggagtccaccttccactcagttcccccatcctcttcctcctctcgctgccagacttcatacggaagaaaggatctagacttcggacggctactcgggagcttattgcacaagatatattcaatctattccctcactgggcccccagagaagcaagaagtaggaagaagttgagacagggaggcaggagacactggtcagttgaagggaaacgctacatcttctctggttgaggggcttggtaacagcaggcaaaatgacgaacccatcagaccgtgtcttgcctgccaactcgatggccgagagccgtgaaggggactttggctgcacagtaatggaactgaggaagctcatggagctgcgttcaagggatgcactgacccagattaatgtccactatggaggtgtacagaatctctgcagtagactgaaaacctcccctgtggaaggtctgtctgggaaccctgcagatctggagaaacgtaggcaggtgtttggacacaacgtgatcccccccaaaaagcccaagactttcttagaattagtgtgggaagctcttcaagatgtcacgcttatcatcctggagattgcagccatcatctccctggtcctgtccttttatcgccctgctggtgaagaaaatgaactgtgtggtcaagtcgcaactaccccagaagatgaaaatgaggcacaagctggctggattgagggggcagccatccttttctcagtgatcatcgtggtgttagtgactgcctttaatgattggagcaaagagaagcaattccgggggctgcagtgccgcattgaacaggagcaaaagttctccatcatccgaaacggtcaactcatccagctccctgtggctgagattgtggttggtgatattgcccaagtcaaatacggtgatctgctgcctgcagatggaatcctgatccaagggaatgatctgaagattgatgagagctctctgacaggggaatctgaccatgtcaagaagtccctggacaaagaccccatgttgctctcagggacccatgtcatggaaggttctggccggatggtggtgacagctgttggtgtcaactctcagactggaatcatccttactctcttgggggtcaatgaggatgacgaaggggagaaaaagaagaaagcaaagacccaagacggagtggccctggaaatccagccactcaacagccaggagggaatcgacaatgaggaaaaggacaagaaggcagtcaaggtgcctaaaaaggagaagtcagtgctgcagggcaagctgactcgcctggctgttcagattgggaaagccggtctgctcatgtctgctctcacggttttcatcctgattctatactttgtgattgacaactttgtgataaatcgcagaccatggctccctgagtgtactcccatctacatccagtactttgtcaagttcttcatcatcggcatcactgtactggtggtggctgtgccagaggggctgcctctggctgtcaccatctcactggcctactctgtgaagaaaatgatgaaagacaataacctagtacggcacttggatgcttgtgagaccatgggcaacgccaccgccatctgctctgataagacaggcacgttgaccatgaaccgcatgactgtggtacaagcttatattgggggcatccattaccgtcaaatcccaagccctgatgtcttcctgcccaaagtcctggacctcattgtcaatggcatttctatcaacagtgcttatacctccaagattctgcctccagagaaggagggaggcctgcctcggcaggtgggcaacaagaccgagtgtgctctgctaggctttgtcacagatctgaagcaggattatcaggctgtgcgtaatgaagtgcccgaggagaagctctacaaggtgtacacctttaactcagtgcgcaagtcaatgagcaccgtcatcaggaatcccaacggtggcttccgtatgtacagcaagggcgcctctgagatcatcttgcgcaagtgtaatcgaatcctggaccggaaaggggaagcagtgccattcaagaataaagacagagatgatatggtacgcactgtcatcgagcccatggcctgtgatggactccggactatctgcatagcttaccgggacttcgatgacacagagccctcttgggacaatgagaatgagatcctcaccgaactgacctgtatcgcggtggtgggcattgaggaccctgtgcgcccagaggtgccagatgctattgccaaatgcaaacaagctggcattactgtcagaatggtgacaggtgacaacatcaacacagcccgggccattgccaccaaatgtggcattctgacacctggggatgacttcctgtgcttagaaggcaaagaattcaaccggctcatccgcaacgagaaaggcgaggtagagcaagaaaagctggacaagatctggcctaagcttcgggtcctggcgcgatcttctcccactgacaagcacaccctggtgaaaggcataattgacagcactgttggggaacaccggcaggtcgtggctgtcactggtgatggcacaaatgacgggcctgctctgaagaaagcggatgttggttttgccatgggcatcgcaggcacagatgtagcaaaggaggcttcagacatcatcctaacagatgacaacttcaccagcattgtgaaggcagtgatgtggggacgaaatgtctatgacagcatctccaagttcctgcagttccagctcactgtcaatgtggtggccgtgattgtagccttcactggagcctgtatcactcaggattccccattgaaagctgtgcagatgttgtgggttaatctgatcatggacacttttgcttcattggccctggccacagagccccctacggaatctctgttgaagcggcgcccctatggccgaaataagcctctgatctcacgcactatgatgaagaacatcttgggccatgcattctatcagctcattgtcatctttatccttgtctttgcgggtgagaaattctttgatattgatagtgggaggaaggcacctctacattcaccacccagccagcactataccattgtttttaacaccttcgtgctgatgcagctcttcaatgaaatcaactcccgaaagatccatggagagaagaacgtcttttcaggcatctaccgcaacattatcttctgctctgtagtcttgggcacattcatctgccagattttcatcgtggaatttgggggtaaacccttcagttgtacaagcctcagcctgtctcagtggctgtggtgtctcttcattgggattggagaacttctgtggggccagttcatctccgcaatacctacccgatccctgaagttcctgaaggaggctgggcatggcaccaccaaagaggagatcaccaaggatgccgagggactggatgagattgaccatgctgagatggagctgcgccgaggccagatcctctggttccggggcctgaaccgtatccagactcagatcgacgtaattaacacattccagacgggagcctcttttaagggagtcctaaggcgacagaacatgggtcaacaccttgatgtaaaacttgttcctagttcatcctatgtagcagttgcaccagtcaaatcttcccccaccacttctgttcctgctgtttcatctcctcctatgggcaatcaaagtggtcaaagcgttccatagttccctccacgaaagcattcagaaaccctacaaccaaaagtccatccacagcttcatgacccaccctgaattcgccatagaggaggagttgccacgaacaccactcctggatgaggaagaggaggaaaatcctgacaaggcttctaagtttgggactagggtgctcctgttggatggtgaggtcactccatatgccaatacaaacaacaatgcggtggattgcaaccaagtgcagctcccccagtcggacagctctctacagagcctagagacatcagtttgaattttctttctctgactctcatccctattttacctatttccattttcgtctatcccatctatgaggtgatgatgggacttttcattgtcacgtcagctgctgtgttaacagcagtgtgtgtgaagtgaacctctacctgaccatgaagaggcaagagcacagacttacaaggatttcaacttaagcttgacttggggtttgtagcgggacccagtcaaaccccattcaggtcatggtagaatctactccttggtagtcacttgtcatttttaaagaaatgatgacaatcctcttggcatcaccccaccccacattctccccgatgttcctctcctgaattctggattttgtcctacaagtctgtgccatttataagctaagttgagggttcagagggagacaaatatccccaagtgaaatatgttgcggtagagatggaatgtataaaatccgccagtagtgtgattgtttttcaatttttcccactttgaaaacttacacctaaaggcctgtaggcctctaactctttctgccctttcattcaaacctctccaaagttctttgtcttttgtcttcccttcctttccttttttttttttttttttatgatgattaagaaaatggaaaggatatggatgaattgtgtaaacttagatccttctcccttttggcccaaaagaacccttgatttagttccagaatccaaccagtttctttgttaaaagggtccttttgaagcaattaagtgctggtaagaatatttctctgttgttgccaggttaccttctgcttttaaattgccatcttgtaaagtgtatgtggttcttaagtgccagggagatcagccttgcccatgaaggttgcatatgtgtggtatacagtttttacctgaaagcctgagctttctcttattcctaaagtggtggcaaaagaatgaactgggtatgaccctgcccccttactgggcttggatattgaggaccagacgctgccaaatctaggacaagacagaccatcaaagcagacttttgtgggctcctctttggggtgaccactgctttcaaagccatctgccaaggctctccagggcaggacctgactggtggggaatgagtgttcagaagccttgggagaggccaaagagccattctagcatgatctgagaaaaccttcctgcagaggccagaaaccttgagcttaggtgcctggggaccagcttcgacattctctccagtttctgattctaatttttgccacgtgtcacaacttttccagtctctgagaaggtcccagcctttctcaaatattctgattttgaaaatatgtatccaaagtgggaggcccctgtgacattttgccaacttaaacgagaaaaagaccccccgcacccggcacactcccccttcctccagccccgcttcagccacatgctccagctgctgcccagtaaagccctgtgcctttttttcccctgaatactgcccaaagcatccccttcccatctgcctctcaggagttggggactttgctaggagattttttaagtgttccttactgggacaacgtggagccacgtttgcaggagctccatttgtatccctgctggtgttgacttctgtgtaggggccagttcatgtccctgactctcacctcccattagataaatgaagcccacccccctttctagagtgatgagagtcaagaagaggggatgtatgaacggccaaattcccatgtgagaggaagatgacctgatccacctagccttttcttctggatctgtcctccctcacccctttcacctgagctgtccacagtaggaaacataaagaaacaatgtcccctacatatccccatgactacataatccatcatcgtaggaaataggaaagcaaatttgattttggttttgtaaaacgtacatgcttcaataattcttttttgtgtcttaaatactcataggggaaaaaaacagctcacccaaggtgttaggtttcacatatatattcatcaactattttagaagatttaattctatcaaatcttgtattacctcagatcattttaaatagcaagccaataacgagctttgaaggctattttaccattcctgttcacaaaaggttctcatggtgcctgacaggttacccttgagggcttgtgtctactttttaaaagtcaatggttttttttcttgtgttctagtttccataataggagagaaaatatagaaatatatgcaaaaattatagttttctttagatcagaaactgatatttttgggtcagccatatgtattttgtttaaaggatttaaaataaagtgccgtcatgtagccctgtggaagggagcacataaccagctgtttggcatgacaggtgacttagtatatttgtaattggttttaaaaccaatacaccatactttctttctgcaaacagccatctttatacttagggaagaaaaattgttgggttctagacttttttaatataaattttgttgatatggaattaggtaagtttaagtgtctatgtgcatatgttttttatataagttttttctattcagtttcactgatccaactggcagtgggtaaatatggcataagttaataacacttttccccaaaatggtgctttggatttgaaaagggtctgatggggagaaggagaacgtatcatcctagcttcctctcttaataaacctagaaaaacgggtagtaaactgtggatagtcaggaaaacacccagcaagggacacagctgtcaggaaatgaatcttccccccaacccccaccatgcagatggatagacagaatctttcctgactagtcattaggatcaggggcctctgttggatttgtgtttcttgaagaatagctggcagagtggtataaaagacacgaatatctcctggtctataaggatactctgatttggggtttgcatttttcatggtttttatttcctgttccccctggagttttccattagtgagtttttgtgcaaggatcttatttgtgatgccttccctcccctagaaagattttgtgcaatatattaaatggggacagaattctaaatggataaaacaatggctggttctagccctgagtgacagtcttaaggctagatccttcccatagtatcatctgtcctctggaatgactctcctgtccctaaaggggttaagagagagatcacctagaaatccctctggacacttgtgggttctttagggtttgagtttcttcttccccttgagcttcagagaggagagttggcatggttaaatctgaatggttacctcactgctgaaaacccagaggggcgtggcacactcgcttgtgtggaaaagcctctaaatgcatcccttcctttctttcctgcttcctttgccttacaattgaagcagcccgtggtaccatcacagtatgcagagacttcctcacctttcatatctagggaccacccccgatgcattggtgagggtgggcacttataaatgcctgctattgttaagccattccagcctcttcctctgaatagaccagacgccctttcacttagttcagtgccagtccttttgccttcccaaccctgctgttaggcctgctgttccctttgctcttgattaggagagatggaaggagatgagctcccataactgaattggcctttggttcatgttttctccccatatgtatatatgccatatgtgaatatgccatatatatgtgccaacaaatctatctacgttgttcttttcaaattagcacgcagataggaattttgagtttcttcttcttttagtaactagtataacaagcactggtatttttgtacaaaaaagaaaaacaaaagattgactattgtggtctgcatgacataaacaaacaaatggtgatatcaaagcaacgtataccccagtccagtgtgtgttgccataatttgcaattcagcttaacagtgcacccaatctatatttgcattttgatattatttaagctctatgtacaaggttttgcatgtatttatatggttcttagggaaaaaaaatgctataaactgcaaatctgaaattcaaatgtgttgttccactgagaccagaagaagaagaggagttttaaaagggataatttgttggagccaataaagctttttgctgatgaacagaaaccaatactgctgtgcactgagaataaaaactcatgcccacttgt

SEQ ID NO: 18352 - DNA, 8797 bp, Artificial Sequence
  derived and/or modified sequence
ttggggagagctggtgagcaagagtctggcccgagttagctagagctgttgccatgacaagcattttcttaagaaagctctgctgttgagatcgtccaaagctgggggctgggagggggggcacgaacttcgtggggcaccatccctccgaagagagcaagatcagagacacccgcccagctctcctgcaccctttttctttcaggaacctgagaggtccttcccattggaggggcagggggaggagacccagcccactccccggccttagccagaaaggcaagagagcaaagccagcgtctctagcttggttgccacactggggagactggtgggtggtcaccccaccctaccctcatccatggaaacccggagggagagtcccgcctgaagaaacctggatctttgctagaaagagagagatccagttgtcatcggtatccaggaagctctcctcttcctcctcctgacgtctactactacagttgctggttgttgctaaggttgctgccatggtaacatgcacatcctgtttacaccttcatctgggcaagttggtctaagctaggaacctacctaccctggacaactactatcatcaccacctggggacaccaatcatcgtgacacggagtccaccttccactcagttcccccatcctcttcctcctctcgctgccagacttcatacggaagaaaggatctagacttcggacggctactcgggagcttattgcacaagatatattcaatctattccctcactgggcccccagagaagcaagaagtaggaagaagttgagacagggaggcaggagacactggtcagttgaagggaaacgctacatcttctctggttgaggggcttggtaacagcaggcaaaatgacgaacccatcagaccgtgtcttgcctgccaactcgatggccgagagccgtgaaggggactttggctgcacagtaatggaactgaggaagctcatggagctgcgttcaagggatgcactgacccagattaatgtccactatggaggtgtacagaatctctgcagtagactgaaaacctcccctgtggaaggtctgtctgggaaccctgcagatctggagaaacgtaggcaggtgtttggacacaacgtgatcccccccaaaaagcccaagactttcttagaattagtgtgggaagctcttcaagatgtcacgcttatcatcctggagattgcagccatcatctccctggtcctgtccttttatcgccctgctggtgaagaaaatgaactgtgtggtcaagtcgcaactaccccagaagatgaaaatgaggcacaagctggctggattgagggggcagccatccttttctcagtgatcatcgtggtgttagtgactgcctttaatgattggagcaaagagaagcaattccgggggctgcagtgccgcattgaacaggagcaaaagttctccatcatccgaaacggtcaactcatccagctccctgtggctgagattgtggttggtgatattgcccaagtcaaatacggtgatctgctgcctgcagatggaatcctgatccaagggaatgatctgaagattgatgagagctctctgacaggggaatctgaccatgtcaagaagtccctggacaaagaccccatgttgctctcagggacccatgtcatggaaggttctggccggatggtggtgacagctgttggtgtcaactctcagactggaatcatccttactctcttgggggtcaatgaggatgacgaaggggagaaaaagaagaaaggtaaaaaacaaggagtccctgaaaatcgcaacaaagcaaagacccaagacggagtggccctggaaatccagccactcaacagccaggagggaatcgacaatgaggaaaaggacaagaaggcagtcaaggtgcctaaaaaggagaagtcagtgctgcagggcaagctgactcgcctggctgttcagattgggaaagccggtctgctcatgtctgctctcacggttttcatcctgattctatactttgtgattgacaactttgtgataaatcgcagaccatggctccctgagtgtactcccatctacatccagtactttgtcaagttcttcatcatcggcatcactgtactggtggtggctgtgccagaggggctgcctctggctgtcaccatctcactggcctactctgtgaagaaaatgatgaaagacaataacctagtacggcacttggatgcttgtgagaccatgggcaacgccaccgccatctgctctgataagacaggcacgttgaccatgaaccgcatgactgtggtacaagcttatattgggggcatccattaccgtcaaatcccaagccctgatgtcttcctgcccaaagtcctggacctcattgtcaatggcatttctatcaacagtgcttatacctccaagattctgcctccagagaaggagggaggcctgcctcggcaggtgggcaacaagaccgagtgtgctctgctaggctttgtcacagatctgaagcaggattatcaggctgtgcgtaatgaagtgcccgaggagaagctctacaaggtgtacacctttaactcagtgcgcaagtcaatgagcaccgtcatcaggaatcccaacggtggcttccgtatgtacagcaagggcgcctctgagatcatcttgcgcaagtgtaatcgaatcctggaccggaaaggggaagcagtgccattcaagaataaagacagagatgatatggtacgcactgtcatcgagcccatggcctgtgatggactccggactatctgcatagcttaccgggacttcgatgacacagagccctcttgggacaatgagaatgagatcctcaccgaactgacctgtatcgcggtggtgggcattgaggaccctgtgcgcccagaggtgccagatgctattgccaaatgcaaacaagctggcattactgtcagaatggtgacaggtgacaacatcaacacagcccgggccattgccaccaaatgtggcattctgacacctggggatgacttcctgtgcttagaaggcaaagaattcaaccggctcatccgcaacgagaaaggcgaggtagagcaagaaaagctggacaagatctggcctaagcttcgggtcctggcgcgatcttctcccactgacaagcacaccctggtgaaaggcataattgacagcactgttggggaacaccggcaggtcgtggctgtcactggtgatggcacaaatgacgggcctgctctgaagaaagcggatgttggttttgccatgggcatcgcaggcacagatgtagcaaaggaggcttcagacatcatcctaacagatgacaacttcaccagcattgtgaaggcagtgatgtggggacgaaatgtctatgacagcatctccaagttcctgcagttccagctcactgtcaatgtggtggccgtgattgtagccttcactggagcctgtatcactcaggattccccattgaaagctgtgcagatgttgtgggttaatctgatcatggacacttttgcttcattggccctggccacagagccccctacggaatctctgttgaagcggcgcccctatggccgaaataagcctctgatctcacgcactatgatgaagaacatcttgggccatgcattctatcagctcattgtcatctttatccttgtctttgcgggtgagaaattctttgatattgatagtgggaggaaggcacctctacattcaccacccagccagcactataccattgtttttaacaccttcgtgctgatgcagctcttcaatgaaatcaactcccgaaagatccatggagagaagaacgtcttttcaggcatctaccgcaacattatcttctgctctgtagtcttgggcacattcatctgccagttcatctccgcaatacctacccgatccctgaagttcctgaaggaggctgggcatggcaccaccaaagaggagatcaccaaggatgccgagggactggatgagattgaccatgctgagatggagctgcgccgaggccagatcctctggttccggggcctgaaccgtatccagactcagatcgacgtaattaacacattccagacgggagcctcttttaagggagtcctaaggcgacagaacatgggtcaacaccttgatgtaaaacttgttcctagttcatcctatgtagcagttgcaccagtcaaatcttcccccaccacttctgttcctgctgtttcatctcctcctatgggcaatcaaagtggtcaaagcgttccatagttccctccacgaaagcattcagaaaccctacaaccaaaagtccatccacagcttcatgacccaccctgaattcgccatagaggaggagttgccacgaacaccactcctggatgaggaagaggaggaaaatcctgacaaggcttctaagtttgggactagggtgctcctgttggatggtgaggtcactccatatgccaatacaaacaacaatgcggtggattgcaaccaagtgcagctcccccagtcggacagctctctacagagcctagagacatcagtttgaattttctttctctgactctcatccctattttacctatttccattttcgtctatcccatctatgaggtgatgatgggacttttcattgtcacgtcagctgctgtgttaacagcagtgtgtgtgaagtgaacctctacctgaccatgaagaggcaagagcacagacttacaaggatttcaacttaagcttgacttggggtttgtagcgggacccagtcaaaccccattcaggtcatggtagaatctactccttggtagtcacttgtcatttttaaagaaatgatgacaatcctcttggcatcaccccaccccacattctccccgatgttcctctcctgaattctggattttgtcctacaagtctgtgccatttataagctaagttgagggttcagagggagacaaatatccccaagtgaaatatgttgcggtagagatggaatgtataaaatccgccagtagtgtgattgtttttcaatttttcccactttgaaaacttacacctaaaggcctgtaggcctctaactctttctgccctttcattcaaacctctccaaagttctttgtcttttgtcttcccttcctttccttttttttttttttttttatgatgattaagaaaatggaaaggatatggatgaattgtgtaaacttagatccttctcccttttggcccaaaagaacccttgatttagttccagaatccaaccagtttctttgttaaaagggtccttttgaagcaattaagtgctggtaagaatatttctctgttgttgccaggttaccttctgcttttaaattgccatcttgtaaagtgtatgtggttcttaagtgccagggagatcagccttgcccatgaaggttgcatatgtgtggtatacagtttttacctgaaagcctgagctttctcttattcctaaagtggtggcaaaagaatgaactgggtatgaccctgcccccttactgggcttggatattgaggaccagacgctgccaaatctaggacaagacagaccatcaaagcagacttttgtgggctcctctttggggtgaccactgctttcaaagccatctgccaaggctctccagggcaggacctgactggtggggaatgagtgttcagaagccttgggagaggccaaagagccattctagcatgatctgagaaaaccttcctgcagaggccagaaaccttgagcttaggtgcctggggaccagcttcgacattctctccagtttctgattctaatttttgccacgtgtcacaacttttccagtctctgagaaggtcccagcctttctcaaatattctgattttgaaaatatgtatccaaagtgggaggcccctgtgacattttgccaacttaaacgagaaaaagaccccccgcacccggcacactcccccttcctccagccccgcttcagccacatgctccagctgctgcccagtaaagccctgtgcctttttttcccctgaatactgcccaaagcatccccttcccatctgcctctcaggagttggggactttgctaggagattttttaagtgttccttactgggacaacgtggagccacgtttgcaggagctccatttgtatccctgctggtgttgacttctgtgtaggggccagttcatgtccctgactctcacctcccattagataaatgaagcccacccccctttctagagtgatgagagtcaagaagaggggatgtatgaacggccaaattcccatgtgagaggaagatgacctgatccacctagccttttcttctggatctgtcctccctcacccctttcacctgagctgtccacagtaggaaacataaagaaacaatgtcccctacatatccccatgactacataatccatcatcgtaggaaataggaaagcaaatttgattttggttttgtaaaacgtacatgcttcaataattcttttttgtgtcttaaatactcataggggaaaaaaacagctcacccaaggtgttaggtttcacatatatattcatcaactattttagaagatttaattctatcaaatcttgtattacctcagatcattttaaatagcaagccaataacgagctttgaaggctattttaccattcctgttcacaaaaggttctcatggtgcctgacaggttacccttgagggcttgtgtctactttttaaaagtcaatggttttttttcttgtgttctagtttccataataggagagaaaatatagaaatatatgcaaaaattatagttttctttagatcagaaactgatatttttgggtcagccatatgtattttgtttaaaggatttaaaataaagtgccgtcatgtagccctgtggaagggagcacataaccagctgtttggcatgacaggtgacttagtatatttgtaattggttttaaaaccaatacaccatactttctttctgcaaacagccatctttatacttagggaagaaaaattgttgggttctagacttttttaatataaattttgttgatatggaattaggtaagtttaagtgtctatgtgcatatgttttttatataagttttttctattcagtttcactgatccaactggcagtgggtaaatatggcataagttaataacacttttccccaaaatggtgctttggatttgaaaagggtctgatggggagaaggagaacgtatcatcctagcttcctctcttaataaacctagaaaaacgggtagtaaactgtggatagtcaggaaaacacccagcaagggacacagctgtcaggaaatgaatcttccccccaacccccaccatgcagatggatagacagaatctttcctgactagtcattaggatcaggggcctctgttggatttgtgtttcttgaagaatagctggcagagtggtataaaagacacgaatatctcctggtctataaggatactctgatttggggtttgcatttttcatggtttttatttcctgttccccctggagttttccattagtgagtttttgtgcaaggatcttatttgtgatgccttccctcccctagaaagattttgtgcaatatattaaatggggacagaattctaaatggataaaacaatggctggttctagccctgagtgacagtcttaaggctagatccttcccatagtatcatctgtcctctggaatgactctcctgtccctaaaggggttaagagagagatcacctagaaatccctctggacacttgtgggttctttagggtttgagtttcttcttccccttgagcttcagagaggagagttggcatggttaaatctgaatggttacctcactgctgaaaacccagaggggcgtggcacactcgcttgtgtggaaaagcctctaaatgcatcccttcctttctttcctgcttcctttgccttacaattgaagcagcccgtggtaccatcacagtatgcagagacttcctcacctttcatatctagggaccacccccgatgcattggtgagggtgggcacttataaatgcctgctattgttaagccattccagcctcttcctctgaatagaccagacgccctttcacttagttcagtgccagtccttttgccttcccaaccctgctgttaggcctgctgttccctttgctcttgattaggagagatggaaggagatgagctcccataactgaattggcctttggttcatgttttctccccatatgtatatatgccatatgtgaatatgccatatatatgtgccaacaaatctatctacgttgttcttttcaaattagcacgcagataggaattttgagtttcttcttcttttagtaactagtataacaagcactggtatttttgtacaaaaaagaaaaacaaaagattgactattgtggtctgcatgacataaacaaacaaatggtgatatcaaagcaacgtataccccagtccagtgtgtgttgccataatttgcaattcagcttaacagtgcacccaatctatatttgcattttgatattatttaagctctatgtacaaggttttgcatgtatttatatggttcttagggaaaaaaaatgctataaactgcaaatctgaaattcaaatgtgttgttccactgagaccagaagaagaagaggagttttaaaagggataatttgttggagccaataaagctttttgctgatgaacagaaaccaatactgctgtgcactgagaataaaaactcatgcccacttgt

SEQ ID NO: 18353 - DNA, 3513 bp, Artificial Sequence
  derived and/or modified sequence
atgaccaaccccagcgacagagtgctgcccgccaacagcatggccgagagcagagagggcgacttcggctgcaccgtgatggagctgagaaagctgatggagctgagaagcagagacgccctgacccagatcaacgtgcactacggcggcgtgcagaacctgtgcagcagactgaagaccagccccgtggagggcctgagcggcaaccccgccgacctggagaagagaagacaggtgttcggccacaacgtgatcccccccaagaagcccaagaccttcctggagctggtgtgggaggccctgcaggacgtgaccctgatcatcctggagatcgccgccatcatcagcctggtgctgagcttctacagacccgccggcgaggagaacgagctgtgcggccaggtggccaccacccccgaggacgagaacgaggcccaggccggctggatcgagggcgccgccatcctgttcagcgtgatcatcgtggtgctggtgaccgccttcaacgactggagcaaggagaagcagttcagaggcctgcagtgcagaatcgagcaggagcagaagttcagcatcatcagaaacggccagctgatccagctgcccgtggccgagatcgtggtgggcgacatcgcccaggtgaagtacggcgacctgctgcccgccgacggcatcctgatccagggcaacgacctgaagatcgacgagagcagcctgaccggcgagagcgaccacgtgaagaagagcctggacaaggaccccatgctgctgagcggcacccacgtgatggagggcagcggcagaatggtggtgaccgccgtgggcgtgaacagccagaccggcatcatcctgaccctgctgggcgtgaacgaggacgacgagggcgagaagaagaagaagggcaagaagcagggcgtgcccgagaacagaaacaaggccaagacccaggacggcgtggccctggagatccagcccctgaacagccaggagggcatcgacaacgaggagaaggacaagaaggccgtgaaggtgcccaagaaggagaagagcgtgctgcagggcaagctgaccagactggccgtgcagatcggcaaggccggcctgctgatgagcgccctgaccgtgttcatcctgatcctgtacttcgtgatcgacaacttcgtgatcaacagaagaccctggctgcccgagtgcacccccatctacatccagtacttcgtgaagttcttcatcatcggcatcaccgtgctggtggtggccgtgcccgagggcctgcccctggccgtgaccatcagcctggcctacagcgtgaagaagatgatgaaggacaacaacctggtgagacacctggacgcctgcgagaccatgggcaacgccaccgccatctgcagcgacaagaccggcaccctgaccatgaacagaatgaccgtggtgcaggcctacatcggcggcatccactacagacagatccccagccccgacgtgttcctgcccaaggtgctggacctgatcgtgaacggcatcagcatcaacagcgcctacaccagcaagatcctgccccccgagaaggagggcggcctgcccagacaggtgggcaacaagaccgagtgcgccctgctgggcttcgtgaccgacctgaagcaggactaccaggccgtgagaaacgaggtgcccgaggagaagctgtacaaggtgtacaccttcaacagcgtgagaaagagcatgagcaccgtgatcagaaaccccaacggcggcttcagaatgtacagcaagggcgccagcgagatcatcctgagaaagtgcaacagaatcctggacagaaagggcgaggccgtgcccttcaagaacaaggacagagacgacatggtgagaaccgtgatcgagcccatggcctgcgacggcctgagaaccatctgcatcgcctacagagacttcgacgacaccgagcccagctgggacaacgagaacgagatcctgaccgagctgacctgcatcgccgtggtgggcatcgaggaccccgtgagacccgaggtgcccgacgccatcgccaagtgcaagcaggccggcatcaccgtgagaatggtgaccggcgacaacatcaacaccgccagagccatcgccaccaagtgcggcatcctgacccccggcgacgacttcctgtgcctggagggcaaggagttcaacagactgatcagaaacgagaagggcgaggtggagcaggagaagctggacaagatctggcccaagctgagagtgctggccagaagcagccccaccgacaagcacaccctggtgaagggcatcatcgacagcaccgtgggcgagcacagacaggtggtggccgtgaccggcgacggcaccaacgacggccccgccctgaagaaggccgacgtgggcttcgccatgggcatcgccggcaccgacgtggccaaggaggccagcgacatcatcctgaccgacgacaacttcaccagcatcgtgaaggccgtgatgtggggcagaaacgtgtacgacagcatcagcaagttcctgcagttccagctgaccgtgaacgtggtggccgtgatcgtggccttcaccggcgcctgcatcacccaggacagccccctgaaggccgtgcagatgctgtgggtgaacctgatcatggacaccttcgccagcctggccctggccaccgagccccccaccgagagcctgctgaagagaagaccctacggcagaaacaagcccctgatcagcagaaccatgatgaagaacatcctgggccacgccttctaccagctgatcgtgatcttcatcctggtgttcgccggcgagaagttcttcgacatcgacagcggcagaaaggcccccctgcacagcccccccagccagcactacaccatcgtgttcaacaccttcgtgctgatgcagctgttcaacgagatcaacagcagaaagatccacggcgagaagaacgtgttcagcggcatctacagaaacatcatcttctgcagcgtggtgctgggcaccttcatctgccagatcttcatcgtggagttcggcggcaagcccttcagctgcaccagcctgagcctgagccagtggctgtggtgcctgttcatcggcatcggcgagctgctgtggggccagttcatcagcgccatccccaccagaagcctgaagttcctgaaggaggccggccacggcaccaccaaggaggagatcaccaaggacgccgagggcctggacgagatcgaccacgccgagatggagctgagaagaggccagatcctgtggttcagaggcctgaacagaatccagacccagatcgacgtgatcaacaccttccagaccggcgccagcttcaagggcgtgctgagaagacagaacatgggccagcacctggacgtgaagctggtgcccagcagcagctacgtggccgtggcccccgtgaagagcagccccaccaccagcgtgcccgccgtgagcagcccccccatgggcaaccagagcggccagagcgtgccctag

SEQ ID NO: 18354 - DNA, 390 bp, Artificial Sequence
  derived and/or modified sequence
tgaatcggcgagctgctgtggggccagttcatcagcgccatccccaccagaagcctgaagttcctgaaggaggccggccacggcaccaccaaggaggagatcaccaaggacgccgagggcctggacgagatcgaccacgccgagatggagctgagaagaggccagatcctgtggttcagaggcctgaacagaatccagacccagatcgacgtgatcaacaccttccagaccggcgccagcttcaagggcgtgctgagaagacagaacatgggccagcacctggacgtgaagctggtgcccagcagcagctacgtggccgtggcccccgtgaagagcagccccaccaccagcgtgcccgccgtgagcagcccccccatgggcagcgagtag

SEQ ID NO: 18355 - DNA, 3477 bp, Artificial Sequence
  derived and/or modified sequence
atgaccaaccccagcgacagagtgctgcccgccaacagcatggccgagagcagagagggcgacttcggctgcaccgtgatggagctgagaaagctgatggagctgagaagcagagacgccctgacccagatcaacgtgcactacggcggcgtgcagaacctgtgcagcagactgaagaccagccccgtggagggcctgagcggcaaccccgccgacctggagaagagaagacaggtgttcggccacaacgtgatcccccccaagaagcccaagaccttcctggagctggtgtgggaggccctgcaggacgtgaccctgatcatcctggagatcgccgccatcatcagcctggtgctgagcttctacagacccgccggcgaggagaacgagctgtgcggccaggtggccaccacccccgaggacgagaacgaggcccaggccggctggatcgagggcgccgccatcctgttcagcgtgatcatcgtggtgctggtgaccgccttcaacgactggagcaaggagaagcagttcagaggcctgcagtgcagaatcgagcaggagcagaagttcagcatcatcagaaacggccagctgatccagctgcccgtggccgagatcgtggtgggcgacatcgcccaggtgaagtacggcgacctgctgcccgccgacggcatcctgatccagggcaacgacctgaagatcgacgagagcagcctgaccggcgagagcgaccacgtgaagaagagcctggacaaggaccccatgctgctgagcggcacccacgtgatggagggcagcggcagaatggtggtgaccgccgtgggcgtgaacagccagaccggcatcatcctgaccctgctgggcgtgaacgaggacgacgagggcgagaagaagaagaaggccaagacccaggacggcgtggccctggagatccagcccctgaacagccaggagggcatcgacaacgaggagaaggacaagaaggccgtgaaggtgcccaagaaggagaagagcgtgctgcagggcaagctgaccagactggccgtgcagatcggcaaggccggcctgctgatgagcgccctgaccgtgttcatcctgatcctgtacttcgtgatcgacaacttcgtgatcaacagaagaccctggctgcccgagtgcacccccatctacatccagtacttcgtgaagttcttcatcatcggcatcaccgtgctggtggtggccgtgcccgagggcctgcccctggccgtgaccatcagcctggcctacagcgtgaagaagatgatgaaggacaacaacctggtgagacacctggacgcctgcgagaccatgggcaacgccaccgccatctgcagcgacaagaccggcaccctgaccatgaacagaatgaccgtggtgcaggcctacatcggcggcatccactacagacagatccccagccccgacgtgttcctgcccaaggtgctggacctgatcgtgaacggcatcagcatcaacagcgcctacaccagcaagatcctgccccccgagaaggagggcggcctgcccagacaggtgggcaacaagaccgagtgcgccctgctgggcttcgtgaccgacctgaagcaggactaccaggccgtgagaaacgaggtgcccgaggagaagctgtacaaggtgtacaccttcaacagcgtgagaaagagcatgagcaccgtgatcagaaaccccaacggcggcttcagaatgtacagcaagggcgccagcgagatcatcctgagaaagtgcaacagaatcctggacagaaagggcgaggccgtgcccttcaagaacaaggacagagacgacatggtgagaaccgtgatcgagcccatggcctgcgacggcctgagaaccatctgcatcgcctacagagacttcgacgacaccgagcccagctgggacaacgagaacgagatcctgaccgagctgacctgcatcgccgtggtgggcatcgaggaccccgtgagacccgaggtgcccgacgccatcgccaagtgcaagcaggccggcatcaccgtgagaatggtgaccggcgacaacatcaacaccgccagagccatcgccaccaagtgcggcatcctgacccccggcgacgacttcctgtgcctggagggcaaggagttcaacagactgatcagaaacgagaagggcgaggtggagcaggagaagctggacaagatctggcccaagctgagagtgctggccagaagcagccccaccgacaagcacaccctggtgaagggcatcatcgacagcaccgtgggcgagcacagacaggtggtggccgtgaccggcgacggcaccaacgacggccccgccctgaagaaggccgacgtgggcttcgccatgggcatcgccggcaccgacgtggccaaggaggccagcgacatcatcctgaccgacgacaacttcaccagcatcgtgaaggccgtgatgtggggcagaaacgtgtacgacagcatcagcaagttcctgcagttccagctgaccgtgaacgtggtggccgtgatcgtggccttcaccggcgcctgcatcacccaggacagccccctgaaggccgtgcagatgctgtgggtgaacctgatcatggacaccttcgccagcctggccctggccaccgagccccccaccgagagcctgctgaagagaagaccctacggcagaaacaagcccctgatcagcagaaccatgatgaagaacatcctgggccacgccttctaccagctgatcgtgatcttcatcctggtgttcgccggcgagaagttcttcgacatcgacagcggcagaaaggcccccctgcacagcccccccagccagcactacaccatcgtgttcaacaccttcgtgctgatgcagctgttcaacgagatcaacagcagaaagatccacggcgagaagaacgtgttcagcggcatctacagaaacatcatcttctgcagcgtggtgctgggcaccttcatctgccagatcttcatcgtggagttcggcggcaagcccttcagctgcaccagcctgagcctgagccagtggctgtggtgcctgttcatcggcatcggcgagctgctgtggggccagttcatcagcgccatccccaccagaagcctgaagttcctgaaggaggccggccacggcaccaccaaggaggagatcaccaaggacgccgagggcctggacgagatcgaccacgccgagatggagctgagaagaggccagatcctgtggttcagaggcctgaacagaatccagacccagatcgacgtgatcaacaccttccagaccggcgccagcttcaagggcgtgctgagaagacagaacatgggccagcacctggacgtgaagctggtgcccagcagcagctacgtggccgtggcccccgtgaagagcagccccaccaccagcgtgcccgccgtgagcagcccccccatgggcaaccagagcggccagagcgtgccctag

SEQ ID NO: 18356 - DNA, 3405 bp, Artificial Sequence
  derived and/or modified sequence
atgaccaaccccagcgacagagtgctgcccgccaacagcatggccgagagcagagagggcgacttcggctgcaccgtgatggagctgagaaagctgatggagctgagaagcagagacgccctgacccagatcaacgtgcactacggcggcgtgcagaacctgtgcagcagactgaagaccagccccgtggagggcctgagcggcaaccccgccgacctggagaagagaagacaggtgttcggccacaacgtgatcccccccaagaagcccaagaccttcctggagctggtgtgggaggccctgcaggacgtgaccctgatcatcctggagatcgccgccatcatcagcctggtgctgagcttctacagacccgccggcgaggagaacgagctgtgcggccaggtggccaccacccccgaggacgagaacgaggcccaggccggctggatcgagggcgccgccatcctgttcagcgtgatcatcgtggtgctggtgaccgccttcaacgactggagcaaggagaagcagttcagaggcctgcagtgcagaatcgagcaggagcagaagttcagcatcatcagaaacggccagctgatccagctgcccgtggccgagatcgtggtgggcgacatcgcccaggtgaagtacggcgacctgctgcccgccgacggcatcctgatccagggcaacgacctgaagatcgacgagagcagcctgaccggcgagagcgaccacgtgaagaagagcctggacaaggaccccatgctgctgagcggcacccacgtgatggagggcagcggcagaatggtggtgaccgccgtgggcgtgaacagccagaccggcatcatcctgaccctgctgggcgtgaacgaggacgacgagggcgagaagaagaagaagggcaagaagcagggcgtgcccgagaacagaaacaaggccaagacccaggacggcgtggccctggagatccagcccctgaacagccaggagggcatcgacaacgaggagaaggacaagaaggccgtgaaggtgcccaagaaggagaagagcgtgctgcagggcaagctgaccagactggccgtgcagatcggcaaggccggcctgctgatgagcgccctgaccgtgttcatcctgatcctgtacttcgtgatcgacaacttcgtgatcaacagaagaccctggctgcccgagtgcacccccatctacatccagtacttcgtgaagttcttcatcatcggcatcaccgtgctggtggtggccgtgcccgagggcctgcccctggccgtgaccatcagcctggcctacagcgtgaagaagatgatgaaggacaacaacctggtgagacacctggacgcctgcgagaccatgggcaacgccaccgccatctgcagcgacaagaccggcaccctgaccatgaacagaatgaccgtggtgcaggcctacatcggcggcatccactacagacagatccccagccccgacgtgttcctgcccaaggtgctggacctgatcgtgaacggcatcagcatcaacagcgcctacaccagcaagatcctgccccccgagaaggagggcggcctgcccagacaggtgggcaacaagaccgagtgcgccctgctgggcttcgtgaccgacctgaagcaggactaccaggccgtgagaaacgaggtgcccgaggagaagctgtacaaggtgtacaccttcaacagcgtgagaaagagcatgagcaccgtgatcagaaaccccaacggcggcttcagaatgtacagcaagggcgccagcgagatcatcctgagaaagtgcaacagaatcctggacagaaagggcgaggccgtgcccttcaagaacaaggacagagacgacatggtgagaaccgtgatcgagcccatggcctgcgacggcctgagaaccatctgcatcgcctacagagacttcgacgacaccgagcccagctgggacaacgagaacgagatcctgaccgagctgacctgcatcgccgtggtgggcatcgaggaccccgtgagacccgaggtgcccgacgccatcgccaagtgcaagcaggccggcatcaccgtgagaatggtgaccggcgacaacatcaacaccgccagagccatcgccaccaagtgcggcatcctgacccccggcgacgacttcctgtgcctggagggcaaggagttcaacagactgatcagaaacgagaagggcgaggtggagcaggagaagctggacaagatctggcccaagctgagagtgctggccagaagcagccccaccgacaagcacaccctggtgaagggcatcatcgacagcaccgtgggcgagcacagacaggtggtggccgtgaccggcgacggcaccaacgacggccccgccctgaagaaggccgacgtgggcttcgccatgggcatcgccggcaccgacgtggccaaggaggccagcgacatcatcctgaccgacgacaacttcaccagcatcgtgaaggccgtgatgtggggcagaaacgtgtacgacagcatcagcaagttcctgcagttccagctgaccgtgaacgtggtggccgtgatcgtggccttcaccggcgcctgcatcacccaggacagccccctgaaggccgtgcagatgctgtgggtgaacctgatcatggacaccttcgccagcctggccctggccaccgagccccccaccgagagcctgctgaagagaagaccctacggcagaaacaagcccctgatcagcagaaccatgatgaagaacatcctgggccacgccttctaccagctgatcgtgatcttcatcctggtgttcgccggcgagaagttcttcgacatcgacagcggcagaaaggcccccctgcacagcccccccagccagcactacaccatcgtgttcaacaccttcgtgctgatgcagctgttcaacgagatcaacagcagaaagatccacggcgagaagaacgtgttcagcggcatctacagaaacatcatcttctgcagcgtggtgctgggcaccttcatctgccagttcatcagcgccatccccaccagaagcctgaagttcctgaaggaggccggccacggcaccaccaaggaggagatcaccaaggacgccgagggcctggacgagatcgaccacgccgagatggagctgagaagaggccagatcctgtggttcagaggcctgaacagaatccagacccagatcgacgtgatcaacaccttccagaccggcgccagcttcaagggcgtgctgagaagacagaacatgggccagcacctggacgtgaagctggtgcccagcagcagctacgtggccgtggcccccgtgaagagcagccccaccaccagcgtgcccgccgtgagcagcccccccatgggcaaccagagcggccagagcgtgccctag

SEQ ID NO: 18357 - protein, 346 aa, Artificial Sequence
  derived and/or modified sequence
MMDKFRMIFQFLQSNQESFMNGICGIMALASAQMYSAFDFNCPCLPGYNAAYSAGILLAPPLVLFLLGLVMNNNVSMLAEEWKRPLGRRAKDPAVLRYMFCSMAQRALIAPVVWVAVTLLDGKCFLCAFCTAVPVSALGNGSLAPGLPAPELARLLARVPCPEIYDGDWLLAREVAVRYLRCISQALGWSFVLLTTLLAFVVRSVRPCFTQAAFLKSKYWSHYIDIERKLFDETCTEHAKAFAKVCIQQFFEAMNHDLELGHTHGTLATAPASAAAPTTPDGAEEEREKLRGITDQGTMNRLLTSWHKCKPPLRLGQEEPPLMGNGWAGGGPRPPRKEVATYFSKV

SEQ ID NO: 18358 - DNA, 1041 bp, Artificial Sequence
  derived and/or modified sequence
atgatggataaattccggatgattttccaattcctccagtccaatcaagagtccttcatgaacgggatatgtggcatcatggcactggcgtcagcacagatgtactcggcattcgactttaattgcccctgcctgccggggtataacgcagcctattctgcgggcatcctattagcccctcctctggttctgttcctgctgggcctggtcatgaataacaacgtctctatgctcgccgaggaatggaaaaggccacttggccgcagggctaaagatcctgccgtgctacggtacatgttctgctccatggcacagcgcgcattgattgcccctgtcgtctgggtggcggtaacacttctcgatggcaaatgtttcctgtgcgctttctgcaccgcagtccccgtgagcgcccttgggaacggatccttggcccctggcttgcccgctcctgaattggctcgcctgctggctagagtgccatgtcctgaaatttacgatggcgactggctgctggccagggaggtggccgtacggtatttgagatgtatctcacaggctcttggttggtctttcgtcttactcactactttactggccttcgtggtacgttcagtgcgaccatgctttacccaagctgctttcctcaaatctaaatattggagtcactacatcgacatcgaacgaaagctgttcgacgaaacctgcactgaacacgctaaggccttcgctaaggtctgtatccagcagttttttgaagctatgaaccacgacctggagttaggccatactcatggaaccttggccactgctccggcttccgcagcagcaccaactacccccgacggggcggaagaagagcgggaaaagttgcgtgggataactgaccagggcactatgaataggctgctgacgagctggcacaaatgcaaacctcccctacggttgggacaggaggaaccgcctcttatggggaatgggtgggcgggtggtggaccacggcctcctaggaaagaggtcgcaacgtacttcagtaaggtgtag

SEQ ID NO: 18359 - DNA, 1041 bp, Artificial Sequence
  derived and/or modified sequence
atgatggacaagttcaggatgatcttccagttcctgcagagcaaccaggagagcttcatgaatggcatctgtggcatcatggccctggccagcgcccagatgtacagcgcctttgacttcaactgcccctgcctgcccggctacaatgctgcctacagcgctggcatcctgctggccccacccctggtgctcttcctgctgggcctggtgatgaacaacaacgtgtccatgctggccgaggagtggaagaggcccctgggccggcgggccaaggaccctgctgtgctgcgctacatgttctgcagcatggcccagagggccctgattgcccctgtggtgtgggtggccgtgaccctgctggatggcaagtgcttcctgtgtgccttctgcacagctgtgcctgtgtctgccctgggcaatggcagcctggcccctggcctgcctgcccctgagctggcccggctgctggcccgggtgccctgcccagagatctatgatggagactggctgctggcccgggaggtggccgtgcgctacctgcgctgcatcagccaggccctgggctggagctttgtgctgctgaccaccctgctggcctttgtggtgcgctctgtgcggccctgcttcacccaggccgccttcctgaagagcaagtactggagccactacatcgacatcgagaggaagctgtttgatgagacctgcacagagcacgccaaggcctttgccaaggtgtgcatccagcagttctttgaggccatgaaccacgacctggagctgggccacacccacggcaccctggccacagccccagccagcgctgctgcccccaccaccccagatggagctgaggaggagcgggagaagctgcggggcatcacagaccagggcaccatgaaccggctgctgacctcctggcacaagtgcaagccacccctgcggctgggccaggaggagccccccctgatgggaaatggctgggccggcggcggcccccggccccccaggaaggaggtggccacctacttcagcaaggtgtag

SEQ ID NO: 18360 - DNA, 1041 bp, Artificial Sequence
  derived and/or modified sequence
atgatggacaagttccggatgatcttccagttcctgcagagcaaccaagaatccttcatgaacggtatatgtggcatcatggccctcgccagcgcccagatgtattcggcttttgattttaactgcccatgcctgcccggatataatgccgcttattccgccggcatcttgcttgctcccccattggtcctcttcctgttagggctggtgatgaataataatgtgtctatgctggccgaggagtggaaaaggcctctggggcgacgcgccaaggatcctgcagtgctgaggtatatgttttgcagtatggctcagcgggcattaatcgctcctgtagtctgggttgctgtgacactgctggatggcaagtgttttctgtgcgccttctgcacagccgtgcccgtgtccgccctgggcaacggttctcttgctccaggactccccgcccctgaattggcccgccttctcgcccgcgtcccgtgcccagagatatacgatggtgactggctactggcccgggaggtggctgtaaggtacctgagatgcattagccaagcattgggatggagttttgtattgctaacaaccctcctcgcattcgtggtccggtcagtacggccttgcttcacacaggccgccttcctgaaatcgaagtattggtcccactatatcgatatcgagcgcaaattattcgacgaaacatgtacagaacatgcaaaggctttcgccaaagtgtgcatccagcagttttttgaggccatgaaccacgacctggagctggggcatacccacggaacgctggccactgcacctgcctctgctgccgcgccaactacacccgatggggctgaagaggagcgggagaagcttcgggggattactgatcagggaactatgaacagactgctgactagctggcacaaatgcaagccgcccctgagactggggcaggaggagcctcctctaatggggaacgggtgggccggcggcggcccgagacctccccgaaaggaggtggcaacatatttcagtaaagtttag

SEQ ID NO: 18361 - DNA, 1041 bp, Artificial Sequence
  derived and/or modified sequence
atgatggacaagttccggatgattttccagtttctgcagtctaaccaggaaagtttcatgaatggcatctgcggaatcatggccctcgcttccgcacagatgtattctgcatttgatttcaattgtccttgcttgccaggatataacgccgcatacagcgctggcatcctcctcgccccacctcttgtgttgtttctcctgggactggtgatgaataacaatgtctccatgctagctgaggagtggaagcggccactgggacgaagggccaaagaccctgcggtgctccgctacatgttctgctccatggcccaaagagcactgattgcccctgtggtgtgggtggctgtaacattattggatggaaagtgctttttgtgtgctttttgcacagccgtgcctgtatcagcgctggggaatggttcactggcccctggcctacccgctcccgagttagcgagattattggcgagagtgccctgtccggagatttacgacggggattggctgttggcccgagaagtggcagtccgctacttgcgatgtatttcccaggccttaggatggtcattcgtcttgctgaccacacttctggcattcgtcgttagaagcgtcaggccctgttttacccaggctgcttttctgaaatccaaatactggtcccattacatcgacatagaaagaaaattgtttgacgaaacgtgtacagagcacgccaaggccttcgctaaggtctgcatacaacaatttttcgaggctatgaaccacgacttggagcttgggcacacccatgggaccctcgcgaccgccccagcctcagctgctgccccaacaactcctgacggggctgaagaggagagagaaaagctgcgtggcataaccgaccagggtacaatgaaccgcctgctcacgagctggcataaatgtaagcctcccctgcgtctgggccaggaagagccacccttgatgggcaacggatgggcaggtggcggacctcggccacctcgcaaagaggtggccacctattttagcaaagtgtag

SEQ ID NO: 18362 - DNA, 3053 bp, Artificial Sequence
  derived and/or modified sequence
ctctgctctgagctctgttggtcccagccaggagagcccgagtcatgaggtgggcacccagtgggcagggtgggcagcaggggccctcttggaggcagcagtgagttgggaagaggaggccgggccccacagcgggcatgatggacaagttccggatgatcttccagttcctgcagtccaaccaggagtccttcatgaatggcatctgtggcatcatggccctggccagtgcccagatgtactcggccttcgacttcaactgcccctgcctgccgggctacaatgcagcctacagcgcgggcatcctgctggcgccacccctggtgctctttctgcttggcctggtcatgaacaacaacgtgtccatgctggccgaagagtggaagcggccgctgggccgccgggccaaggaccccgctgtgttgcgctacatgttctgctccatggcccagcgcgccctcatcgcgcctgtcgtctgggtggccgtcacgctactcgacggcaaatgcttcctctgtgccttctgcactgccgtgcccgtgagcgcactgggcaacggcagcctggcacccggccttcctgcccccgagctcgcccgcctgctggcccgggtgccctgccctgagatctacgatggcgactggctgttggcccgagaggtggccgtgcgttacctccgctgcatctcccaggcgctgggctggtccttcgtgctgctgaccactctgctggcattcgtggtgcgctctgtgcggccctgcttcacgcaggccgccttcctcaagagcaagtactggtcccactatatcgacatcgagcgcaagctcttcgacgagacgtgcacggagcacgccaaagcctttgccaaggtctgcatccagcagttcttcgaggccatgaaccatgacctggagctgggtcacacccacgggacactggccacggcccctgcttccgcagctgcccccacgacccccgatggtgcggaggaggaaagggagaagctgcgtggcatcacggatcaaggcaccatgaacaggctgctcacgagctggcacaaatgcaaaccgcctctgcggctgggccaggaggagccaccgctgatgggcaacggctgggctgggggtgggccccggcctccgcgtaaggaggtggccacctacttcagcaaagtgtgaggtgtggccagctgaagaggcaggaacggggatctgagcccacagcccctccaacccccaaaccaggtggaaaaaggaagggtttcagtgctgggcagtactcccctaggcagatccacactccctagcactcgcctgcccattggaggcaggaaatttggagctggaaggggatctgatgccttcaggtgtgacactgccctggatggccctagggcagtgggcccatgagcagtattagtctaaaggggtcggaactgtcatggcaggtacagggaccaatggctcccctctgcccagcccttcccaggctgatgttcactgtctcctcccaggttcaacagacatccctgccccagggtccaccctcgtctgtggctgttcagtacctctcttcctttatgctccgggctcggggagtgggaatcatcaggcgtctcatgaagtgggagccctctgatttgggcaagcgtgtcgtaggtgagactgggtgtgccggggcaggtccataaggacatgacacacagcctacctggtgtgacacacctggggtgacaggcgatgagacaagatgtcagaagctaggttcacatggaagaggtcagagtgtgtggtcaccatgggggtcatgtgacaattgtccaggtggactgcatgtttatttagcacaaaccaagcacaaaagtcctcctgtagaggggtctttgaaaaaccaccttaatacccccgtcacatccaggtctccaggggaaatcagaccatccccaaggcttgagaagttagacacagaagctgaagtctctccatttttctcaaagaccccacctcttggggatggagttctaagaggctaagaggagctccaaggctctagcccaggtgggatgagggtggaggagagcagtgtaaagagaaagcagctcagattccagagtgagacagaactgggtcaaatggtgtctctaccactcacaaaccctgtccctgggccagctgcatcactgcctgtgccttcgtttcttcatctatacaatgaggatgaggcccccccggcccgccatcatggggttgctgtgtgtaaaagcacatggcacatagtaggcacccagcacagggtggctaatgtatttgttgatttctgaacctaaggacttccttcctcctcccctgggcagggatgagacagcaacacaaacactcgagcttccatcttgttgaggaggaaacagaggtacagataggtttctcagcaccgccctcagctctgagacataagtcccaagcatctaaggattcattttgatcttggcatgattccatccttttttatccatccttccctctattcccacttctggggtccagtttccctcctcttaattatttgggaggagttgctcagatctttgtgggccaaggtgggctgggagggctcttccaggaggtaggagttggtatgggccctgaagtcagggaggattaggatgagcaaaaaacaaggtgtatgttggtgggtggcagcacttccagtgggaagagaaggcccggaggtatcaggaggtacaaatgtgatgaagagcaaagctttgggtcaggcacacctgagttcaaataccagcactgcaggacttgtggccagtcacccagccactctaagcctcagtgtgtctgtctataaaatggatattagaagacctgcttggccaggcggagtggctcatgcctgtaatcccagcacttgggaggccaaggagggaggatcacttgagcctgggagttggagaccagcctgggcaacatagcaagactctgtctctgtaaagtaataataataataagaagaagaagaagaataaagagaagatttataatttt

SEQ ID NO: 18363 - DNA, 1041 bp, Artificial Sequence
  derived and/or modified sequence
atgatggacaagttcagaatgatcttccagttcctgcagagcaaccaggagagcttcatgaacggcatctgcggcatcatggccctggccagcgcccagatgtacagcgccttcgacttcaactgcccctgcctgcccggctacaacgccgcctacagcgccggcatcctgctggccccccccctggtgctgttcctgctgggcctggtgatgaacaacaacgtgagcatgctggccgaggagtggaagagacccctgggcagaagagccaaggaccccgccgtgctgagatacatgttctgcagcatggcccagagagccctgatcgcccccgtggtgtgggtggccgtgaccctgctggacggcaagtgcttcctgtgcgccttctgcaccgccgtgcccgtgagcgccctgggcaacggcagcctggcccccggcctgcccgcccccgagctggccagactgctggccagagtgccctgccccgagatctacgacggcgactggctgctggccagagaggtggccgtgagatacctgagatgcatcagccaggccctgggctggagcttcgtgctgctgaccaccctgctggccttcgtggtgagaagcgtgagaccctgcttcacccaggccgccttcctgaagagcaagtactggagccactacatcgacatcgagagaaagctgttcgacgagacctgcaccgagcacgccaaggccttcgccaaggtgtgcatccagcagttcttcgaggccatgaaccacgacctggagctgggccacacccacggcaccctggccaccgcccccgccagcgccgccgcccccaccacccccgacggcgccgaggaggagagagagaagctgagaggcatcaccgaccagggcaccatgaacagactgctgaccagctggcacaagtgcaagccccccctgagactgggccaggaggagccccccctgatgggcaacggctgggccggcggcggccccagaccccccagaaaggaggtggccacctacttcagcaaggtgtag

SEQ ID NO: 18364 - protein, 80 aa, Artificial Sequence
  derived and/or modified sequence
MTSMASLFSFTSPAVKRLLGWKQGDEEEKWAEKAVDALVKKLKKKKGAMEELEKALSSPGQPSKCVTIPRSLDGRLQVSH

SEQ ID NO: 18365 - protein, 128 aa, Artificial Sequence
  derived and/or modified sequence
MTSMASLFSFTSPAVKRLLGWKQGDEEEKWAEKAVDALVKKLKKKKGAMEELEKALSSPGQPSKCVTIPRSLDGRLQVSHRKGLPHVIYCRVWRWPDLQSHHELKPLDICEFPFGSKQKEVCINPYHY

SEQ ID NO: 18366 - protein, 134 aa, Artificial Sequence
  derived and/or modified sequence
MTSMASLFSFTSPAVKRLLGWKQGDEEEKWAEKAVDALVKKLKKKKGAMEELEKALSSPGQPSKCVTIPRSLDGRLQVSHRKGLPHVIYCRVWRWPDLQSHHELKPLDICEFPFGSKQKEVCINPYHYKRVESP

SEQ ID NO: 18367 - protein, 464 aa, Artificial Sequence
  derived and/or modified sequence
MTSMASLFSFTSPAVKRLLGWKQGDEEEKWAEKAVDALVKKLKKKKGAMEELEKALSSPGQPSKCVTIPRSLDGRLQVSHRKGLPHVIYCRVWRWPDLQSHHELKPLDICEFPFGSKQKEVCINPYHYKRVESPVLPPVLVPRHNEFNPQHSLLVQFRNLSHNEPHMPQNATFPDSFHQPNNTPFPLSPNSPYPPSPASSTYPNSPASSGPGSPFQLPADTPPPAYMPPDDQMGQDNSQPMDTSNNMIPQIMPSISSRDVQPVAYEEPKHWCSIVYYELNNRVGEAFHASSTSVLVDGFTDPSNNKSRFCLGLLSNVNRNSTIENTRRHIGKGVHLYYVGGEVYAECLSDSSIFVQSRNCNFHHGFHPTTVCKIPSSCSLKIFNNQEFAQLLAQSVNHGFEAVYELTKMCTIRMSFVKGWGAEYHRQDVTSTPCWIEILHGPLQWLDKVLTQMGSPLNPISSVS

SEQ ID NO: 18368 - DNA, 7012 bp, Artificial Sequence
  derived and/or modified sequence
ccgggtcctgggcgagcgggcgccgtgcgcgtgtcccgcggccgagctgctaataaagttgcagcgaggagaagcgcagcgacggcgtcgggagagcgcgcctagccggctcgcgaaaaggaagctgttgaagttattgaagtacctgttgctatattctaagaaattaaaatgtccagaaatctgcctctgacttgacccaatgaaagaagcatatggcacttgtgaagataaatgttactcctccctttttaattggaacttctgcttaggacctgtgtatgacgtttcacctgtgatctgttctttcggtagccactgactttgagttacaggaaggtctccgaagatttgtgtcaaatgacgtcaatggccagcttgttttcttttactagtccagcagtaaagcgattgttgggctggaaacaaggtgatgaggaggagaaatgggcagaaaaggcagttgatgctttggtgaagaaactaaaaaagaaaaagggtgccatggaggaactggagaaagccttgagcagtccaggacagccgagtaaatgtgtcactattcccagatctttagatggacgcctgcaggtttctcacagaaaaggcttaccccatgttatatattgtcgtgtttggcgctggccggatttgcagagtcatcatgagctaaagccgttggatatttgtgaatttccttttggatctaagcaaaaagaagtttgtatcaacccataccactataagagagtggagagtccagtcttacctccagtattagtgcctcgtcataatgaattcaatccacaacacagccttctggttcagtttaggaacctgagccacaatgaaccacacatgccacaaaatgccacgtttccagattctttccaccagcccaacaacactccttttcccttatctccaaacagcccttatcccccttctcctgctagcagcacatatcccaactccccagcaagttctggaccaggaagtccatttcagctcccagctgatacgcctcctcctgcctatatgccacctgatgatcagatgggtcaagataattcccagcctatggatacaagcaataatatgattcctcagattatgcccagtatatccagcagggatgttcagcctgttgcctatgaagagcctaaacattggtgttcaatagtctactatgaattaaacaatcgtgttggagaagcttttcatgcatcttctactagtgtgttagtagatggattcacagatccttcaaataacaaaagtagattctgcttgggtttgttgtcaaatgttaatcgtaattcgacaattgaaaacactaggcgacatattggaaaaggtgttcatctgtactatgttggtggagaggtgtatgcggaatgcctcagtgacagcagcatatttgtacagagtaggaactgcaactttcatcatggctttcatcccaccactgtctgtaagattcccagcagctgcagcctcaaaatttttaacaatcaggagtttgctcagcttctggctcaatctgtcaaccatgggtttgaggcagtatatgagctcaccaaaatgtgtaccattcggatgagttttgtcaagggttggggagcagaatatcaccggcaggatgtaaccagcaccccatgttggattgagattcatcttcatgggcctcttcagtggctggataaagtccttactcagatgggctcccctctgaaccccatatcttctgtttcataatgcagaagtattcttttcaattatattgttagtggacttgttttaattttagagaaactttgagtacagatactgtgagcttacattgaaaacagatattacagcttatttttttctacataattgtgaccaatacatttgtattttgtgatgaatctacatttgtttgtattcatgttcatgtgattaactcttagaagtgttgtaaaagatgcagagtaagtattatgccccagttcagaaatttggcattgatcttaaactggaacatgcttttactttattgccctaacaattttttattaaatttatttgaaaatgcatcacatgatgaaaaattatagtagcttataagagggcatatacagtgaagagtaagttttccctcctactctcgatcttccagaagctgtacttttaccagtttctttgtcccaccaacttaaaaaaaaaaagtacaattcattgttttgcaaaagtgtatggtaggggcttaaaagaaactataaagttttatttgaatgaacactatgcactgctgtaactggtagtgttcagtaaaagcaaaatgatagttttctagatgacataaaatttacatttaatacagataagtgttcttcagtgtaatgtgacttcatgctatatatcttttgtaagacatttccttttttaaaaaaatttttgcaaataactgatctcaagtatatgtcatttactcaaaatctgtcataagcattactttatagctagtgacagtgcatgcacagccttgttcaactatgtttgctgcttttggacaatgttgcaagaactctatttttgacatgcattaatcttttattttgcacttttatgggtgacagtttttagcataacctttgataaaatacactcaagtgacttggacttagatgcttatccttacgtccttggtaccttttttgtattaacaaacactgcaatttatagattacatttgtaggaagttatgcttttttctggtttttgttttactttcaacctaggttataagactgttattctatagctccaacttaaggtgcctttttaattccctacagttttatgggtgttatcagtgctggagaatcatgtagttaatcccattgctcttacaagtgtcagcttacttgtatcagcctccctacgcaaggacctatgcactggagccgtaggaggctcttcagttgggccccaaggataaggctactgatttgatactaaatgaatcagcagtggatgtagggatagctgattttaaaacactcggctgggcacagtggctcacacctgtaatcccagcactttgggaggctgaggcaggcagatcatgatgtcaggagtttgagaccagcctggccaatatggtgaaaccctgtctctacaaaaaatacaaaaattagctgggcatggtggtgcgtgcctgaagtcccagctactcgggaagctgaggcagaagaatcacttgaacctgggaggcggaggttgtggtgagccgagatcgcaccactgcactccagcctgggcgacagagcgagactctgcctcaaaaaacaaaacaaaacaaaacactcacccatcaacgaatatagactcttctctcatttatcgatgatcctctttttccattttttaagtacttatgtggaagctagtctcccaaaacacaatctttagagagaaaagacatgaacgaactccaaaatatccatttaatcaatcatgtttttggctttggataaagaactttgaaccagtttttttctcaggagctgtcaaatggacacttaattatgacatgagaatgaagaaattattttggaaaaaaaaaatgacctaatttacctatcagtgaaagctttattttctggtgccttttgaaagtatatggagtcatatcattcttctgtttaaaatgttagtttggtttgactttccactttgtcctttctgctcttgtgaagaaaaaaaaaagcattttcgaggaaagaattatgcaatttcttttgttttctgtgtcattatttattgctttttcaatgtgcagccagtggatggttttagttctttcagatgaactgccatttgtgtttcagctcacagttctttgctgggtaaaagaaatactttctgacagtcacctgagccttaaatgtaagtattacatgacatgcattctgtttcttccagagttctgtctgccacacgaaagagaatatttgcttacttgatagaactttggcattttcatcattcttttacttaaccaggcttatggcatgatctctggaacaaatttgtaggaaaaaattactccaattgaatgactgatgtatgtaatcaacttcattgggctgcagtaaactagtggaaattagagagttgttttattggtgttttctactgtgagttaattaaaaattgtttttatttggggtcattatgtcacagtcttgagttaacaagatcttacgtgattggccttttctttgttttctcttaggagttgtgtctcatgaatgacagtactaaagctattaacaactaagagtttgacagagaactataagcctgttgtatctcctaaaagttgtcaactccccacccttggactttaaatgaaaattttattcagtccagctattcttacagtccctaaggattttcatatatctatgtataggagataaaatttgctagtaagatttttaaaaactggctagtgaaaggaaagtacctctgaaagaaaccattttagcaaattatggttatatgttttaatttaatctacagaatgttttatagtaaaattctagcaccactagaataatcacatagcatgtacaatatatttatgctggctgaaaagacagaatctgggaataataaaattgcaaccagtttggtaatgcaaacagcagaatagaatgaaatctcagtaatgaattaaagcaacaaaaagatattgattggcaaaaagcaagatataagagattcatttgcttaacatttctacataatatttatggtctggtcagtattggtctggtcagtattgcctggctgacgtgaaatgtaaactagtaggcgtgttattgatctgctaaaactaaccctctttttaagaggagatttaaggaagacgtcaatcaaaatgtcaaatatgtgtgtcagaatataaataatttttcacattgtattgttgctatataaaaaaaataatagaattggttgggtttctgaggtgaaatccagagtaagagtactagacagttcaacaagccacatctaatggcacagatagaggatgtagctattttatacctttcataacatttgagagtaagatatccttcaggatgtgaagtgattattaagtactcatacctgaaatctgttgtcaagattagaactggggttcatgttaaaaaccttccatattacctgagggtacctgtggggaacagttccttcccctgtgtggtagtattttgttggaagagaatgtttatacaaaaaatgaaattcttccaacagcagagaaactctaaaaagtttgatagtacctatcaaagtgctgtacttctgtgatagagaacatctgatgtaccaatttagatctatttctttatactttttctaatcaattgcttaatagtactttggatgattatcacctttgccacttaaaatatataaatatcctttttacttcatgaggaaggaagaattttttgataattactgagttcagccttttgtgatgacttatattttggacttacattttaactttaaagaatgtcagatcccttctttgtcttactagttaaatcctcacctaatctcttgggtatgaatataaatgtgtgtcatcgttatattgttcagctagatgagcaagtatcttagggtagtaggtagcctggtggttttagaagtgtttggtgatttttatggagagagttttcctaagtggtggtttataggtggtatcagatattattagggcagctttttggggagtaatctcaggtctcccagagcagcagcatttttctcattgatataagtaagattcttaggagcttttcttatcacacaagatgcctgaatcgaatgtgagaattgaaggcatttcttctgcataaacaaagaattctacctgctggacagaaacctggaaagttctttggaattcgctgaattacagtttagtatgtcctgattacagagtgacaatatttatcaagcctttgttatattggattatcttctctcttaaaatacaactgtattataattgaaatgacagcccaaaattggatggtttaccaaaaccaatgaaagggatttcacacatcaatttttatttctgttttgaagagcacatgctatataataattgctagtagcaactgcagtaaaacaggtgataagttattttctctgaaaagatccagtcctagagcaggattcttcgatcattcatggcagagtgaaaaaggtttgtatggttcttgtccaaataactcagttcttaaaattcttaaaatgatcgtaaaccattatcctttaaaggtttatttgaagatgctgttaaagtacagaattttgtgtacaggtagatttttccgtccctcattaatagtgccttcttaattaatacagactggtgttagctataacaaaactccagtaaggccaaagaatcccaagttctttgtggaaaaaaaaaaaaaatcttttagggtcagattttcccttctaatatcattgaagatgatgttgcattgatttattcataaagtattttaactataggaactctagaagataatggttaggcaagtgattttttttttaaatatggttggcgtaagttgtattttgaaattcacttattttaaaatcgaagaggattgtaatcatggaaatagaatgtttgtatctacctgcccacattttcttaaaaagatatttcatatacagataatgaagaccaagctagtggctgcactgtaggtctgctgcttatttgtatttgttgtgcttctgtttatgttgtagaagctgaaattctagcaacatgcttcaattctgttattttgatacttatgaaaatgtattaggttttactatattgtgcttttgaaagccataactcttaagaactttgtttttgcatattgtttgctaattctttactttaataaacctcaaaacctgc

SEQ ID NO: 18369 - DNA, 243 bp, Artificial Sequence
  derived and/or modified sequence
atgacctctatggctagcctctttagtttcactagcccagcggtcaaacgtttgctgggatggaagcagggcgatgaggaggagaagtgggctgaaaaggcagtcgacgctctagtgaaaaagcttaagaagaaaaagggcgcaatggaggaactggaaaaggctctttcaagccccggccaacctagtaaatgcgtgacaatacctaggtcactggacggacgactgcaggttagtcactag

SEQ ID NO: 18370 - DNA, 387 bp, Artificial Sequence
  derived and/or modified sequence
atgaccagcatggcaagcctgtttagcttcacgagtcccgccgtcaaacggctccttgggtggaaacagggcgatgaagaggagaaatgggcagagaaagccgtagacgcactcgtgaagaaactcaagaagaagaaaggtgcaatggaagagctggaaaaggctctatcctcccccggccagccatctaagtgcgtgactatccctcgttcactagatgggcggcttcaggtctcacataggaaagggttaccacatgttatttattgccgggtgtggagatggcctgacctccagtcacatcacgagctcaagccattagacatctgtgagtttcccttcggatccaaacagaaagaggtctgcattaacccttaccactactag

SEQ ID NO: 18371 - DNA, 405 bp, Artificial Sequence
  derived and/or modified sequence
atgacctctatggcatccttattttccttcacgagccccgcagtgaagcggctgctggggtggaagcaaggagacgaggaggagaagtgggctgagaaagccgtggacgccctcgtaaagaagctgaagaagaaaaagggggccatggaggagcttgagaaggcactgtcctctcccggccagccctcgaagtgcgtgacgatcccaagaagcctggacgggcgcctgcaggtttcacaccggaagggactgccgcatgttatttactgccgcgtgtggagatggccagacctgcaatcccatcacgagcttaaacccctcgacatttgtgagtttccatttggctcgaagcagaaggaagtttgcatcaatccataccactacaagagggtggagtcaccgtag

SEQ ID NO: 18372 - DNA, 1395 bp, Artificial Sequence
  derived and/or modified sequence
atgacctccatggccagtctgttcagctttacctccccagcagttaagcgactgctaggatggaaacagggggatgaggaagagaaatgggcagagaaagctgtggatgccctcgtgaaaaaactcaagaaaaagaaaggggctatggaggaactggagaaggccctttccagtcctgggcagcccagtaagtgcgtgacgatcccaaggtctctggacggcagactccaggtgtcacataggaagggcctcccacatgtaatctactgtcgtgtttggcggtggccagatctccagtctcaccacgagctgaagccactggacatttgtgagtttcctttcggatctaaacaaaaagaggtgtgtatcaatccataccactataaacgcgtggagagccctgtgcttcctcctgtgctcgttcccaggcataacgaattcaaccctcagcacagcctcctagtgcagtttaggaacctctctcacaacgagccccacatgcctcagaacgccacctttcccgactcttttcaccaacctaacaatacaccttttccgctgtcacctaatagtccgtacccgccctcaccagcaagctccacttatccaaattcccccgcctcaagtgggcctggtagcccgttccagctgcccgccgatacaccgcctccagcatacatgcctcccgatgaccagatgggccaggataactcacaacccatggacacaagtaataatatgattcctcaaattatgccctccatctcgagcagagatgtgcaacctgtggcttatgaggagcctaaacattggtgtagtatagtctattatgagcttaataaccgagtaggagaggcgttccatgctagcagtaccagcgtgctcgtggatggtttcactgacccatctaacaacaaatccagattctgtttaggtttactctctaatgtgaatcgcaactcgaccattgaaaatacacgcagacatatcggaaagggcgtgcatctgtactatgtcggtggcgaagtatacgccgagtgtctgtccgattcctcaatcttcgtccagagtcggaattgcaatttccaccatggctttcatcctaccaccgtgtgtaaaattccgtcttcatgttcgttgaaaatctttaacaatcaggaattcgctcaactgctggcccagagcgttaaccatggatttgaggcagtttatgaactgaccaaaatgtgtacaatacgtatgtcttttgtgaaggggtggggggcagagtaccaccggcaagatgttacttcaaccccgtgttggatcgagatcctgcacggccctctccagtggctagataaggtcctgacccagatgggaagccctttgaaccctatctcctcagtttcctag

SEQ ID NO: 18373 - DNA, 1395 bp, Artificial Sequence
  derived and/or modified sequence
atgactagcatggcctcgctcttctcattcacctcgccagctgttaaaaggttacttggctggaaacaaggcgacgaggaagagaagtgggctgagaaggccgtggatgcactggttaaaaaactcaaaaaaaaaaagggggcaatggaagaactggaaaaagctctctctagtcctggtcagccaagcaagtgtgtgaccattccccgttcactcgacgggcgattgcaagtgtcccacaggaaggggctgcctcatgtgatttactgccgcgtttggagatggcccgatctgcagagccaccatgaattgaaacccctggacatatgcgagtttccatttggaagtaaacagaaggaggtgtgtatcaacccttaccattataagcgcgtcgaaagtcctgtgcttcccccagtcctagtgccacgtcacaacgaatttaaccctcagcacagcctgctggtgcagttccgtaatttgtcccataatgagccgcacatgccccagaatgcaactttccccgactctttccaccagcccaataataccccttttccgctatctcccaattcaccatatcctccaagcccagcctcttctacatatcccaattctcccgcctcatctggcccagggtctcccttccagctgcccgccgacacacccccacccgcatacatgcctcccgacgaccagatgggacaagataactcccagcccatggacacatcgaacaacatgatcccgcaaattatgccctctatatccagtcgggacgttcagcccgtggcctacgaagagcccaagcattggtgctctattgtttattacgaattaaataatcgcgtcggtgaggcctttcatgcttcatccacatctgtgcttgtggacggctttacagacccctcaaacaataaatcccgtttctgtctcggcctactctccaatgtgaataggaattcaactattgaaaacacccggaggcacatcggcaaaggcgtgcacctttattacgtgggaggtgaggtgtacgcagaatgtcttagcgactcatccatcttcgtccaaagtcgaaactgtaatttccatcatgggttccatcccacaacagtctgtaagattccttcctcctgttcactcaagatatttaacaaccaggagtttgcccaacttctggcccagtcagtgaatcacggcttcgaggcggtctatgaattgacaaaaatgtgcacaattcggatgtcgttcgttaagggctggggggctgagtaccataggcaggacgtgacctctactccgtgctggattgagatactgcatgggccactccagtggctggataaagtgctgactcagatgggctctccactgaatccaatttcgagcgtgtcctag

SEQ ID NO: 18374 - DNA, 243 bp, Artificial Sequence
  derived and/or modified sequence
atgacctccatggccagcctcttctccttcaccagccctgctgtgaagaggctgctgggctggaagcagggagatgaggaggagaagtgggccgagaaggctgtggatgccctggtgaagaagctgaagaagaagaagggggccatggaggagctggagaaggccctgagcagccctggccagcccagcaaatgtgtgaccatccccaggagcctggatggccgcctgcaggtgagccactag

SEQ ID NO: 18375 - DNA, 387 bp, Artificial Sequence
  derived and/or modified sequence
atgacctccatggccagcctcttctccttcaccagccctgctgtgaagaggctgctgggctggaagcagggagatgaggaggagaagtgggccgagaaggctgtggatgccctggtgaagaagctgaagaagaagaagggggccatggaggagctggagaaggccctgagcagccctggccagcccagcaaatgtgtgaccatccccaggagcctggatggccgcctgcaggtgagccacaggaagggcctgccccacgtgatctactgccgggtgtggcgctggccagacctgcagagccaccacgagctgaagcccctggacatctgtgagttccccttcggcagcaagcagaaggaggtgtgcatcaacccctaccactactag

SEQ ID NO: 18376 - DNA, 405 bp, Artificial Sequence
  derived and/or modified sequence
atgacctccatggccagcctcttctccttcaccagccctgctgtgaagaggctgctgggctggaagcagggagatgaggaggagaagtgggccgagaaggctgtggatgccctggtgaagaagctgaagaagaagaagggggccatggaggagctggagaaggccctgagcagccctggccagcccagcaaatgtgtgaccatccccaggagcctggatggccgcctgcaggtgagccacaggaagggcctgccccacgtgatctactgccgggtgtggcgctggccagacctgcagagccaccacgagctgaagcccctggacatctgtgagttccccttcggcagcaagcagaaggaggtgtgcatcaacccctaccactacaagagggtggagagcccctag

SEQ ID NO: 18377 - DNA, 1395 bp, Artificial Sequence
  derived and/or modified sequence
atgacctccatggccagcctcttctccttcaccagccctgctgtgaagaggctgctgggctggaagcagggagatgaggaggagaagtgggccgagaaggctgtggatgccctggtgaagaagctgaagaagaagaagggggccatggaggagctggagaaggccctgagcagccctggccagcccagcaaatgtgtgaccatccccaggagcctggatggccgcctgcaggtgagccacaggaagggcctgccccacgtgatctactgccgggtgtggcgctggccagacctgcagagccaccacgagctgaagcccctggacatctgtgagttccccttcggcagcaagcagaaggaggtgtgcatcaacccctaccactacaagagggtggagagccctgtgctgccccctgtgctggtgcccaggcacaatgagttcaacccccagcacagcctgctggtgcagttcaggaacctgagccacaatgagccccacatgccccagaatgccaccttcccagacagcttccaccagcccaacaacacccccttccccctgagccccaacagcccctacccacccagccctgccagcagcacctaccccaacagccctgccagcagcggccctggcagccccttccagctgcctgctgacaccccacctccagcctacatgcccccagatgaccagatgggccaggacaacagccagcccatggacaccagcaacaacatgatcccccagatcatgcccagcatcagcagcagagatgtgcagcctgtggcctatgaggagcccaagcactggtgcagcatcgtgtactatgagctgaacaacagagtgggggaggccttccacgccagcagcacctctgtgctggtggatggcttcacagaccccagcaacaacaagagccgcttctgcctgggcctgctgagcaatgtgaacagaaacagcaccatcgagaacaccaggaggcacatcggcaagggcgtgcacctgtactacgtgggcggggaggtgtatgcagagtgcctgagtgacagcagcatctttgtgcagagcaggaactgcaacttccaccacggcttccaccccaccaccgtgtgcaagatccccagcagctgcagcctgaagatcttcaacaaccaggagtttgcccagctgctggcccagagcgtgaaccacggctttgaggccgtgtatgagctgaccaagatgtgcaccatccgcatgagctttgtgaagggctggggcgctgagtaccaccggcaggatgtgaccagcaccccctgctggattgagatcctgcacggccccctgcagtggctggacaaggtgctgacccagatgggcagccccctgaaccccatcagctctgtgtcctag

SEQ ID NO: 18378 - DNA, 243 bp, Artificial Sequence
  derived and/or modified sequence
atgaccagcatggccagcctgttcagcttcaccagccccgccgtgaagcgactgttgggctggaagcagggcgacgaggaagaaaaatgggcggaaaaggccgtagatgcgctcgtgaagaagctcaagaaaaaaaaaggtgctatggaggagttagaaaaggccctgtctagtccaggtcagcccagtaaatgcgtcaccattcccagatctctggacggcaggctgcaagtgtcccattag

SEQ ID NO: 18379 - DNA, 387 bp, Artificial Sequence
  derived and/or modified sequence
atgaccagcatggccagcctgttcagcttcaccagccccgccgtgaaacggcttttaggttggaagcagggggacgaggaagagaaatgggccgagaaggccgtcgacgctcttgtcaagaagcttaaaaaaaaaaagggggccatggaggagcttgaaaaagccctctccagtcccggccagcctagtaagtgtgtgaccatccccagatcgttagacgggaggctgcaggtttcgcaccgcaaaggtctgcctcacgtcatatactgtcgtgtctggcgatggccagatctgcagagtcatcatgagttaaaacctctggatatctgcgaattcccattcggctctaagcagaaagaagtgtgcatcaatccgtatcattactag

SEQ ID NO: 18380 - DNA, 405 bp, Artificial Sequence
  derived and/or modified sequence
atgaccagcatggccagcctgttcagcttcaccagccccgccgtgaagcgcttgttgggctggaagcagggcgacgaggaagaaaagtgggccgaaaaagctgtggatgcacttgtcaagaagcttaagaaaaaaaagggtgctatggaggagctggagaaggcactgtcttcgccagggcagccatctaaatgcgtgaccattccccgctccctggatggccggctgcaggtgtctcatcgaaaagggctccctcatgtgatttactgccgggtctggcggtggccagatttacagtcccaccatgagttaaagcccctggatatatgtgagttcccgttcggatccaaacagaaggaggtctgcatcaacccatatcattacaagcgtgtggaatcgccttag

SEQ ID NO: 18381 - DNA, 1395 bp, Artificial Sequence
  derived and/or modified sequence
atgaccagcatggccagcctgttcagcttcaccagccccgccgtgaagcgcctgttagggtggaagcagggcgacgaggaagagaagtgggccgagaaagctgttgatgccttggtcaagaagctgaagaagaagaaaggggccatggaagaactggaaaaggcactgtcctccccaggccagcccagtaaatgcgtgaccataccgaggagtctggacgggagattgcaggtgtcccatcgaaagggactaccacatgttatctactgtagggtgtggcgctggccagacttgcaatcccaccatgagctcaaaccgttggatatttgcgaattcccctttggctccaagcagaaagaagtctgcataaacccctaccactataaaagagttgagagtcctgttttgcctccagtactggttcctaggcacaacgagttcaatccacagcacagtctcctcgtccagtttagaaacttatctcacaacgaacctcatatgcctcagaacgcgaccttccctgactcttttcaccagccaaacaataccccattccccttaagccccaactctccttacccgccgagtccggcttcctctacatatcccaactctcctgcatccagcgggcccggctccccatttcagctgcctgctgacacacctccacccgcctacatgccgcccgacgatcagatgggccaggataacagccagcccatggacacatctaataatatgatcccccagattatgccttccatatcctcaagggatgttcaaccagtcgcttatgaggagccaaaacactggtgtagtatcgtatattacgaactgaacaaccgtgttggggaggcattccatgcatccagcacatccgtgctagtggatgggttcactgacccctcgaataacaagtcccggttctgcttaggtctgcttagcaatgtcaacagaaatagcactatcgagaatacgcggcgtcacatcggcaaaggagttcatctttactacgtaggcggcgaagtttatgccgagtgtctgtccgattccagcatatttgtgcagtcgcggaattgcaattttcatcatgggttccaccccacaacagtgtgtaagattcctagctcttgttctttgaagatctttaacaatcaggagtttgcgcaactcctagcccagtcagtgaatcatggcttcgaggccgtgtacgaattaacaaaaatgtgcacgattagaatgagcttcgttaagggctggggtgctgagtaccaccgccaagacgttacttcgaccccatgctggattgagatcttgcacgggcctttacagtggcttgataaggtgctaacccagatgggcagcccacttaacccgatctcctcagtgagctag

SEQ ID NO: 18382 - DNA, 1395 bp, Artificial Sequence
  derived and/or modified sequence
atgaccagcatggccagcctgttcagcttcaccagccccgccgtgaaacggctcctgggttggaagcagggggacgaggaagagaaatgggcagagaaggctgtggatgcgctcgtaaagaagctcaagaagaagaaaggggcaatggaggagcttgagaaagctcttagtagcccaggtcagccttctaagtgcgtgactattccacgcagcctagacgggaggctgcaggtgtcgcatcgaaaagggttaccccacgtgatctattgccgggtttggcggtggcctgacttgcagtctcaccacgaactgaaaccactagacatctgcgaattcccctttggcagcaaacaaaaagaggtttgcatcaatccctatcattataaaagggtggaaagtcctgtcctgcccccggtgctcgttcctcgccataacgaattcaatcctcagcactctctgctggtgcagttccgcaacctctcacataatgagccccatatgcctcaaaacgcgacgttccccgactcattccaccagccaaataataccccattccctctgtcacctaatagcccttaccctcccagcccagcctcctccacctaccccaattcccctgcttcatcgggtcccggatctccctttcaactgccggctgacaccccccctccagcgtacatgcccccagacgaccagatggggcaagataatagtcaacccatggacacctccaataatatgataccgcaaataatgccctccatttcaagccgagatgttcaaccagttgcttatgaagagccgaaacactggtgttctatcgtctattacgaactcaacaacagagtcggtgaggctttccacgcttcctctacaagcgttctggttgatggatttacagatccaagcaataataagtccagattctgtttgggcctgctcagcaacgtgaaccgtaactctactatagagaatacccggagacatatcggaaagggcgtccatctgtattatgttggaggtgaggtgtatgcggaatgcctctctgattccagcattttcgtccagagccgtaactgcaatttccatcacgggttccatccaacgactgtctgtaagataccaagctcctgttccctcaagatctttaacaaccaggagtttgcccagctgcttgcacagtccgtaaaccacggatttgaggctgtgtatgagcttacaaagatgtgtaccatacgaatgagcttcgtgaagggctggggggctgaatatcaccgacaagatgtgacaagcacgccatgctggattgaaatattgcacggacccctacagtggctggataaggtgctcacacagatgggcagccccctgaatccgattagctccgtgtcctag

SEQ ID NO: 18383 - DNA, 243 bp, Artificial Sequence
  derived and/or modified sequence
atgaccagtatggcctccttgttcagcttcacgtcccccgcagttaagcgcctgttgggctggaaacagggcgacgaggaggagaagtgggccgagaaagccgtggatgctctggtgaaaaagcttaaaaaaaaaaaaggggctatggaggagctggagaaagctctctcaagccccggacagccctccaagtgcgttacaattccgcgaagcctcgatggtcggctgcaagtgagccactag

SEQ ID NO: 18384 - DNA, 387 bp, Artificial Sequence
  derived and/or modified sequence
atgacaagcatggcgagtctcttcagctttacttcgcccgctgttaaacgcctgctcgggtggaaacaaggggatgaagaggaaaaatgggcggagaaagctgtcgacgcactggtcaagaagctcaagaagaagaagggcgctatggaggagctcgagaaggcgctgtcgtctcccggtcagcccagcaaatgcgtgactattccgaggtctctggatgggaggctgcaggtctctcaccgaaagggcctcccccatgttatttattgccgagtctggagatggccggatctccaaagccaccatgagctcaaaccgttagatatctgtgagttcccattcggaagcaagcagaaagaggtgtgcatcaatccatatcattattag

SEQ ID NO: 18385 - DNA, 405 bp, Artificial Sequence
  derived and/or modified sequence
atgacgtcaatggcttccttattttcttttacgtccccggctgtcaagcggctgcttggctggaaacagggcgatgaggaggagaagtgggctgaaaaggccgtcgacgcccttgtgaagaaactcaaaaaaaaaaaaggagctatggaagagctggaaaaggctttgagtagtcccggacaaccatccaagtgtgtgaccatccccaggtcactggatggtcgtttgcaggttagccaccggaaagggctcccccacgttatatattgcagggtgtggcgctggccagacctgcagtctcatcatgaactcaagccattagatatctgcgagtttcctttcggatccaaacagaaagaggtgtgtatcaatccctatcactataagcgggtggaatccccctag

SEQ ID NO: 18386 - DNA, 1395 bp, Artificial Sequence
  derived and/or modified sequence
atgacatctatggccagtcttttctccttcaccagcccagccgttaagcgtctcctgggatggaaacagggggacgaggaggagaaatgggcagaaaaggccgtcgacgccctggtgaagaagctgaaaaaaaaaaaaggggcaatggaagaactagaaaaagcactctcttccccagggcagccgagcaagtgtgtcacaattccccgtagcctagatggccgtctccaagtgtcccatcgcaaggggctgccccacgttatatactgccgagtgtggcgctggccagacctccagtctcaccatgagctgaagccgctggacatttgcgagtttccctttggctcaaagcagaaggaagtctgtatcaacccctaccactataagcgagttgagagtcccgtgcttcctcccgttttagtacctaggcataacgaattcaatccgcaacacagtttgctcgtgcaatttagaaatctcagccacaatgaaccacatatgccacagaacgctacctttcctgactcttttcaccaacctaataacacaccatttcccctcagcccaaacagcccatatcccccaagcccagccagcagcacctaccctaacagcccagccagcagcggccctggctccccgttccagttacctgcagacacacctccccctgcttatatgcccccagacgaccagatgggccaggataattcccaacccatggacacctcaaataatatgattccacagatcatgccctcgatcagttctcgagatgtgcagccagtagcttacgaggaacctaaacattggtgctccattgtgtattacgagcttaataacagagttggggaggcgtttcacgcctcgtctacatccgtgttggtagacgggttcaccgaccccagcaataataagagccgcttttgtctggggttgctgagtaacgtcaaccgcaatagtactatcgaaaatacacggcgtcacatcggaaagggcgtgcacctgtactatgttggaggagaagtgtatgctgaatgtttatcggatagtagcatttttgtccagagcagaaactgcaattttcaccacggatttcacccaacaacagtgtgtaagattccatctagttgctcgctcaaaatcttcaacaatcaggagtttgcccagctactggcccagtccgtcaatcacggttttgaggcggtctacgaacttactaagatgtgcacaatacgcatgagctttgtcaaaggctggggggctgagtatcatcgacaggacgtgacgtcaacgccctgctggattgaaattctccacggaccattgcagtggctggacaaggttctgacacaaatgggcagccccctgaatcctatcagcagcgtctcctag

SEQ ID NO: 18387 - DNA, 1395 bp, Artificial Sequence
  derived and/or modified sequence
atgacgtccatggccagtctcttctcgttcacttcgcccgcagttaagcggctgcttggctggaagcagggagacgaggaagagaaatgggccgagaaagccgtcgatgcactggtgaagaaactgaagaagaagaagggcgcaatggaggaactggaaaaggcgctgagctctccaggccaaccgagtaagtgtgtcaccatcccacgaagtttggacggaaggcttcaggtctcccataggaagggcctgccacatgtgatatattgccgggtgtggaggtggccagatctgcagtcacatcacgagctcaaaccacttgatatttgcgagtttccattcgggagcaagcagaaggaggtttgcataaacccttatcattacaaacgtgtcgaatctcccgttctgccccctgttcttgtgccccgtcataatgagtttaaccctcaacattccctgctcgtgcagttcagaaatttgtcacacaatgagccacacatgccccaaaacgctacattccctgattcttttcatcagcccaacaataccccttttccactgtctcccaattctccataccctcctagccccgcaagcagtacttaccccaattccccagcatcttcaggtcctggatccccttttcaactccccgcagacacacctccgccagcgtacatgccaccggacgatcagatgggtcaagacaatagtcagccaatggacacaagtaacaacatgattccacagataatgccctccatctcttccagagacgtgcagcccgttgcctacgaagaacctaagcattggtgcagcatcgtgtattacgaactgaacaaccgtgttggagaagcattccacgcttcctcaacctctgtcctggtggatgggttcactgaccccagcaacaacaaatcccgcttctgtctgggccttctgagcaatgtgaatcgcaacagtacgattgagaatacaaggaggcacattggcaagggggtgcatttgtattacgtaggtggagaggtctacgccgagtgtttatcagattcctcaatcttcgtccagagccggaactgcaacttccatcacggcttccaccccaccacagtatgtaaaataccttcttcgtgctctctcaaaattttcaacaatcaggaatttgcccagctgctggcccaatctgtgaaccatggtttcgaggccgtctacgagttgactaaaatgtgcaccattcgcatgagcttcgtcaaaggttggggcgcagagtaccatcgtcaggatgtaaccagcacaccttgctggattgagattctccatggaccattgcaatggctggacaaggtgcttactcagatgggaagccccctcaatcccatcagctccgtttcgtag

SEQ ID NO: 18388 - DNA, 548 bp, Artificial Sequence
  derived and/or modified sequence
agtagccaaaacagatttttggttgcagaactcgggcgaggatacttggggtatttggacgtttgccggcttcccaacagaatgttccggttctggtggtgatggcattggagaatggggcttaggcaagcctgtaggacttgacccaatgaaagaagcatatggcacttgtgaagataaatgttactcctccctttttaattggaacttctgcttaggacctgtgtatgacgtttcacctgtgatctgttctttcggtagccactgactttgagttacaggaaggtctccgaagatttgtgtcaaatgacgtcaatggccagcttgttttcttttactagtccagcagtaaagcgattgttgggctggaaacaaggtgatgaggaggagaaatgggcagaaaaggcagttgatgctttggtgaagaaactaaaaaagaaaaagggtgccatggaggaactggagaaagccttgagcagtccaggacagccgagtaaatgtgtcactattcccagatctttagatggacgcctgcaggtttctcacag

SEQ ID NO: 18389 - DNA, 669 bp, Artificial Sequence
  derived and/or modified sequence
ccgggtcctgggcgagcgggcgccgtgcgcgtgtcccgcggccgagctgctaataaagttgcagcgaggagaagcgcagcgacggcgtcgggagagcgcgcctagccggctcgcgagacttgacccaatgaaagaagcatatggcacttgtgaagataaatgttactcctccctttttaattggaacttctgcttaggacctgtgtatgacgtttcacctgtgatctgttctttcggtagccactgactttgagttacaggaaggtctccgaagatttgtgtcaaatgacgtcaatggccagcttgttttcttttactagtccagcagtaaagcgattgttgggctggaaacaaggtgatgaggaggagaaatgggcagaaaaggcagttgatgctttggtgaagaaactaaaaaagaaaaagggtgccatggaggaactggagaaagccttgagcagtccaggacagccgagtaaatgtgtcactattcccagatctttagatggacgcctgcaggtttctcacagaaaaggcttaccccatgttatatattgtcgtgtttggcgctggccggatttgcagagtcatcatgagctaaagccgttggatatttgtgaatttccttttggatctaagcaaaaagaagtttgtatcaacccataccactat

SEQ ID NO: 18390 - DNA, 847 bp, Artificial Sequence
  derived and/or modified sequence
ccgggtcctgggcgagcgggcgccgtgcgcgtgtcccgcggccgagctgctaataaagttgcagcgaggagaagcgcagcgacggcgtcgggagagcgcgcctagccggctcgcgaaaaggaagctgttgaagttattgaagtacctgttgctatattctaagaaattaaaatgtccagaaatctgcctctaaatgggatctcactatgttgctcagactggacgtgattgaactcctgggctcaagtgagtctcccgaataactgggattacaggacttgacccaatgaaagaagcatatggcacttgtgaagataaatgttactcctccctttttaattggaacttctgcttaggacctgtgtatgacgtttcacctgtgatctgttctttcggtagccactgactttgagttacaggaaggtctccgaagatttgtgtcaaatgacgtcaatggccagcttgttttcttttactagtccagcagtaaagcgattgttgggctggaaacaaggtgatgaggaggagaaatgggcagaaaaggcagttgatgctttggtgaagaaactaaaaaagaaaaagggtgccatggaggaactggagaaagccttgagcagtccaggacagccgagtaaatgtgtcactattcccagatctttagatggacgcctgcaggtttctcacagaaaaggcttaccccatgttatatattgtcgtgtttggcgctggccggatttgcagagtcatcatgagctaaagccgttggatatttgtgaatttccttttggatctaagcaaaaagaagtttgtatcaacccataccactataagagagtggagagtccag

SEQ ID NO: 18391 - DNA, 7009 bp, Artificial Sequence
  derived and/or modified sequence
ccgggtcctgggcgagcgggcgccgtgcgcgtgtcccgcggccgagctgctaataaagttgcagcgaggagaagcgcagcgacggcgtcgggagagcgcgcctagccggctcgcgaaaaggaagctgttgaagttattgaagtacctgttgctatattctaagaaattaaaatgtccagaaatctgcctctgacttgacccaatgaaagaagcatatggcacttgtgaagataaatgttactcctccctttttaattggaacttctgcttaggacctgtgtatgacgtttcacctgtgatctgttctttcggtagccactgactttgagttacaggaaggtctccgaagatttgtgtcaaatgacgtcaatggccagcttgttttcttttactagtccagcagtaaagcgattgttgggctggaaacaaggtgatgaggaggagaaatgggcagaaaaggcagttgatgctttggtgaagaaactaaaaaagaaaaagggtgccatggaggaactggagaaagccttgagcagtccaggacagccgagtaaatgtgtcactattcccagatctttagatggacgcctgcaggtttctcacagaaaaggcttaccccatgttatatattgtcgtgtttggcgctggccggatttgcagagtcatcatgagctaaagccgttggatatttgtgaatttccttttggatctaagcaaaaagaagtttgtatcaacccataccactataagagagtggagagtccagtcttacctccagtattagtgcctcgtcataatgaattcaatccacaacacagccttctggttcagtttaggaacctgagccacaatgaaccacacatgccacaaaatgccacgtttccagattctttccaccagcccaacaacactccttttcccttatctccaaacagcccttatcccccttctcctgctagcagcacatatcccaactccccagcaagttctggaccaggaagtccatttcagctcccagctgatacgcctcctcctgcctatatgccacctgatgatcagatgggtcaagataattcccagcctatggatacaagcaataatatgattcctcagattatgcccagtatatccagcagggatgttcagcctgttgcctatgaagagcctaaacattggtgttcaatagtctactatgaattaaacaatcgtgttggagaagcttttcatgcatcttctactagtgtgttagtagatggattcacagatccttcaaataacaaaagtagattctgcttgggtttgttgtcaaatgttaatcgtaattcgacaattgaaaacactaggcgacatattggaaaaggtgttcatctgtactatgttggtggagaggtgtatgcggaatgcctcagtgacagcagcatatttgtacagagtaggaactgcaactttcatcatggctttcatcccaccactgtctgtaagattcccagcagctgcagcctcaaaatttttaacaatcaggagtttgctcagcttctggctcaatctgtcaaccatgggtttgaggcagtatatgagctcaccaaaatgtgtaccattcggatgagttttgtcaagggttggggagcagaatatcaccggcaggatgtaaccagcaccccatgttggattgagattcttcatgggcctcttcagtggctggataaagtccttactcagatgggctcccctctgaaccccatatcttctgtttcataatgcagaagtattcttttcaattatattgttagtggacttgttttaattttagagaaactttgagtacagatactgtgagcttacattgaaaacagatattacagcttatttttttctacataattgtgaccaatacatttgtattttgtgatgaatctacatttgtttgtattcatgttcatgtgattaactcttagaagtgttgtaaaagatgcagagtaagtattatgccccagttcagaaatttggcattgatcttaaactggaacatgcttttactttattgccctaacaattttttattaaatttatttgaaaatgcatcacatgatgaaaaattatagtagcttataagagggcatatacagtgaagagtaagttttccctcctactctcgatcttccagaagctgtacttttaccagtttctttgtcccaccaacttaaaaaaaaaaagtacaattcattgttttgcaaaagtgtatggtaggggcttaaaagaaactataaagttttatttgaatgaacactatgcactgctgtaactggtagtgttcagtaaaagcaaaatgatagttttctagatgacataaaatttacatttaatacagataagtgttcttcagtgtaatgtgacttcatgctatatatcttttgtaagacatttccttttttaaaaaaatttttgcaaataactgatctcaagtatatgtcatttactcaaaatctgtcataagcattactttatagctagtgacagtgcatgcacagccttgttcaactatgtttgctgcttttggacaatgttgcaagaactctatttttgacatgcattaatcttttattttgcacttttatgggtgacagtttttagcataacctttgataaaatacactcaagtgacttggacttagatgcttatccttacgtccttggtaccttttttgtattaacaaacactgcaatttatagattacatttgtaggaagttatgcttttttctggtttttgttttactttcaacctaggttataagactgttattctatagctccaacttaaggtgcctttttaattccctacagttttatgggtgttatcagtgctggagaatcatgtagttaatcccattgctcttacaagtgtcagcttacttgtatcagcctccctacgcaaggacctatgcactggagccgtaggaggctcttcagttgggccccaaggataaggctactgatttgatactaaatgaatcagcagtggatgtagggatagctgattttaaaacactcggctgggcacagtggctcacacctgtaatcccagcactttgggaggctgaggcaggcagatcatgatgtcaggagtttgagaccagcctggccaatatggtgaaaccctgtctctacaaaaaatacaaaaattagctgggcatggtggtgcgtgcctgaagtcccagctactcgggaagctgaggcagaagaatcacttgaacctgggaggcggaggttgtggtgagccgagatcgcaccactgcactccagcctgggcgacagagcgagactctgcctcaaaaaacaaaacaaaacaaaacactcacccatcaacgaatatagactcttctctcatttatcgatgatcctctttttccattttttaagtacttatgtggaagctagtctcccaaaacacaatctttagagagaaaagacatgaacgaactccaaaatatccatttaatcaatcatgtttttggctttggataaagaactttgaaccagtttttttctcaggagctgtcaaatggacacttaattatgacatgagaatgaagaaattattttggaaaaaaaaaatgacctaatttacctatcagtgaaagctttattttctggtgccttttgaaagtatatggagtcatatcattcttctgtttaaaatgttagtttggtttgactttccactttgtcctttctgctcttgtgaagaaaaaaaaaagcattttcgaggaaagaattatgcaatttcttttgttttctgtgtcattatttattgctttttcaatgtgcagccagtggatggttttagttctttcagatgaactgccatttgtgtttcagctcacagttctttgctgggtaaaagaaatactttctgacagtcacctgagccttaaatgtaagtattacatgacatgcattctgtttcttccagagttctgtctgccacacgaaagagaatatttgcttacttgatagaactttggcattttcatcattcttttacttaaccaggcttatggcatgatctctggaacaaatttgtaggaaaaaattactccaattgaatgactgatgtatgtaatcaacttcattgggctgcagtaaactagtggaaattagagagttgttttattggtgttttctactgtgagttaattaaaaattgtttttatttggggtcattatgtcacagtcttgagttaacaagatcttacgtgattggccttttctttgttttctcttaggagttgtgtctcatgaatgacagtactaaagctattaacaactaagagtttgacagagaactataagcctgttgtatctcctaaaagttgtcaactccccacccttggactttaaatgaaaattttattcagtccagctattcttacagtccctaaggattttcatatatctatgtataggagataaaatttgctagtaagatttttaaaaactggctagtgaaaggaaagtacctctgaaagaaaccattttagcaaattatggttatatgttttaatttaatctacagaatgttttatagtaaaattctagcaccactagaataatcacatagcatgtacaatatatttatgctggctgaaaagacagaatctgggaataataaaattgcaaccagtttggtaatgcaaacagcagaatagaatgaaatctcagtaatgaattaaagcaacaaaaagatattgattggcaaaaagcaagatataagagattcatttgcttaacatttctacataatatttatggtctggtcagtattggtctggtcagtattgcctggctgacgtgaaatgtaaactagtaggcgtgttattgatctgctaaaactaaccctctttttaagaggagatttaaggaagacgtcaatcaaaatgtcaaatatgtgtgtcagaatataaataatttttcacattgtattgttgctatataaaaaaaataatagaattggttgggtttctgaggtgaaatccagagtaagagtactagacagttcaacaagccacatctaatggcacagatagaggatgtagctattttatacctttcataacatttgagagtaagatatccttcaggatgtgaagtgattattaagtactcatacctgaaatctgttgtcaagattagaactggggttcatgttaaaaaccttccatattacctgagggtacctgtggggaacagttccttcccctgtgtggtagtattttgttggaagagaatgtttatacaaaaaatgaaattcttccaacagcagagaaactctaaaaagtttgatagtacctatcaaagtgctgtacttctgtgatagagaacatctgatgtaccaatttagatctatttctttatactttttctaatcaattgcttaatagtactttggatgattatcacctttgccacttaaaatatataaatatcctttttacttcatgaggaaggaagaattttttgataattactgagttcagccttttgtgatgacttatattttggacttacattttaactttaaagaatgtcagatcccttctttgtcttactagttaaatcctcacctaatctcttgggtatgaatataaatgtgtgtcatcgttatattgttcagctagatgagcaagtatcttagggtagtaggtagcctggtggttttagaagtgtttggtgatttttatggagagagttttcctaagtggtggtttataggtggtatcagatattattagggcagctttttggggagtaatctcaggtctcccagagcagcagcatttttctcattgatataagtaagattcttaggagcttttcttatcacacaagatgcctgaatcgaatgtgagaattgaaggcatttcttctgcataaacaaagaattctacctgctggacagaaacctggaaagttctttggaattcgctgaattacagtttagtatgtcctgattacagagtgacaatatttatcaagcctttgttatattggattatcttctctcttaaaatacaactgtattataattgaaatgacagcccaaaattggatggtttaccaaaaccaatgaaagggatttcacacatcaatttttatttctgttttgaagagcacatgctatataataattgctagtagcaactgcagtaaaacaggtgataagttattttctctgaaaagatccagtcctagagcaggattcttcgatcattcatggcagagtgaaaaaggtttgtatggttcttgtccaaataactcagttcttaaaattcttaaaatgatcgtaaaccattatcctttaaaggtttatttgaagatgctgttaaagtacagaattttgtgtacaggtagatttttccgtccctcattaatagtgccttcttaattaatacagactggtgttagctataacaaaactccagtaaggccaaagaatcccaagttctttgtggaaaaaaaaaaaaaatcttttagggtcagattttcccttctaatatcattgaagatgatgttgcattgatttattcataaagtattttaactataggaactctagaagataatggttaggcaagtgattttttttttaaatatggttggcgtaagttgtattttgaaattcacttattttaaaatcgaagaggattgtaatcatggaaatagaatgtttgtatctacctgcccacattttcttaaaaagatatttcatatacagataatgaagaccaagctagtggctgcactgtaggtctgctgcttatttgtatttgttgtgcttctgtttatgttgtagaagctgaaattctagcaacatgcttcaattctgttattttgatacttatgaaaatgtattaggttttactatattgtgcttttgaaagccataactcttaagaactttgtttttgcatattgtttgctaattctttactttaataaacctcaaaacctgc

SEQ ID NO: 18392 - DNA, 6934 bp, Artificial Sequence
  derived and/or modified sequence
ccgggtcctgggcgagcgggcgccgtgcgcgtgtcccgcggccgagctgctaataaagttgcagcgaggagaagcgcagcgacggcgtcgggagagcgcgcctagccggctcgcgagacttgacccaatgaaagaagcatatggcacttgtgaagataaatgttactcctccctttttaattggaacttctgcttaggacctgtgtatgacgtttcacctgtgatctgttctttcggtagccactgactttgagttacaggaaggtctccgaagatttgtgtcaaatgacgtcaatggccagcttgttttcttttactagtccagcagtaaagcgattgttgggctggaaacaaggtgatgaggaggagaaatgggcagaaaaggcagttgatgctttggtgaagaaactaaaaaagaaaaagggtgccatggaggaactggagaaagccttgagcagtccaggacagccgagtaaatgtgtcactattcccagatctttagatggacgcctgcaggtttctcacagaaaaggcttaccccatgttatatattgtcgtgtttggcgctggccggatttgcagagtcatcatgagctaaagccgttggatatttgtgaatttccttttggatctaagcaaaaagaagtttgtatcaacccataccactataagagagtggagagtccagtcttacctccagtattagtgcctcgtcataatgaattcaatccacaacacagccttctggttcagtttaggaacctgagccacaatgaaccacacatgccacaaaatgccacgtttccagattctttccaccagcccaacaacactccttttcccttatctccaaacagcccttatcccccttctcctgctagcagcacatatcccaactccccagcaagttctggaccaggaagtccatttcagctcccagctgatacgcctcctcctgcctatatgccacctgatgatcagatgggtcaagataattcccagcctatggatacaagcaataatatgattcctcagattatgcccagtatatccagcagggatgttcagcctgttgcctatgaagagcctaaacattggtgttcaatagtctactatgaattaaacaatcgtgttggagaagcttttcatgcatcttctactagtgtgttagtagatggattcacagatccttcaaataacaaaagtagattctgcttgggtttgttgtcaaatgttaatcgtaattcgacaattgaaaacactaggcgacatattggaaaaggtgttcatctgtactatgttggtggagaggtgtatgcggaatgcctcagtgacagcagcatatttgtacagagtaggaactgcaactttcatcatggctttcatcccaccactgtctgtaagattcccagcagctgcagcctcaaaatttttaacaatcaggagtttgctcagcttctggctcaatctgtcaaccatgggtttgaggcagtatatgagctcaccaaaatgtgtaccattcggatgagttttgtcaagggttggggagcagaatatcaccggcaggatgtaaccagcaccccatgttggattgagattcttcatgggcctcttcagtggctggataaagtccttactcagatgggctcccctctgaaccccatatcttctgtttcataatgcagaagtattcttttcaattatattgttagtggacttgttttaattttagagaaactttgagtacagatactgtgagcttacattgaaaacagatattacagcttatttttttctacataattgtgaccaatacatttgtattttgtgatgaatctacatttgtttgtattcatgttcatgtgattaactcttagaagtgttgtaaaagatgcagagtaagtattatgccccagttcagaaatttggcattgatcttaaactggaacatgcttttactttattgccctaacaattttttattaaatttatttgaaaatgcatcacatgatgaaaaattatagtagcttataagagggcatatacagtgaagagtaagttttccctcctactctcgatcttccagaagctgtacttttaccagtttctttgtcccaccaacttaaaaaaaaaaagtacaattcattgttttgcaaaagtgtatggtaggggcttaaaagaaactataaagttttatttgaatgaacactatgcactgctgtaactggtagtgttcagtaaaagcaaaatgatagttttctagatgacataaaatttacatttaatacagataagtgttcttcagtgtaatgtgacttcatgctatatatcttttgtaagacatttccttttttaaaaaaatttttgcaaataactgatctcaagtatatgtcatttactcaaaatctgtcataagcattactttatagctagtgacagtgcatgcacagccttgttcaactatgtttgctgcttttggacaatgttgcaagaactctatttttgacatgcattaatcttttattttgcacttttatgggtgacagtttttagcataacctttgataaaatacactcaagtgacttggacttagatgcttatccttacgtccttggtaccttttttgtattaacaaacactgcaatttatagattacatttgtaggaagttatgcttttttctggtttttgttttactttcaacctaggttataagactgttattctatagctccaacttaaggtgcctttttaattccctacagttttatgggtgttatcagtgctggagaatcatgtagttaatcccattgctcttacaagtgtcagcttacttgtatcagcctccctacgcaaggacctatgcactggagccgtaggaggctcttcagttgggccccaaggataaggctactgatttgatactaaatgaatcagcagtggatgtagggatagctgattttaaaacactcggctgggcacagtggctcacacctgtaatcccagcactttgggaggctgaggcaggcagatcatgatgtcaggagtttgagaccagcctggccaatatggtgaaaccctgtctctacaaaaaatacaaaaattagctgggcatggtggtgcgtgcctgaagtcccagctactcgggaagctgaggcagaagaatcacttgaacctgggaggcggaggttgtggtgagccgagatcgcaccactgcactccagcctgggcgacagagcgagactctgcctcaaaaaacaaaacaaaacaaaacactcacccatcaacgaatatagactcttctctcatttatcgatgatcctctttttccattttttaagtacttatgtggaagctagtctcccaaaacacaatctttagagagaaaagacatgaacgaactccaaaatatccatttaatcaatcatgtttttggctttggataaagaactttgaaccagtttttttctcaggagctgtcaaatggacacttaattatgacatgagaatgaagaaattattttggaaaaaaaaaatgacctaatttacctatcagtgaaagctttattttctggtgccttttgaaagtatatggagtcatatcattcttctgtttaaaatgttagtttggtttgactttccactttgtcctttctgctcttgtgaagaaaaaaaaaagcattttcgaggaaagaattatgcaatttcttttgttttctgtgtcattatttattgctttttcaatgtgcagccagtggatggttttagttctttcagatgaactgccatttgtgtttcagctcacagttctttgctgggtaaaagaaatactttctgacagtcacctgagccttaaatgtaagtattacatgacatgcattctgtttcttccagagttctgtctgccacacgaaagagaatatttgcttacttgatagaactttggcattttcatcattcttttacttaaccaggcttatggcatgatctctggaacaaatttgtaggaaaaaattactccaattgaatgactgatgtatgtaatcaacttcattgggctgcagtaaactagtggaaattagagagttgttttattggtgttttctactgtgagttaattaaaaattgtttttatttggggtcattatgtcacagtcttgagttaacaagatcttacgtgattggccttttctttgttttctcttaggagttgtgtctcatgaatgacagtactaaagctattaacaactaagagtttgacagagaactataagcctgttgtatctcctaaaagttgtcaactccccacccttggactttaaatgaaaattttattcagtccagctattcttacagtccctaaggattttcatatatctatgtataggagataaaatttgctagtaagatttttaaaaactggctagtgaaaggaaagtacctctgaaagaaaccattttagcaaattatggttatatgttttaatttaatctacagaatgttttatagtaaaattctagcaccactagaataatcacatagcatgtacaatatatttatgctggctgaaaagacagaatctgggaataataaaattgcaaccagtttggtaatgcaaacagcagaatagaatgaaatctcagtaatgaattaaagcaacaaaaagatattgattggcaaaaagcaagatataagagattcatttgcttaacatttctacataatatttatggtctggtcagtattggtctggtcagtattgcctggctgacgtgaaatgtaaactagtaggcgtgttattgatctgctaaaactaaccctctttttaagaggagatttaaggaagacgtcaatcaaaatgtcaaatatgtgtgtcagaatataaataatttttcacattgtattgttgctatataaaaaaaataatagaattggttgggtttctgaggtgaaatccagagtaagagtactagacagttcaacaagccacatctaatggcacagatagaggatgtagctattttatacctttcataacatttgagagtaagatatccttcaggatgtgaagtgattattaagtactcatacctgaaatctgttgtcaagattagaactggggttcatgttaaaaaccttccatattacctgagggtacctgtggggaacagttccttcccctgtgtggtagtattttgttggaagagaatgtttatacaaaaaatgaaattcttccaacagcagagaaactctaaaaagtttgatagtacctatcaaagtgctgtacttctgtgatagagaacatctgatgtaccaatttagatctatttctttatactttttctaatcaattgcttaatagtactttggatgattatcacctttgccacttaaaatatataaatatcctttttacttcatgaggaaggaagaattttttgataattactgagttcagccttttgtgatgacttatattttggacttacattttaactttaaagaatgtcagatcccttctttgtcttactagttaaatcctcacctaatctcttgggtatgaatataaatgtgtgtcatcgttatattgttcagctagatgagcaagtatcttagggtagtaggtagcctggtggttttagaagtgtttggtgatttttatggagagagttttcctaagtggtggtttataggtggtatcagatattattagggcagctttttggggagtaatctcaggtctcccagagcagcagcatttttctcattgatataagtaagattcttaggagcttttcttatcacacaagatgcctgaatcgaatgtgagaattgaaggcatttcttctgcataaacaaagaattctacctgctggacagaaacctggaaagttctttggaattcgctgaattacagtttagtatgtcctgattacagagtgacaatatttatcaagcctttgttatattggattatcttctctcttaaaatacaactgtattataattgaaatgacagcccaaaattggatggtttaccaaaaccaatgaaagggatttcacacatcaatttttatttctgttttgaagagcacatgctatataataattgctagtagcaactgcagtaaaacaggtgataagttattttctctgaaaagatccagtcctagagcaggattcttcgatcattcatggcagagtgaaaaaggtttgtatggttcttgtccaaataactcagttcttaaaattcttaaaatgatcgtaaaccattatcctttaaaggtttatttgaagatgctgttaaagtacagaattttgtgtacaggtagatttttccgtccctcattaatagtgccttcttaattaatacagactggtgttagctataacaaaactccagtaaggccaaagaatcccaagttctttgtggaaaaaaaaaaaaaatcttttagggtcagattttcccttctaatatcattgaagatgatgttgcattgatttattcataaagtattttaactataggaactctagaagataatggttaggcaagtgattttttttttaaatatggttggcgtaagttgtattttgaaattcacttattttaaaatcgaagaggattgtaatcatggaaatagaatgtttgtatctacctgcccacattttcttaaaaagatatttcatatacagataatgaagaccaagctagtggctgcactgtaggtctgctgcttatttgtatttgttgtgcttctgtttatgttgtagaagctgaaattctagcaacatgcttcaattctgttattttgatacttatgaaaatgtattaggttttactatattgtgcttttgaaagccataactcttaagaactttgtttttgcatattgtttgctaattctttactttaataaacctcaaaacctgc

SEQ ID NO: 18393 - DNA, 243 bp, Artificial Sequence
  derived and/or modified sequence
atgaccagcatggccagcctgttcagcttcaccagccccgccgtgaagagactgctgggctggaagcagggcgacgaggaggagaagtgggccgagaaggccgtggacgccctggtgaagaagctgaagaagaagaagggcgccatggaggagctggagaaggccctgagcagccccggccagcccagcaagtgcgtgaccatccccagaagcctggacggcagactgcaggtgagccactag

SEQ ID NO: 18394 - DNA, 387 bp, Artificial Sequence
  derived and/or modified sequence
atgaccagcatggccagcctgttcagcttcaccagccccgccgtgaagagactgctgggctggaagcagggcgacgaggaggagaagtgggccgagaaggccgtggacgccctggtgaagaagctgaagaagaagaagggcgccatggaggagctggagaaggccctgagcagccccggccagcccagcaagtgcgtgaccatccccagaagcctggacggcagactgcaggtgagccacagaaagggcctgccccacgtgatctactgcagagtgtggagatggcccgacctgcagagccaccacgagctgaagcccctggacatctgcgagttccccttcggcagcaagcagaaggaggtgtgcatcaacccctaccactactag

SEQ ID NO: 18395 - DNA, 405 bp, Artificial Sequence
  derived and/or modified sequence
atgaccagcatggccagcctgttcagcttcaccagccccgccgtgaagagactgctgggctggaagcagggcgacgaggaggagaagtgggccgagaaggccgtggacgccctggtgaagaagctgaagaagaagaagggcgccatggaggagctggagaaggccctgagcagccccggccagcccagcaagtgcgtgaccatccccagaagcctggacggcagactgcaggtgagccacagaaagggcctgccccacgtgatctactgcagagtgtggagatggcccgacctgcagagccaccacgagctgaagcccctggacatctgcgagttccccttcggcagcaagcagaaggaggtgtgcatcaacccctaccactacaagagagtggagagcccctag

SEQ ID NO: 18396 - DNA, 1395 bp, Artificial Sequence
  derived and/or modified sequence
atgaccagcatggccagcctgttcagcttcaccagccccgccgtgaagagactgctgggctggaagcagggcgacgaggaggagaagtgggccgagaaggccgtggacgccctggtgaagaagctgaagaagaagaagggcgccatggaggagctggagaaggccctgagcagccccggccagcccagcaagtgcgtgaccatccccagaagcctggacggcagactgcaggtgagccacagaaagggcctgccccacgtgatctactgcagagtgtggagatggcccgacctgcagagccaccacgagctgaagcccctggacatctgcgagttccccttcggcagcaagcagaaggaggtgtgcatcaacccctaccactacaagagagtggagagccccgtgctgccccccgtgctggtgcccagacacaacgagttcaacccccagcacagcctgctggtgcagttcagaaacctgagccacaacgagccccacatgccccagaacgccaccttccccgacagcttccaccagcccaacaacacccccttccccctgagccccaacagcccctacccccccagccccgccagcagcacctaccccaacagccccgccagcagcggccccggcagccccttccagctgcccgccgacacccccccccccgcctacatgccccccgacgaccagatgggccaggacaacagccagcccatggacaccagcaacaacatgatcccccagatcatgcccagcatcagcagcagagacgtgcagcccgtggcctacgaggagcccaagcactggtgcagcatcgtgtactacgagctgaacaacagagtgggcgaggccttccacgccagcagcaccagcgtgctggtggacggcttcaccgaccccagcaacaacaagagcagattctgcctgggcctgctgagcaacgtgaacagaaacagcaccatcgagaacaccagaagacacatcggcaagggcgtgcacctgtactacgtgggcggcgaggtgtacgccgagtgcctgagcgacagcagcatcttcgtgcagagcagaaactgcaacttccaccacggcttccaccccaccaccgtgtgcaagatccccagcagctgcagcctgaagatcttcaacaaccaggagttcgcccagctgctggcccagagcgtgaaccacggcttcgaggccgtgtacgagctgaccaagatgtgcaccatcagaatgagcttcgtgaagggctggggcgccgagtaccacagacaggacgtgaccagcaccccctgctggatcgagatcctgcacggccccctgcagtggctggacaaggtgctgacccagatgggcagccccctgaaccccatcagcagcgtgagctag

SEQ ID NO: 18397 - protein, 293 aa, Artificial Sequence
  derived and/or modified sequence
MSDIEEVVEEYEEEHPEEEEDWREDEDEQEEAAEEDAEAEAETEETRAEEDEEEEEAKEAEDGPMEESKPKPRSFMPNLVPPKIPDGERVDFDDIHRKRMEKDLNELQALIEAHFENRKKEEEELVSLKDRIERRRAERAEQQRIRNEREKERQNRLAEERARREEEENRRKAEDEARKKKALSNMMHFGGYIQKQAQTERKSGKRQTEREKKKKILAERRKVLAIDHLNEDQLREKAKELWQSIYNLEAEKFDLQEKFKQQKYEINVLRNRINDNQKVSKTRGKAKVTGRWK

SEQ ID NO: 18398 - protein, 199 aa, Artificial Sequence
  derived and/or modified sequence
MSDIEEVVEEYEEEMAAPQHQEEAAEEDAEAEAETEETRAEDEEEEEAKEAEDGPMEESKPKPRSFMPNLVPPKIPDGERVDFDDIHRKRMEKDLNELQALIEAHFENRKKEEEELVSLKDRIERRRAERAEQQRIRNEREKERQNRLAEERARREEEENRRKAEDEARKKKALSNMMHFGGYIQKHPPDRAEKWEEAD

SEQ ID NO: 18399 - protein, 288 aa, Artificial Sequence
  derived and/or modified sequence
MSDIEEVVEEYEEEEQEEAAVEEQEEAAEEDAEAEAETEETRAEEDEEEEEAKEAEDGPMEESKPKPRSFMPNLVPPKIPDGERVDFDDIHRKRMEKDLNELQALIEAHFENRKKEEEELVSLKDRIERRRAERAEQQRIRNEREKERQNRLAEERARREEEENRRKAEDEARKKKALSNMMHFGGYIQKQAQTERKSGKRQTEREKKKKILAERRKVLAIDHLNEDQLREKAKELWQSIYNLEAEKFDLQEKFKQQKYEINVLRNRINDNQKVSKTRGKAKVTGRWK

SEQ ID NO: 18400 - protein, 291 aa, Artificial Sequence [sequence omitted]

SEQ ID NO: 18401 - protein, 285 aa, Artificial Sequence
  derived and/or modified sequence
MSDIEEVVEEYEEEEQEEAAVEEQEEAAEEDAEAEAETEETRAEEDEEEEEAKEAEDGPMEESKPKPRSFMPNLVPPKIPDGERVDFDDIHRKRMEKDLNELQALIEAHFENRKKEEEELVSLKDRIERRRAERAEQQRIRNEREKERQNRLAEERARREEEENRRKAEDEARKKKALSNMMHFGGYIQKTERKSGKRQTEREKKKKILAERRKVLAIDHLNEDQLREKAKELWQSIYNLEAEKFDLQEKFKQQKYEINVLRNRINDNQKVSKTRGKAKVTGRWK

SEQ ID NO: 18402 - protein, 226 aa, Artificial Sequence
  derived and/or modified sequence
MEESKPKPRSFMPNLVPPKIPDGERVDFDDIHRKRMEKDLNELQALIEAHFENRKKEEEELVSLKDRIERRRAERAEQQRIRNEREKERQNRLAEERARREEEENRRKAEDEARKKKALSNMMHFGGYIQKTERKSGKRQTEREKKKKILAERRKVLAIDHLNEDQLREKAKELWQSIYNLEAEKFDLQEKFKQQKYEINVLRNRINDNQKVSKTRGKAKVTGRWK

SEQ ID NO: 18403 - protein, 297 aa, Artificial Sequence
  derived and/or modified sequence
MSDIEEVVEEYEEEYLEHAEAAVEEEEDWREDEDEQEEAAEEDAEAEAETEETRAEEDEEEEEAKEAEDGPMEESKPKPRSFMPNLVPPKIPDGERVDFDDIHRKRMEKDLNELQALIEAHFENRKKEEEELVSLKDRIERRRAERAEQQRIRNEREKERQNRLAEERARREEEENRRKAEDEARKKKALSNMMHFGGYIQKTERKSGKRQTEREKKKKILAERRKVLAIDHLNEDQLREKAKELWQSIYNLEAEKFDLQEKFKQQKYEINVLRNRINDNQKVSKTRGKAKVTGRWK

SEQ ID NO: 18404 - DNA, 858 bp, Artificial Sequence
  derived and/or modified sequence
atgagcgacatcgaggaggtggtggaggagtacgaggaggaggagcaggaggaggccgccgtggaggagcaggaggaggccgccgaggaggacgccgaggccgaggccgagaccgaggagaccagagccgaggaggacgaggaggaggaggaggccaaggaggccgaggacggccccatggaggagagcaagcccaagcccagaagcttcatgcccaacctggtgccccccaagatccccgacggcgagagagtggacttcgacgacatccacagaaagagaatggagaaggacctgaacgagctgcaggccctgatcgaggcccacttcgagaacagaaagaaggaggaggaggagctggtgagcctgaaggacagaatcgagagaagaagagccgagagagccgagcagcagagaatcagaaacgagagagagaaggagagacagaacagactggccgaggagagagccagaagagaggaggaggagaacagaagaaaggccgaggacgaggccagaaagaagaaggccctgagcaacatgatgcacttcggcggctacatccagaagaccgagagaaagagcggcaagagacagaccgagagagagaagaagaagaagatcctggccgagagaagaaaggtgctggccatcgaccacctgaacgaggaccagctgagagagaaggccaaggagctgtggcagagcatctacaacctggaggccgagaagttcgacctgcaggagaagttcaagcagcagaagtacgagatcaacgtgctgagaaacagaatcaacgacaaccagaaggtgagcaagaccagaggcaaggccaaggtgaccggcagatggaagtag

SEQ ID NO: 18405 - DNA, 681 bp, Artificial Sequence
  derived and/or modified sequence
atggaggagagcaagcccaagcccagaagcttcatgcccaacctggtgccccccaagatccccgacggcgagagagtggacttcgacgacatccacagaaagagaatggagaaggacctgaacgagctgcaggccctgatcgaggcccacttcgagaacagaaagaaggaggaggaggagctggtgagcctgaaggacagaatcgagagaagaagagccgagagagccgagcagcagagaatcagaaacgagagagagaaggagagacagaacagactggccgaggagagagccagaagagaggaggaggagaacagaagaaaggccgaggacgaggccagaaagaagaaggccctgagcaacatgatgcacttcggcggctacatccagaagaccgagagaaagagcggcaagagacagaccgagagagagaagaagaagaagatcctggccgagagaagaaaggtgctggccatcgaccacctgaacgaggaccagctgagagagaaggccaaggagctgtggcagagcatctacaacctggaggccgagaagttcgacctgcaggagaagttcaagcagcagaagtacgagatcaacgtgctgagaaacagaatcaacgacaaccagaaggtgagcaagaccagaggcaaggccaaggtgaccggcagatggaagtag

SEQ ID NO: 18406 - DNA, 894 bp, Artificial Sequence
  derived and/or modified sequence
atgagcgacatcgaggaggtggtggaggagtacgaggaggagtacctggagcacgccgaggccgccgtggaggaggaggaggactggagagaggacgaggacgagcaggaggaggccgccgaggaggacgccgaggccgaggccgagaccgaggagaccagagccgaggaggacgaggaggaggaggaggccaaggaggccgaggacggccccatggaggagagcaagcccaagcccagaagcttcatgcccaacctggtgccccccaagatccccgacggcgagagagtggacttcgacgacatccacagaaagagaatggagaaggacctgaacgagctgcaggccctgatcgaggcccacttcgagaacagaaagaaggaggaggaggagctggtgagcctgaaggacagaatcgagagaagaagagccgagagagccgagcagcagagaatcagaaacgagagagagaaggagagacagaacagactggccgaggagagagccagaagagaggaggaggagaacagaagaaaggccgaggacgaggccagaaagaagaaggccctgagcaacatgatgcacttcggcggctacatccagaagaccgagagaaagagcggcaagagacagaccgagagagagaagaagaagaagatcctggccgagagaagaaaggtgctggccatcgaccacctgaacgaggaccagctgagagagaaggccaaggagctgtggcagagcatctacaacctggaggccgagaagttcgacctgcaggagaagttcaagcagcagaagtacgagatcaacgtgctgagaaacagaatcaacgacaaccagaaggtgagcaagaccagaggcaaggccaaggtgaccggcagatggaagtag

SEQ ID NO: 18407 - DNA, 858 bp, Artificial Sequence
  derived and/or modified sequence
atgtcagacattgaggaagtggtcgaggagtatgaagaggaagaacaggaggaggcagccgtggaggagcaggaggaagcagcagaagaagatgccgaggccgaggcggagactgaggagaccagggccgaggaagatgaggaggaggaggaggcaaaggaggcagaggacggccctatggaggaaagcaaacctaagcctcgtagctttatgccaaatctggtgcctcccaaaattcctgacggggaaagggtggactttgacgacattcaccgcaaaagaatggagaaggatctgaatgagctgcaagcgctcattgaagcacactttgaaaaccggaagaaggaggaggaggagctagtgtcactgaaggatcgaatcgaaagacggcgtgctgaacgagccgaacagcagcggattaggaacgagcgagaaaaggagaggcagaatagactggccgaggaaagggcgcgccgagaggaggaagagaatcgcaggaaggccgaggacgaagcccgaaagaagaaagccctttccaacatgatgcatttcggagggtacatacaaaagaccgagcgaaaaagtggaaaacggcagacggagagggagaagaagaaaaaaatcctggcagaaaggagaaaagtgttggctatcgaccacttgaatgaggaccagttgagagagaaggccaaggagctttggcaatctatatacaatcttgaggctgagaaatttgacttacaggagaagtttaaacagcaaaagtacgagatcaacgtgctgcgaaatcggataaacgacaaccagaaggtttcaaagacaagggggaaagcaaaagtgactgggcggtggaagtag

SEQ ID NO: 18408 - DNA, 681 bp, Artificial Sequence
  derived and/or modified sequence
atggaggagagtaaaccaaagccgcggagcttcatgcccaacctggtgccccctaaaatacccgacggcgagcgggtggacttcgacgatatccatagaaaaaggatggagaaagatctgaatgagctccaggccctcattgaggcccatttcgaaaacaggaagaaagaggaggaggagctggtctccctgaaagaccggatcgagcgtcgccgcgctgagagagccgagcagcaacgcatccgaaacgaaagggaaaaggaaagacaaaataggttagctgaagaacgcgctcgccgcgaagaggaggaaaataggagaaaggccgaggacgaagcgaggaaaaaaaaagccctgtccaacatgatgcattttgggggatacattcagaaaaccgagcggaagagcggcaagcgccagaccgagcgggaaaaaaagaaaaaaattttggccgaacgtcgcaaggtgctggctatcgatcacctgaatgaagaccagcttcgggaaaaggcgaaagagctctggcagtctatctataaccttgaagcagagaaattcgacctccaggaaaagtttaaacagcagaagtacgagattaatgtgctgcggaaccggattaacgataaccagaaggtctccaagacccggggtaaggcaaaagtgacaggacgctggaagtag

SEQ ID NO: 18409 - DNA, 858 bp, Artificial Sequence
  derived and/or modified sequence
atgagcgacatcgaggaggtggtggaagagtatgaagaggaggagcaggaagaggccgcagttgaagaacaagaagaagctgcagaggaagatgccgaggcagaagccgagaccgaagaaacgcgtgccgaagaggacgaggaagaagaggaggctaaggaggccgaggatggcccaatggaggagtctaagcctaaacctcggagcttcatgccaaatttagttcccccaaagatccccgacggcgaacgtgtcgactttgatgatatccacaggaagcgtatggagaaggacctgaacgagctacaggcgctcatagaagcccattttgagaaccggaagaaggaagaggaggagctcgtttcacttaaggaccggatcgagcggcggcgcgcagagagagctgagcaacaacggatcagaaatgaacgtgaaaaggagcggcaaaatagactcgccgaggagcgcgccagaagagaagaagaagaaaataggcgcaaagctgaggatgaggccagaaagaaaaaggctctgtccaacatgatgcacttcggcggttacattcagaagaccgaaagaaaatcaggcaagagacagactgagagagaaaagaagaaaaagatactggccgagcgtcggaaggtactcgccatagatcatttgaacgaagaccagttaagggagaaggctaaagagctctggcagagtatttataatttagaggctgagaagttcgacctgcaggaaaagttcaagcagcaaaagtacgaaatcaacgtgctccggaatagaatcaatgacaatcagaaggtgtccaaaaccagaggcaaagccaaagtaacaggcaggtggaaatag

SEQ ID NO: 18410 - DNA, 894 bp, Artificial Sequence
  derived and/or modified sequence
atgagtgatatagaagaagtggtagaggaatatgaagaagagtacttggaacatgctgaggctgccgtggaagaggaggaggactggagagaagacgaggacgaacaggaggaagctgcggaagaggacgccgaagccgaagccgagactgaagagacccgagccgaggaggatgaggaggaagaggaagcgaaggaagctgaagacggaccaatggaagagagtaagccaaagccccgttcttttatgcccaatcttgtccctccaaaaatcccggacggagagcgcgttgactttgatgatatccatcgtaaacgaatggaaaaagatctgaacgaactccaggccctgatcgaggctcatttcgagaataggaagaaagaggaggaggaacttgtgagcctgaaggataggattgaacggcggagggccgagcgcgccgagcagcaaagaatccgcaatgaaagagaaaaggagcgacaaaacagactggctgaagaacgagcgaggagggaagaggaagagaaccgacgcaaggcggaggacgaagcacggaaaaagaaagctctgtctaatatgatgcactttgggggttatatccagaagactgagcgaaaatcgggaaagagacagactgagcgcgagaagaagaaaaagattctggctgagagaagaaaggtactcgccattgaccatttgaatgaagaccagctccgtgaaaaagctaaggaactatggcaatctatttataatttagaggccgagaagtttgatcttcaggaaaaattcaaacagcagaagtatgaaatcaatgtgcttcggaatagaattaatgataaccagaaagtcagcaaaaccagaggcaaggcgaaagtgaccgggaggtggaagtag

SEQ ID NO: 18411 - DNA, 858 bp, Artificial Sequence
  derived and/or modified sequence
atgtctgacatcgaggaggtggtggaggagtatgaggaggaggagcaggaggaggccgctgtggaggagcaggaggaggccgctgaggaggatgctgaggccgaggccgagacagaggagaccagggcagaagaagatgaggaggaggaggaggccaaggaggccgaggatggccccatggaggagagcaagcccaagcccaggagcttcatgcccaacctggtgccccccaagatcccagatggagagcgggtggactttgatgacatccacaggaagaggatggagaaggacctgaatgagctgcaggccctgattgaggcccactttgaaaataggaagaaggaggaggaggagctggtgtccctgaaggacagaattgaaagaagaagagctgagagagctgagcagcagaggatcagaaatgaaagagagaaggagcggcagaaccggctggccgaggagcgggcccggcgggaggaggaggagaacagaaggaaggcagaagatgaggccaggaagaagaaggccctgagcaacatgatgcactttggaggctacatccagaagacagagaggaagagcggcaagaggcagacagagcgggagaagaagaagaagatcctggccgagaggaggaaggtgctggccatcgaccacctgaatgaagaccagctgcgggagaaggccaaggagctgtggcagagcatctacaacctggaggccgagaagtttgacctgcaggagaagttcaagcagcagaagtatgagatcaacgtgctgaggaaccgcatcaatgacaaccagaaggtgtccaagacccggggcaaggccaaggtgacaggccgctggaagtag

SEQ ID NO: 18412 - DNA, 681 bp, Artificial Sequence
  derived and/or modified sequence
atggaggagagcaagcccaagcccaggagcttcatgcccaacctggtgccccccaagatcccagatggagagcgggtggactttgatgacatccacaggaagaggatggagaaggacctgaatgagctgcaggccctgattgaggcccactttgagaacaggaagaaggaggaggaggagctggtgtccctgaaggaccgcatcgagaggagaagagctgagcgggcagagcagcagaggatcagaaatgaaagagagaaggagcggcagaaccggctggccgaggagcgggcccggcgggaggaggaggagaacagaaggaaggccgaggatgaggccaggaagaagaaggccctgagcaacatgatgcactttggaggctacatccagaagacagagaggaagagcggcaagaggcagacagagcgggagaagaagaagaagatcctggccgagaggaggaaggtgctggccatcgaccacctgaatgaagaccagctgcgggagaaggccaaggagctgtggcagagcatctacaacctggaggccgagaagtttgacctgcaggagaagttcaagcagcagaagtatgagatcaacgtgctgaggaaccgcatcaatgacaaccagaaggtgtccaagacccggggcaaggccaaggtgacaggccgctggaagtag

SEQ ID NO: 18413 - DNA, 894 bp, Artificial Sequence
  derived and/or modified sequence
atgtctgacatcgaggaggtggtggaggagtatgaggaggagtacctggagcacgccgaggccgctgtggaggaggaggaggactggagagaagatgaagatgagcaggaggaggccgctgaggaggatgctgaggccgaggccgagacagaggagaccagggcagaagaagatgaggaggaggaggaggccaaggaggccgaggatggccccatggaggagagcaagcccaagcccaggagcttcatgcccaacctggtgccccccaagatcccagatggagagcgggtggactttgatgacatccacaggaagaggatggagaaggacctgaatgagctgcaggccctgattgaggcccactttgaaaataggaagaaggaggaggaggagctggtgtccctgaaggacagaattgaaagaagaagagctgagagagctgagcagcagaggatcagaaatgaaagagagaaggagcggcagaaccggctggccgaggagcgggcccggcgggaggaggaggagaacagaaggaaggcagaagatgaggccaggaagaagaaggccctgagcaacatgatgcactttggaggctacatccagaagacagagaggaagagcggcaagaggcagacagagcgggagaagaagaagaagatcctggccgagaggaggaaggtgctggccatcgaccacctgaatgaagaccagctgcgggagaaggccaaggagctgtggcagagcatctacaacctggaggccgagaagtttgacctgcaggagaagttcaagcagcagaagtatgagatcaacgtgctgaggaaccgcatcaatgacaaccagaaggtgtccaagacccggggcaaggccaaggtgacaggccgctggaagtag

SEQ ID NO: 18414 - DNA, 858 bp, Artificial Sequence
  derived and/or modified sequence
atgagcgacatcgaggaggtggtggaggagtacgaggaggaggagcaggaggaagcagccgtcgaagagcaggaagaggctgctgaagaagatgccgaagctgaagccgaaaccgaggagacacgagcagaggaggatgaggaagaggaggaagccaaggaggcagaagatggcccaatggaggaaagtaaacccaagccccgtagcttcatgccaaatctggtgcccccaaagatcccagatggggagcgcgtcgacttcgacgacatacaccgaaagcgcatggaaaaggacctcaacgaactgcaagcactaattgaagcgcattttgagaaccgcaaaaaggaggaagaagagctggtcagtcttaaggacagaatcgaacggagacgagccgagcgcgccgagcagcaacgtatcaggaatgagcgcgaaaaagagagacaaaaccggcttgccgaagaacgcgctagaagagaggaggaggaaaatcgccgcaaagccgaagatgaagcacgcaagaagaaggcactcagcaacatgatgcattttggcggctacattcagaaaaccgagcggaagtccggcaaaagacagaccgagagggagaagaaaaaaaagatcttggccgagcgtaggaaggtgctggcaatcgatcacctgaatgaggatcagctccgagaaaaggccaaagaactatggcagagtatttacaatctcgaggcagagaagtttgacctgcaggaaaagttcaagcagcagaaatacgagatcaatgtgctgagaaatcggatcaacgataaccagaaagttagcaaaaccagggggaaagccaaggtgacggggcggtggaagtag

SEQ ID NO: 18415 - DNA, 681 bp, Artificial Sequence
  derived and/or modified sequence
atggaggagagcaagcccaagccccggagcttcatgcccaacctggtccctccaaagatcccggatggcgaacgggttgattttgatgacatccaccggaagaggatggaaaaagacctgaatgagctgcaggctctgattgaagcccactttgaaaataggaagaaggaagaagaggagctggttagcctaaaagatcgaatcgaaaggagacgagcagagcgcgctgagcaacaacgcattaggaatgaacgcgagaaagagcgccagaaccgcctggccgaagaacgggcgagacgtgaagaggaggagaatcggaggaaagccgaggatgaggccagaaagaaaaaggcactctccaacatgatgcactttggtggctacattcagaaaacagagcggaagagtggaaagcggcaaacagagcgggagaagaagaagaagatcttggccgagcgacgcaaggtgctggcgatcgaccatcttaatgaggatcaacttcgcgagaaagctaaagagttatggcagagtatctacaaccttgaagcagaaaagttcgacctacaggagaaattcaaacagcaaaaatacgagatcaacgtgctgcggaatcgcattaatgataaccaaaaagtgtcaaaaaccaggggcaaagcaaaagtgacagggcggtggaaatag

SEQ ID NO: 18416 - DNA, 858 bp, Artificial Sequence
  derived and/or modified sequence
atgagcgacatcgaggaggtggtggaggagtacgaggaggaggagcaagaagaagctgcagtcgaagagcaggaagaggccgccgaggaagacgccgaggccgaggccgaaacagaggaaaccagggctgaggaggacgaggaggaagaggaagcaaaggaggcggaagatggaccgatggaggaatcaaagccgaaacctcggtcttttatgcccaacctcgtgcctccaaagatccccgatggagaaagagtggacttcgacgatatccaccgcaagagaatggagaaggatctcaacgagctgcaggcgttgattgaagcccacttcgaaaaccggaaaaaggaggaagaggagctggtgtccttgaaagaccgcatagagaggagaagggcagaacgagctgaacaacaacgcatacgcaatgagcgtgaaaaagaacgccaaaaccggctggcggaggagcgcgcccgacgagaagaagaggagaatagaagaaaagccgaagacgaagcccgcaagaaaaaggctctgagtaacatgatgcatttcgggggctatatccagaagaccgagaggaagagtggtaaacggcaaaccgaaagagaaaagaagaagaaaatactagcggagagaagaaaagttctggctatcgaccacttgaatgaggaccagctcagagagaaggcaaaggaactttggcagagtatatacaaccttgaggcagagaaattcgacctgcaggaaaaattcaagcagcagaaatatgaaattaacgtgcttcggaatcgcataaacgacaatcagaaagtctccaaaacacggggcaaagccaaggtgactgggcggtggaaatag

SEQ ID NO: 18417 - DNA, 894 bp, Artificial Sequence
  derived and/or modified sequence
atgagcgacatcgaggaggtggtggaggagtacgaggaggagtacttggagcatgccgaagctgccgttgaagaggaggaagactggcgcgaggacgaggatgagcaggaggaggctgccgaggaagacgcagaggctgaggcggagacagaggaaaccagagccgaggaggatgaggaggaggaagaagccaaggaggcagaggacggccctatggaagaaagtaagcctaaacccagatcttttatgccaaatctcgtaccccccaagattccagatggggagagggttgacttcgacgacattcacaggaagcgcatggagaaagatcttaacgaattacaggcattgatagaggcgcatttcgagaatagaaagaaggaagaggaggaacttgtgagcctgaaggatcggatcgagcggcggagggccgaacgtgcggagcagcagcgcatccgaaatgagagggagaaggagcgccagaaccgcctggcagaagaaagggcaagaagagaggaggaggagaatcgacggaaagctgaagatgaggcacggaaaaaaaaggcactgagtaacatgatgcatttcggcggctacatccagaaaactgagcggaagagcggaaaaagacagaccgaacgagagaagaaaaagaaaattctggcggagaggagaaaagtgctggccattgaccatttgaatgaagatcagctcagagaaaaagcaaaagaattatggcagtcgatatataacctcgaggcagagaagttcgacttacaggagaaatttaagcagcagaaatacgagattaatgtgctgcggaacagaataaacgacaatcaaaaagtgtcaaaaactcgaggtaaggccaaggtaactggacgctggaaatag

SEQ ID NO: 18418 - DNA, 858 bp, Artificial Sequence
  derived and/or modified sequence
atgagcgacatcgaagaagtcgtggaggagtatgaagaggaggagcaagaggaagccgctgttgaggagcaggaggaagccgcagaagaggacgcagaggcagaggccgaaactgaagaaacccgggcagaggaggacgaagaggaggaggaagctaaagaagcggaggacggacctatggaggaatcaaagccaaagccaaggtccttcatgccaaacctcgtgccccctaagattcccgacggggaacgggtcgactttgacgatattcaccgcaaaaggatggagaaggacctgaatgaactacaggctctcatcgaggcccacttcgaaaatcgcaagaaagaggaggaagagctggtgtcactaaaagatcgcattgaacgcaggcgggcagaaagggccgagcagcagagaatacgtaacgagcgcgaaaaggaaaggcagaaccggctggccgaagagcgagcaagaagggaagaagaagagaacagaagaaaagccgaagatgaggccaggaaaaagaaagctctgtctaacatgatgcacttcgggggttatattcagaagactgagagaaagtcaggtaagagacaaaccgagcgagaaaagaagaaaaagatactggctgaaagaaggaaggtactagcgatcgatcatcttaacgaagaccaattaagggagaaggcaaaggaactgtggcagtccatatacaacctagaggccgaaaagttcgacctgcaggaaaagtttaagcagcagaagtacgagatcaatgtgctgagaaatagaattaatgacaatcaaaaggtgtctaagaccaggggaaaggcaaaagtgacaggacgctggaagtag

SEQ ID NO: 18419 - DNA, 681 bp, Artificial Sequence
  derived and/or modified sequence
atggaagaatccaagccgaaacctcgcagcttcatgccaaacctggtgccacctaaaatacccgatggtgaacgcgtcgacttcgacgacatacatcgtaaaagaatggaaaaggatctgaatgagcttcaagccctgatcgaagcccacttcgagaacagaaaaaaagaagaggaggagctcgtgtcacttaaggataggatcgaacgccgtcgcgctgaaagagcagagcagcagcgtattagaaacgagcgtgaaaaagagaggcagaacaggctggccgaggaaagggcacgaagggaggaagaagaaaatagacggaaagccgaggatgaagctaggaagaaaaaggccctctccaatatgatgcacttcggaggatatatccagaagacagaacggaagtcaggtaaaaggcagactgaaagggagaagaaaaagaagattctggccgaaaggagaaaagtgctggccattgatcacttgaatgaggaccagttaagggagaaagctaaggagctgtggcagagcatctacaacctggaagccgagaagttcgatctgcaggagaagttcaagcagcagaagtacgaaattaacgtgttgaggaaccggattaacgacaatcagaaagtctccaagacaagggggaaggctaaagtcaccggcagatggaaatag

SEQ ID NO: 18420 - DNA, 858 bp, Artificial Sequence
  derived and/or modified sequence
atgtctgacattgaggaggtggtggaagagtatgaagaggaggaacaggaagaagcagccgtcgaagagcaagaagaagccgcagaggaggacgccgaagcagaagccgaaaccgaggaaactcgcgctgaagaagacgaggaggaagaagaagcaaaagaagcagaagacggtcctatggaagagagtaagccaaagcctcgctcctttatgcccaatttggtacccccaaaaattccagacggcgaaagagtggacttcgacgatatccacagaaagcggatggagaaagacttaaatgagctccaggccctgatagaagctcactttgagaaccgtaagaaggaggaagaagaactggttagcttgaaagaccggattgagcgtcgacgcgctgagcgtgcggagcagcagcgtatccgtaacgagcgggagaaagaaagacagaatcgcctggccgaggagagagcacggagagaggaggaagaaaatcggcgaaaagctgaagatgaggcccgaaagaaaaaggcacttagtaatatgatgcatttcggtggctacatccagaagacagagcggaaaagcggcaaaagacagaccgagcgcgaaaaaaaaaagaaaatccttgcagagcgcaggaaggtgctggcaattgaccatctaaatgaagatcagctacgcgaaaaggcaaaggagctatggcaaagcatttacaatcttgaggccgaaaagtttgatctgcaggaaaaatttaaacagcagaagtacgagatcaacgtcctgcgcaatcgtatcaatgacaatcagaaagtctctaaaacaagaggaaaggccaaggtgactggtaggtggaaatag

SEQ ID NO: 18421 - DNA, 894 bp, Artificial Sequence
  derived and/or modified sequence
atgtccgatatcgaagaagtggtggaggagtatgaggaggaatatctggagcatgctgaggccgctgtggaagaggaagaggattggcgcgaagacgaagacgagcaagaggaagctgccgaggaggacgctgaggccgaagctgaaactgaagaaactcgcgctgaagaggacgaggaagaagaggaggctaaggaggcagaggacggtcccatggaagagtcaaagccaaaacctcggtcattcatgccgaatctagttccgccaaagattccagacggggaaagagtggacttcgatgatatccacagaaaaaggatggaaaaagacctaaatgaactccaggccctcattgaagcacacttcgagaataggaaaaaggaggaggaggagttggtctctctcaaggacagaatagagcggagacgggctgaacgcgcagaacaacagcgtattagaaacgagcgcgagaaggagcggcagaaccggttagcagaggaaagggcccgtcgggaagaggaggaaaataggagaaaagcagaggatgaggctagaaagaagaaagccctgagcaacatgatgcacttcggaggatacattcaaaaaactgagcgcaaaagcggcaagcgacagaccgaacgagagaaaaaaaagaaaatactcgctgagcggagaaaggtgttagctatcgatcacttaaatgaggaccagttaagagaaaaagcaaaggagctgtggcagtccatctacaacctggaagcagaaaaattcgatctacaggagaagttcaagcaacaaaagtacgagatcaacgtgcttagaaataggatcaatgacaaccagaaggtgagcaaaacgagaggcaaagcaaaggttaccggtcggtggaaatag

SEQ ID NO: 18422 - DNA, 1054 bp, Artificial Sequence
  derived and/or modified sequence
atgtctgacatagaagaggtggtggaagagtacgaggaggaggagcaggaagaagcagctgttgaagagcaggaggaggcagcggaagaggatgctgaagcagaggctgagaccgaggagaccagggcagaagaagatgaagaagaagaggaagcaaaggaggctgaagatggcccaatggaggagtccaaaccaaagcccaggtcgttcatgcccaacttggtgcctcccaagatccccgatggagagagagtggactttgatgacatccaccggaagcgcatggagaaggacctgaatgagttgcaggcgctgatcgaggctcactttgagaacaggaagaaagaggaggaggagctcgtttctctcaaagacaggatcgagagacgtcgggcagagcgggccgagcagcagcgcatccggaatgagcgggagaaggagcggcagaaccgcctggctgaagagagggctcgacgagaggaggaggagaacaggaggaaggctgaggatgaggcccggaagaagaaggctttgtccaacatgatgcattttgggggttacatccagaagacagagcggaaaagtgggaagaggcagactgagcgggaaaagaagaagaagattctggctgagaggaggaaggtgctggccattgaccacctgaatgaagatcagctgagggagaaggccaaggagctgtggcagagcatctataacttggaggcagagaagttcgacctgcaggagaagttcaagcagcagaaatatgagatcaatgttctccgaaacaggatcaacgataaccagaaagtctccaagacccgcgggaaggctaaagtcaccgggcgctggaaatagagcctggcctccttcaccaaagatctgctcctcgctcgcacctgcctccggcctgcactcccccagttcccgggccctcctgggcaccccaggcagctcctgtttggaaatggggagctggcctaggtgggagccaccactcctgcctgcccccacacccactccacaccagtaataaaaagccaccacacactga

SEQ ID NO: 18423 - DNA, 1084 bp, Artificial Sequence
  derived and/or modified sequence
gagcagacgcctccaggatctgtcggcagctgctgttctgagggagagcagagaccatgtctgacatagaagaggtggtggaagagtacgaggaggagtgagagcaggaggaggcagcggaagaggatgctgaagcagaggctgagaccgaggagaccagggcagaagaagatgaagaagaagaggaagcaaaggaggctgaagatggcccaatggaggagtccaaaccaaagcccaggtcgttcatgcccaacttggtgcctcccaagatccccgatggagagagagtggactttgatgacatccaccggaagcgcatggagaaggacctgaatgagttgcaggcgctgatcgaggctcactttgagaacaggaagaaagaggaggaggagctcgtttctctcaaagacaggatcgagagacgtcgggcagagcgggccgagcagcagcgcatccggaatgagcgggagaaggagcggcagaaccgcctggctgaagagagggctcgacgagaggaggaggagaacaggaggaaggctgaggatgaggcccggaagaagaaggctttgtccaacatgatgcattttgggggttacatccagaagacagagcggaaaagtgggaagaggcagactgagcgggaaaagaagaagaagattctggctgagaggaggaaggtgctggccattgaccacctgaatgaagatcagctgagggagaaggccaaggagctgtggcagagcatctataacttggaggcagagaagttcgacctgcaggagaagttcaagcagcagaaatatgagatcaatgttctccgaaacaggatcaacgataaccagaaagtctccaagacccgcgggaaggctaaagtcaccgggcgctggaaatagagcctggcctccttcaccaaagatctgctcctcgctcgcacctgcctccggcctgcactcccccagttcccgggccctcctgggcaccccaggcagctcctgtttggaaatggggagctggcctaggtgggagccaccactcctgcctgcccccacacccactccacaccagtaataaaaagccaccacac

SEQ ID NO: 18424 - DNA, 1132 bp, Artificial Sequence
  derived and/or modified sequence
agtccccgctgagactgagcagacgcctccaggatctgtcggcagctgctgttctgagggagagcagagaccatgtctgacatagaagaggtggtggaagagtacgaggaggaggagcaggaagaagcagctgttgaagagcaggaggaggcagcggaagaggatgctgaagcagaggctgagaccgaggagaccagggcagaagaagatgaagaagaagaggaagcaaaggaggctgaagatggcccaatggaggagtccaaaccaaagcccaggtcgttcatgcccaacttggtgcctcccaagatccccgatggagagagagtggactttgatgacatccaccggaagcgcatggagaaggacctgaatgagttgcaggcgctgatcgaggctcactttgagaacaggaagaaagaggaggaggagctcgtttctctcaaagacaggatcgagagacgtcgggcagagcgggccgagcagcagcgcatccggaatgagcgggagaaggagcggcagaaccgcctggctgaagagagggctcgacgagaggaggaggagaacaggaggaaggctgaggatgaggcccggaagaagaaggctttgtccaacatgatgcattttgggggttacatccagaagacagagcggaaaagtgggaagaggcagactgagcgggaaaagaagaagaagattctggctgagaggaggaaggtgctggccattgaccacctgaatgaagatcagctgagggagaaggccaaggagctgtggcagagcatctataacttggaggcagagaagttcgacctgcaggagaagttcaagcagcagaaatatgagatcaatgttctccgaaacaggatcaacgataaccagaaagtctccaagacccgcgggaaggctaaagtcaccgggcgctggaaatagagcctggcctccttcaccaaagatctgctcctcgctcgcacctgcctccggcctgcactcccccagttcccgggccctcctgggcaccccaggcagctcctgtttggaaatggggagctggcctaggtgggagccaccactcctgcctgcccccacacccactccacaccagtaataaaaagccaccacacactgactggca

SEQ ID NO: 18425 - DNA, 1159 bp, Artificial Sequence
  derived and/or modified sequence
ccccgctgagactgagcagacgcctccaggatctgtcggcagctgctgttctgagggagagcagagaccatgtctgacatagaagaggtggtggaagagtacgaggaggagtatctggagcatgcagaagcagctgttgaagaagaggaggactggagagaggacgaagacgagcaggaggaggcagcggaagaggatgctgaagcagaggctgagaccgaggagaccagggcagaagaagatgaagaagaagaggaagcaaaggaggctgaagatggcccaatggaggagtccaaaccaaagcccaggtcgttcatgcccaacttggtgcctcccaagatccccgatggagagagagtggactttgatgacatccaccggaagcgcatggagaaggacctgaatgagttgcaggcgctgatcgaggctcactttgagaacaggaagaaagaggaggaggagctcgtttctctcaaagacaggatcgagagacgtcgggcagagcgggccgagcagcagcgcatccggaatgagcgggagaaggagcggcagaaccgcctggctgaagagagggctcgacgagaggaggaggagaacaggaggaaggctgaggatgaggcccggaagaagaaggctttgtccaacatgatgcattttgggggttacatccagaagacagagcggaaaagtgggaagaggcagactgagcgggaaaagaagaagaagattctggctgagaggaggaaggtgctggccattgaccacctgaatgaagatcagctgagggagaaggccaaggagctgtggcagagcatctataacttggaggcagagaagttcgacctgcaggagaagttcaagcagcagaaatatgagatcaatgttctccgaaacaggatcaacgataaccagaaagtctccaagacccgcgggaaggctaaagtcaccgggcgctggaaatagagcctggcctccttcaccaaagatctgctcctcgctcgcacctgcctccggcctgcactcccccagttcccgggccctcctgggcaccccaggcagctcctgtttggaaatggggagctggcctaggtgggagccaccactcctgcctgcccccacacccactccacaccagtaataaaaagccaccacacactga

SEQ ID NO: 18426 - protein, 204 aa, Artificial Sequence
  derived and/or modified sequence
MALVSGISLDPEAAIGVTKRPPPKWVDGVDEIQYDVGRIKQKMKELASLHDKHLNRPTLDDSSEEEHAIEITTQEITQLFHRCQRAVQALPSRARACSEQEGRLLGNVVASLAQALQELSTSFRHAQSGYLKRMKNREERSQHFFDTSVPLMDDGDDNTLYHRGFTEDQLVLVEQNTLMVEEREREIRQIVQSISDLNEIFRDL

SEQ ID NO: 18427 - protein, 325 aa, Artificial Sequence
  derived and/or modified sequence
MATRRLTDAFLLLRNNSIQNRQLLAEQVSSHITSSPLHSRSIAAALDELADDRMALVSGISLDPEAAIGVTKRPPPKWVDGVDEIQYDVGRIKQKMKELASLHDKHLNRPTLDDSSEEEHAIEITTQEITQLFHRCQRAVQALPSRARACSEQEGRLLGNVVASLAQALQELSTSFRHAQSGYLKRMKNREERSQHFFDTSVPLMDDGDDNTLYHRGFTEDQLVLVEQNTLMVEEREREIRQIVQSISDLNEIFRDLGAMIVEQGTVLDRIDYNVEQSCIKTEDGLKQLHKAEQYQKKNRKMLVILILFVIIIVLIVVLVGVKSR

SEQ ID NO: 18428 - protein, 325 aa, Artificial Sequence
  derived and/or modified sequence
MATRRLTDAFLLLRNNSIQNRQLLAEQVSSHITSSPLHSRSIAAELDELADDRMALVSGISLDPEAAIGVTKRPPPKWVDGVDEIQYDVGRIKQKMKELASLHDKHLNRPTLDDSSEEEHAIEITTQEITQLFHRCQRAVQALPSRARACSEQEGRLLGNVVASLAQALQELSTSFRHAQSGYLKRMKNREERSQHFFDTSVPLMDDGDDNTLYHRGFTEDQLVLVEQNTLMVEEREREIRQIVQSISDLNEIFRDLGAMIVEQGTVLDRIDYNVEQSCIKTEDGLKQLHKAEQYQKKNRKMLVILILFVIIIVLIVVLVGVKSR

SEQ ID NO: 18429 - protein, 139 aa, Artificial Sequence
  derived and/or modified sequence
MKNREERSQHFFDTSVPLMDDGDDNTLYHRGFTEDQLVLVEQNTLMVEEREREIRQIVQSISDLNEIFRDLGAMIVEQGTVLDRIDYNVEQSCIKTEDGLKQLHKAEQYQKKNRKMLVILILFVIIIVLIVVLVGVKSR

SEQ ID NO: 18430 - protein, 219 aa, Artificial Sequence
  derived and/or modified sequence
GISLDPEAAIGVTKRPPPKWVDGVDEIQYDVGRIKQKMKELASLHDKHLNRPTLDDSSEEEHAIEITTQEITQLFHRCQRAVQALPSRARACSEQEGRLLGNVVASLAQALQELSTSFRHAQSGYLKRMKNREERSQHFFDTSVPLMDDGDDNTLYHRGTVLDRIDYNVEQSCIKTEDGLKQLHKAEQYQKKNRKMLVILILFVIIIVLIVVLVGVKSR

SEQ ID NO: 18431 - DNA, 978 bp, Artificial Sequence
  derived and/or modified sequence
atggccaccagaagactgaccgacgccttcctgctgctgagaaacaacagcatccagaacagacagctgctggccgagcaggtgagcagccacatcaccagcagccccctgcacagcagaagcatcgccgccgccctggacgagctggccgacgacagaatggccctggtgagcggcatcagcctggaccccgaggccgccatcggcgtgaccaagagacccccccccaagtgggtggacggcgtggacgagatccagtacgacgtgggcagaatcaagcagaagatgaaggagctggccagcctgcacgacaagcacctgaacagacccaccctggacgacagcagcgaggaggagcacgccatcgagatcaccacccaggagatcacccagctgttccacagatgccagagagccgtgcaggccctgcccagcagagccagagcctgcagcgagcaggagggcagactgctgggcaacgtggtggccagcctggcccaggccctgcaggagctgagcaccagcttcagacacgcccagagcggctacctgaagagaatgaagaacagagaggagagaagccagcacttcttcgacaccagcgtgcccctgatggacgacggcgacgacaacaccctgtaccacagaggcttcaccgaggaccagctggtgctggtggagcagaacaccctgatggtggaggagagagagagagagatcagacagatcgtgcagagcatcagcgacctgaacgagatcttcagagacctgggcgccatgatcgtggagcagggcaccgtgctggacagaatcgactacaacgtggagcagagctgcatcaagaccgaggacggcctgaagcagctgcacaaggccgagcagtaccagaagaagaacagaaagatgctggtgatcctgatcctgttcgtgatcatcatcgtgctgatcgtggtgctggtgggcgtgaagagcagatag

SEQ ID NO: 18432 - DNA, 978 bp, Artificial Sequence
  derived and/or modified sequence
atggccaccagaagactgaccgacgccttcctgctgctgagaaacaacagcatccagaacagacagctgctggccgagcaggtgagcagccacatcaccagcagccccctgcacagcagaagcatcgccgccgagctggacgagctggccgacgacagaatggccctggtgagcggcatcagcctggaccccgaggccgccatcggcgtgaccaagagacccccccccaagtgggtggacggcgtggacgagatccagtacgacgtgggcagaatcaagcagaagatgaaggagctggccagcctgcacgacaagcacctgaacagacccaccctggacgacagcagcgaggaggagcacgccatcgagatcaccacccaggagatcacccagctgttccacagatgccagagagccgtgcaggccctgcccagcagagccagagcctgcagcgagcaggagggcagactgctgggcaacgtggtggccagcctggcccaggccctgcaggagctgagcaccagcttcagacacgcccagagcggctacctgaagagaatgaagaacagagaggagagaagccagcacttcttcgacaccagcgtgcccctgatggacgacggcgacgacaacaccctgtaccacagaggcttcaccgaggaccagctggtgctggtggagcagaacaccctgatggtggaggagagagagagagagatcagacagatcgtgcagagcatcagcgacctgaacgagatcttcagagacctgggcgccatgatcgtggagcagggcaccgtgctggacagaatcgactacaacgtggagcagagctgcatcaagaccgaggacggcctgaagcagctgcacaaggccgagcagtaccagaagaagaacagaaagatgctggtgatcctgatcctgttcgtgatcatcatcgtgctgatcgtggtgctggtgggcgtgaagagcagatag

SEQ ID NO: 18433 - DNA, 978 bp, Artificial Sequence
  derived and/or modified sequence
atggcaacacgccggctcactgacgcattcttactgctccgcaataactccattcagaataggcaactgctcgccgagcaggtctcttcgcacataacttcttctccactccactccaggagtatcgccgcagctcttgatgaattagccgacgatagaatggcactggtttcagggattagcttggatcccgaagccgctataggtgtcactaagcgcccacccccgaagtgggtcgacggggtagatgagatacagtacgacgttggcaggataaagcaaaaaatgaaagaactcgcttcgcttcacgacaaacacctgaaccggccaaccttagacgactctagcgaggaggaacatgcaatagagataaccacccaggaaatcacgcagctgtttcacaggtgtcagagggctgtccaggcgctgccttccagagccagggcctgcagcgagcaggagggccggttgctcggcaacgtagttgcttcccttgcccaggccctacaggagctgagcacaagtttccggcacgctcagagcggttatctcaagagaatgaaaaatagggaggagcgctcccagcatttctttgacacctccgtgcctctgatggatgatggagatgacaatactttgtatcacaggggctttacagaagaccagctggtgctcgtggagcagaatacactgatggtggaggagcgggagcgcgaaatcaggcaaattgtgcaaagtatttccgaccttaacgagatcttccgtgatctgggcgcaatgatcgtggagcagggtacggtgctagatcgtatcgattataatgtggagcaatcctgcattaaaaccgaggatggactcaaacagctacataaggccgagcagtatcagaagaaaaataggaaaatgctcgtaatcctgatcttatttgtcatcatcattgtgctaattgtggttctggtgggcgtgaaatcccggtag

SEQ ID NO: 18434 - DNA, 978 bp, Artificial Sequence
  derived and/or modified sequence
atggctacaagacgtctcacagacgccttccttttactgcgtaacaactctattcagaacagacaattgctggccgaacaggtttcaagccatatcacctcctctcctctccacagccggagtatcgcggccgaacttgatgagttagccgatgataggatggcgctagtgagcggaatttccctggatcccgaggctgctatcggcgttactaaacggccacctcccaagtgggtggacggggtggatgaaattcagtatgatgtcggtaggatcaagcaaaaaatgaaggagctcgcgagcctgcatgataaacacctcaaccgaccgaccctggacgactcctctgaggaagagcacgcgatagagattacaacccaagagattacccagctgttccatagatgtcagcgcgctgtccaagctctgccatctcgcgcaagagcatgttccgagcaagaaggacggctcctcgggaacgttgtggcctccctcgctcaggccttgcaggagctcagtactagctttcggcatgcccaatccggttacctgaagagaatgaaaaaccgagaagaacgctcacagcatttttttgataccagcgtgccgctgatggacgacggagacgacaacacgctttatcaccgtgggttcactgaagaccagcttgttcttgttgaacagaacacgttaatggtcgaagaaagggagagagaaattagacagattgtgcaatcaatcagtgacttgaacgaaattttccgcgatctcggcgcgatgatcgtggaacagggtactgtcctggatcgtatcgattataacgtggagcagagctgcatcaagaccgaggatggcttgaagcagctgcataaggctgaacagtaccagaagaaaaataggaaaatgttggtgatcctcattctatttgtgatcattattgtgcttatagtggtccttgtgggcgtgaagtcaaggtag

SEQ ID NO: 18435 - DNA, 978 bp, Artificial Sequence
  derived and/or modified sequence
atggccacccggcggctgacagatgccttcctgctgctgaggaacaacagcatccagaaccggcagctgctggccgagcaggtgagcagccacatcaccagcagccccctgcacagccgcagcattgctgctgccctggatgagctggctgatgacaggatggccctggtgtctggcatcagcctggaccctgaggccgccatcggcgtgaccaagaggcccccacccaagtgggtggatggagtggatgagatccagtatgatgtgggccgcatcaagcagaagatgaaggagctggccagcctgcatgacaagcacctgaaccggcccaccctggatgacagcagcgaggaggagcacgccatcgagatcaccacccaggagatcacccagctgttccaccgctgccagagagctgtgcaggccctgcccagccgggcccgggcctgcagcgagcaggagggccgcctgctgggcaatgtggtggccagcctggcccaggccctgcaggagctgagcaccagcttcagacatgcccagagcggctacctgaagaggatgaagaaccgggaggagaggagccagcacttctttgacacctctgtgcccctgatggatgatggagatgacaacaccctgtaccaccggggcttcacagaggaccagctggtgctggtggagcagaacaccctgatggtggaggagcgggagcgggagatccggcagatcgtgcagagcatcagtgacctgaatgagatcttccgggacctgggcgccatgattgtggagcagggcaccgtgctggacagaattgactacaacgtggagcagagctgcatcaagacagaagatggcctgaagcagctgcacaaggccgagcagtaccagaagaagaacaggaagatgctggtgatcctgatcctgtttgtgatcatcatcgtgctgattgtggtgctggtgggcgtgaagagcaggtag

SEQ ID NO: 18436 - DNA, 978 bp, Artificial Sequence
  derived and/or modified sequence
atggccacccggcggctgacagatgccttcctgctgctgaggaacaacagcatccagaaccggcagctgctggccgagcaggtgagcagccacatcaccagcagccccctgcacagccgcagcattgctgctgagctggatgagctggctgatgacaggatggccctggtgtctggcatcagcctggaccctgaggccgccatcggcgtgaccaagaggcccccacccaagtgggtggatggagtggatgagatccagtatgatgtgggccgcatcaagcagaagatgaaggagctggccagcctgcatgacaagcacctgaaccggcccaccctggatgacagcagcgaggaggagcacgccatcgagatcaccacccaggagatcacccagctgttccaccgctgccagagagctgtgcaggccctgcccagccgggcccgggcctgcagcgagcaggagggccgcctgctgggcaatgtggtggccagcctggcccaggccctgcaggagctgagcaccagcttcagacatgcccagagcggctacctgaagaggatgaagaaccgggaggagaggagccagcacttctttgacacctctgtgcccctgatggatgatggagatgacaacaccctgtaccaccggggcttcacagaggaccagctggtgctggtggagcagaacaccctgatggtggaggagcgggagcgggagatccggcagatcgtgcagagcatcagtgacctgaatgagatcttccgggacctgggcgccatgattgtggagcagggcaccgtgctggacagaattgactacaacgtggagcagagctgcatcaagacagaagatggcctgaagcagctgcacaaggccgagcagtaccagaagaagaacaggaagatgctggtgatcctgatcctgtttgtgatcatcatcgtgctgattgtggtgctggtgggcgtgaagagcaggtag

SEQ ID NO: 18437 - DNA, 978 bp, Artificial Sequence
  derived and/or modified sequence
atggccacccggcggctgaccgacgccttcctgctgctgcggaacaactctatccaaaatcggcagctattagcagaacaggtgagctcgcacatcacttcctccccacttcactctagatccatcgcagcagctctggacgaactggcagacgatcggatggcgctcgtgtctggcataagcttggaccccgaagccgctattggggtgacaaagcggccgccaccaaagtgggtcgacggggtggacgagatacagtatgacgttgggcgtattaaacagaaaatgaaggagttagccagcctgcacgataaacacctgaatagaccaaccctggatgatagcagcgaggaggaacatgctatagagattacaacacaggagattacacagctgttccacagatgccagcgcgccgttcaggctcttccgagtcgtgcccgagcctgctcagaacaggagggaaggcttctgggaaacgtagtggctagcttggcacaagcgttgcaggagcttagcacgtctttccgccatgctcagtccggctacctgaagcgaatgaagaatagggaggagagaagtcagcatttctttgatacaagcgttcctctcatggatgacggcgacgataatacgctgtaccaccgaggatttaccgaagatcagctcgtgctggtcgaacaaaacactctcatggtcgaagaaagggaacgcgagattcggcagattgtccagtctattagtgacctcaacgagattttcagggacctcggagccatgatcgtggagcaggggacagtgctggatcgcatagactacaacgtggaacagtcatgtatcaagacggaagacgggctgaaacagttgcacaaggctgagcagtaccaaaagaagaacagaaaaatgctcgtaattctcattctgttcgtcattattatagtcttgattgttgtgctggtgggggtgaaaagcagatag

SEQ ID NO: 18438 - DNA, 978 bp, Artificial Sequence
  derived and/or modified sequence
atggccacccggcggctgaccgacgccttcctgctgctgcggaacaatagcatccagaataggcagctcctggcagaacaagtatcaagtcacatcacaagcagccccctgcatagtcggtcaattgctgctgagctcgacgagctcgccgacgatagaatggccctagtctccggtatctcactggaccctgaagcagccatcggggtcactaagaggcctcctcccaaatgggtggatggcgtggatgaaatccagtacgatgtcggaagaattaaacaaaagatgaaggaacttgcctcattgcacgataagcacttaaaccgccccacactagatgattccagcgaggaagagcacgccattgaaatcactacacaggagattacacagctctttcaccgctgccaacgggcagtgcaggccctgccctctcgcgcccgggcgtgctcagagcaggagggccgtttactcggcaatgtggtggcttcacttgcacaggccttacaggagctatctacatcctttagacacgcgcagtccggctacttgaagaggatgaaaaacagggaggagaggtcacagcactttttcgatacgagcgttcccctgatggacgacggggacgacaatacgctttaccatcgcgggtttacagaagatcagctggtgttagtggaacaaaacacgttgatggtggaggagcgggaacgtgagatcaggcagatcgttcaaagtatttctgacttgaacgaaatttttcgggatctcggggctatgatcgttgagcagggaaccgtactagatcggattgactataacgtggaacagtcgtgtattaaaactgaagatggactcaagcagttgcacaaagctgagcagtatcagaagaaaaaccgaaaaatgctcgttattctcattttgtttgtcatcatcatcgtgctgattgtcgtactggtgggagtgaagtcgcggtag

SEQ ID NO: 18439 - DNA, 978 bp, Artificial Sequence
  derived and/or modified sequence
atggccaccaggaggcttacagacgccttcctgcttctcaggaacaattccatccagaaccgacagctgcttgccgagcaggtcagctctcatatcacgtcctctcctctgcactcccggtcaatcgcagcggcactagacgagttagccgacgaccggatggcccttgtgtccggtatcagcctggatcctgaagccgctatcggggtcacaaagcggcctcctcccaagtgggtggacggcgtggacgaaatccaatatgatgtaggccgtattaagcaaaagatgaaggaattggcctcactgcatgacaagcatctgaacaggccaaccctggacgatagctctgaggaagagcacgccatcgagattactacgcaggagatcacgcagctgtttcacaggtgtcaacgagccgtccaggctcttccatccagggcacgggcttgcagtgagcaggagggacgcctcctcggaaatgtggtggcctcattggcacaggcactgcaggagctctccacctcttttaggcatgcccagagcggctacctgaaacgaatgaaaaatcgggaagaaaggtctcagcattttttcgacacttctgtgcccctgatggatgacggagacgataataccctgtaccaccgaggctttacggaagatcagttggtactcgtcgaacagaacacactgatggtcgaggaaagagaacgagagatccggcagatcgtgcagagcatctccgatctcaacgagatattccgggacctgggtgccatgatcgtggaacaggggacagtattggatagaatcgattacaatgtcgagcagagttgtataaagaccgaggacggcctgaagcagctgcacaaggctgaacagtatcaaaaaaaaaatagaaagatgcttgtaatattaattctcttcgttattattatcgtcctaatcgtcgtgctggtaggggtaaagagtaggtag

SEQ ID NO: 18440 - DNA, 978 bp, Artificial Sequence
  derived and/or modified sequence
atggccacacgacgcctgacagacgcatttctgctccttcggaacaattccatccagaatcgccagctcctggcggagcaggtgtctagtcatataacatcgagcccattacactcacggtccattgccgcagagctggacgagctggctgatgaccgtatggccctcgtcagtggtataagccttgacccagaggccgcaatcggggttactaagcgtccaccgcctaaatgggtagacggcgtggacgagatccagtatgacgtgggtagaatcaaacaaaagatgaaggagttagcctctcttcacgataaacacctaaacaggcccacactagatgactcttcagaagaagaacacgccatagaaatcaccacccaggagattactcagttgttccatcggtgtcagcgtgccgtgcaggcattaccgtcacgggcaagagcgtgctctgaacaagaaggcaggttattgggtaatgttgtcgccagtttagcccaggcgttgcaggaactcagcaccagcttcaggcatgcacagtccggctacctaaaacggatgaagaatagggaggaacggtcccagcattttttcgacaccagtgtccctctgatggacgacggagatgataacacactctaccatcgcggattcacagaagatcagttggtgctggtagagcagaataccctgatggtggaggagcgggaacgggaaattcggcaaatcgtgcagtccatctctgaccttaatgaaatcttccgcgacctcggggcaatgattgtggagcagggcacagtgttggatagaatcgattataatgtcgaacagtcctgtataaagacagaagatggcttgaagcagctgcacaaagccgagcaatatcagaaaaagaaccgtaagatgctggtgattttgatcttgttcgtaattattattgttctgatcgttgtcctggtcggggttaagagtagatag

SEQ ID NO: 18441 - DNA, 999 bp, Artificial Sequence
  derived and/or modified sequence
agatccggggatggagggagccggagaagaggagtgagaaggccggggaggcaggccctgctgtcttcctgcaggccggcagcctgctggcagtggaggaccaggccgtccaggaaaggaaggggtcaggaggtcgggcagggcctcagcagctgttagccgagcaagtgagtagtcacatcacctccagccctctgcattcacgtagcattgctgcggagctggacgagcttgctgatgaccgtatggcactggtgtcaggcatcagcttagatccagaagcagcgattggtgtgacaaaacggccacctcctaagtgggtggatggagtggatgaaattcagtatgatgttggccggattaagcagaagatgaaagaattggccagccttcatgacaagcatttaaacagacccaccctggatgacagcagcgaagaggaacatgccattgagataactacccaagagatcactcagctcttccacaggtgccagcgtgccgtgcaggccctgccgagccgggcccgggcctgctccgagcaggaggggcggctgcttgggaacgtggtggcctcgctggcgcaggccctgcaggaactctccaccagcttccggcacgcacagtcaggctacctcaaacgcatgaagaatcgagaggaaagatcccagcattttttcgacacatcagtaccactaatggatgatggagacgataacactctttaccatcggggttttacagaggaccagttagttctggtggagcagaacacactgatggtggaagagcgggaacgagagattcgccagattgtacagtccatttctgacctgaatgaaatattcagggacttaggggcgatgattgtagaacagggtacagtccttgacagaattgactataacgttgaacagtcctgtatcaaaactgaagatggtttgaaacagcttcacaaggcagaacagtatcaaaagaagaatcggaagatgcttgtga

SEQ ID NO: 18442 - DNA, 4213 bp, Artificial Sequence
  derived and/or modified sequence
atggccaccaggcgtttaaccgacgctttcttgttgttgcggaataattccatccaaaaccggcagctgttagccgagcaagtgagtagtcacatcacctccagccctctgcattcacgtagcattgctgcggccctggatgagcttgctgatgaccgtatggcactggtgtcaggcatcagcttagatccagaagcagcgattggtgtgacaaaacggccacctcctaagtgggtggatggagtggatgaaattcagtatgatgttggccggattaagcagaagatgaaagaattggccagccttcatgacaagcatttaaacagacccaccctggatgacagcagcgaagaggaacatgccattgagataactacccaagagatcactcagctcttccacaggtgccagcgtgccgtgcaggccctgccgagccgggcccgggcctgctccgagcaggaggggcggctgcttgggaacgtggtggcctcgctggcgcaggccctgcaggaactctccaccagcttccggcacgcacagtcaggctacctcaaacgcatgaagaatcgagaggaaagatcccagcattttttcgacacatcagtaccactaatggatgatggagacgataacactctttaccatcggggttttacagaggaccagttagttctggtggagcagaacacactgatggtggaagagcgggaacgagagattcgccagattgtacagtccatttctgacctgaatgaaatattcagggacttaggggcgatgattgtagaacagggtacagtccttgacagaattgactataacgttgaacagtcctgtatcaaaactgaagatggtttgaaacagcttcacaaggcagaacagtatcaaaagaagaatcggaagatgcttgtgattttaatattatttgtcatcatcattgtgctcattgttgtcctcgttggcgtgaagtctcgataagtggcattgggttttcgtgtgtgccgcgcgtgtggatctcccgggtgtgaggggcttggcctgcgccccgccagctgcccgcagaggtgcagcctcgaggaatctgagggcgtcggggcagcgaacctttgcatccacggactcctccttccctagtcctgctcaagcggtccggggaatgggtttttgtttttccttcattgttgagaatttaaggacctttgatactgctgcacaatagagattgagttctgggatcagttataatatatattttttttagaaagagaaaatgagctgagagtttacaggcactgcagaagctgttcagtattatatgtgtatatgctatttttttagcagccatgtctgagcagaatgttaacataatttttggaaaaattttctttaaaccatctggtttttaagaaatttggtaccaaaaattgatgagtagaggcaaaaatgccccttcatctttctctatatattttccagttgaaaacaaactaagaagtcctttaagaatttataatccgttccccattaacttaatttagcttttccatcactgttaatgatcagagtaacaaagtgtgaaaaataagaaaccatcattgatgttaattaacacatttagatgggccagttaaaacagcttcataagttttaaattaattgtaaatggaatattcctcatttaaaatttttgcactgcattttctactgtaaaccaaaagaggttactaagcaaaaccacctaaatttaagttggtgatttaaatgaatctcacattaaaagaaagcttgacagtgttatgaaagccaccagactcagccagtgtgtccccatgggtatccccagccatccttgctcaatccattacttatatactaactacataatgacctgttcaaaccagactctatttaatgaactgtgaatttacacagaggccattttaaatgggtcaccccatttaggattagtggatctcaaattattaaccaaacatcactccatttcaaagtaaaatattccaccagcgatttgatttattggctcttccattgccactgagcaatgcccaggaagcaggcacattgccaaggactgggggcatcttgactaggaagctcctcgtttgtgtgagcgtgggtcagaccgccaaagtaggacttcatcgtttacctacctattatcaatatggtgcttgaatatattcctataactgtagaacagtgtggaaagtgatggtaactttgaagttgttcatgttttattggctttgttttaattgacactagtagagttttaatggtctttgtgtaaattttaatggcttttccattgtttttgcttctcttaaaaagtttaagaagaatatgacctcattaaatgtgctgttttatttggaccagtcacacaaaatgtctctctagagttgactttaaagttgtttacagaaatttaaactcaattccagagattgaagttgtccaaacagctcatgggcttagtgtccaaacccctgcccagccttccctttccaagttggtgccacctccaggtagccattggtggttttcctattactgatgtggctgtggaatgataaggtcctagaggggccctggcatttcaggaagcggacctggtattccctgacaaacattgcttaggaaagagggccggagaataagaagccagcacctcatcagtcagccctgcaatgtgagacttccgtagctgttgagagtcactgcaggtgttctttcatcccatctgattttaacccatggttgagacgttccaagttagatctgctgctcttaggtgtggggctgtccacattagggaacttgcctcaaaaacagtccacagtggcaataccggacttctgttcaagctttttaaagtgctgagccttacaaacccctgaaggaaagtgaccctttaagagaggatcatctttttttatatttattttcaccaaatagggtgatgagggttggtttttgttccctcaacccatttgggtaaaataacggatctgattagaaactgttttaaggaggggctgggctcggtggctcacgcctgtaatcccagactttgagaggccaaggcggtcacgaggtcaggagttcgagaccagcctagccaacatggtgaaaccccgtctctacaaaaaatacaaaaattagccgggtgggacacgcctgtaatcccagctactcaagaggctgaggcaggagaatagcttgaacccgggaggcagaggttgcagtgagccgagatcacaccactgcactccagcctgggtgacagagcgaggctccgtctcaaaaaaaaaaaaaaaaaattgttttagcgctgggtttcccaaggtgggagagacagacccagcctggagctggcccctggcctgtgtgctgacttcttggggtcctcaaaccactgtatttttctgttgagcctgtacttggggagagatcagtagcatttgaggaagtaagagaaaagaatcatggtacctcagggtttctttccctttactcgctggcagccattgtctgtgggcacctcatgtttttccacactctactgggccgtggaggtaacgatcacccaggccagtctcctctgcctgggatgcgccctctgagaggaggcctagcagggcaggctccctctgggcatccctggatgcagcctctggacacatgcctcctttaaagtgtccgggtgcagctcaggttgagtggaggtagaaggagaaacagacatgtttaccacgcgttttccaaagctcctgatctttcccaagattgtaactgaaaactgctgtctcttgttttgttcgttttgggggtggtggtgctggctgggccatgcttgtgaagtgatgtgtgtctctgatttaacggattcactgttttctctgctaattgagagagcgttatttacattatttatttgttttgacacaagtgctttcagtgttttatcctagctaatggcttcttaaaggtaataaaacccttccaacgtaattggtcagataaaactttttttcttgtatgcttaaataaagcaattagtgaagcacttctatccaaaatgacttttttgtccttttttaaaaccaatttactgttactggaaactttttgtacaataaagcaatcacgcagattaaagaacatcctgcaatcctagtattaattttaa

SEQ ID NO: 18443 - DNA, 4937 bp, Artificial Sequence
  derived and/or modified sequence
agatccggggatggagggagccggagaagaggagtgagaaggccggggaggcaggccctgctgtcttcctgcaggccggcagcctgctggcagtggaggaccaggccgtccaggaaaggaaggggtcaggaggtcgggcagggcctcagcaggttcagacaagtccccagaagggagctgcaggcgccctcgagtccaggccccaagcctggctccggttgtccaaagagggcctaggccaggcctctggtgcggaaactgagtcacagccagacctcagggcacggcctagacgcttacgagccaaagttaggggtagagagcagagacctccggggggtctcagggagtagggggcttcagggcctcccagtctagagccggattggcgagttagacgcttgtagatccaaggttggattggggtggggtctctgggacgttggatcgctacgcaaggattggggggattcaagtgcttagagatcgaagtctgccctgggtagggggagtcagacaattggaaagcctaggtagttatttggggaggggtctctacgccttggcgaagcgcacagctgcatctttttggcttgaggcctgaggccttgtcgagaagcttccgtgaaagggtgggccagccgggccacgagaaagaaagtgaataaatcaggaatataagtgggcggggggcccctgagaggggggtcgcaaagggtgagacatggccaccaggcgtttaaccgacgctttcttgttgttgcggaataattccatccaaaaccggcagctgttagccgagcaagtgagtagtcacatcacctccagccctctgcattcacgtagcattgctgcggagctggacgagcttgctgatgaccgtatggcactggtgtcaggcatcagcttagatccagaagcagcgattggtgtgacaaaacggccacctcctaagtgggtggatggagtggatgaaattcagtatgatgttggccggattaagcagaagatgaaagaattggccagccttcatgacaagcatttaaacagacccaccctggatgacagcagcgaagaggaacatgccattgagataactacccaagagatcactcagctcttccacaggtgccagcgtgccgtgcaggccctgccgagccgggcccgggcctgctccgagcaggaggggcggctgcttgggaacgtggtggcctcgctggcgcaggccctgcaggaactctccaccagcttccggcacgcacagtcaggctacctcaaacgcatgaagaatcgagaggaaagatcccagcattttttcgacacatcagtaccactaatggatgatggagacgataacactctttaccatcggggttttacagaggaccagttagttctggtggagcagaacacactgatggtggaagagcgggaacgagagattcgccagattgtacagtccatttctgacctgaatgaaatattcagggacttaggggcgatgattgtagaacagggtacagtccttgacagaattgactataacgttgaacagtcctgtatcaaaactgaagatggtttgaaacagcttcacaaggcagaacagtatcaaaagaagaatcggaagatgcttgtgattttaatattatttgtcatcatcattgtgctcattgttgtcctcgttggcgtgaagtctcgataagtggcattgggttttcgtgtgtgccgcgcgtgtggatctcccgggtgtgaggggcttggcctgcgccccgccagctgcccgcagaggtgcagcctcgaggaatctgagggcgtcggggcagcgaacctttgcatccacggactcctccttccctagtcctgctcaagcggtccggggaatgggtttttgtttttccttcattgttgagaatttaaggacctttgatactgctgcacaatagagattgagttctgggatcagttataatatatattttttttagaaagagaaaatgagctgagagtttacaggcactgcagaagctgttcagtattatatgtgtatatgctatttttttagcagccatgtctgagcagaatgttaacataatttttggaaaaattttctttaaaccatctggtttttaagaaatttggtaccaaaaattgatgagtagaggcaaaaatgccccttcatctttctctatatattttccagttgaaaacaaactaagaagtcctttaagaatttataatccgttccccattaacttaatttagcttttccatcactgttaatgatcagagtaacaaagtgtgaaaaataagaaaccatcattgatgttaattaacacatttagatgggccagttaaaacagcttcataagttttaaattaattgtaaatggaatattcctcatttaaaatttttgcactgcattttctactgtaaaccaaaagaggttactaagcaaaaccacctaaatttaagttggtgatttaaatgaatctcacattaaaagaaagcttgacagtgttatgaaagccaccagactcagccagtgtgtccccatgggtatccccagccatccttgctcaatccattacttatatactaactacataatgacctgttcaaaccagactctatttaatgaactgtgaatttacacagaggccattttaaatgggtcaccccatttaggattagtggatctcaaattattaaccaaacatcactccatttcaaagtaaaatattccaccagcgatttgatttattggctcttccattgccactgagcaatgcccaggaagcaggcacattgccaaggactgggggcatcttgactaggaagctcctcgtttgtgtgagcgtgggtcagaccgccaaagtaggacttcatcgtttacctacctattatcaatatggtgcttgaatatattcctataactgtagaacagtgtggaaagtgatggtaactttgaagttgttcatgttttattggctttgttttaattgacactagtagagttttaatggtctttgtgtaaattttaatggcttttccattgtttttgcttctcttaaaaagtttaagaagaatatgacctcattaaatgtgctgttttatttggaccagtcacacaaaatgtctctctagagttgactttaaagttgtttacagaaatttaaactcaattccagagattgaagttgtccaaacagctcatgggcttagtgtccaaacccctgcccagccttccctttccaagttggtgccacctccaggtagccattggtggttttcctattactgatgtggctgtggaatgataaggtcctagaggggccctggcatttcaggaagcggacctggtattccctgacaaacattgcttaggaaagagggccggagaataagaagccagcacctcatcagtcagccctgcaatgtgagacttccgtagctgttgagagtcactgcaggtgttctttcatcccatctgattttaacccatggttgagacgttccaagttagatctgctgctcttaggtgtggggctgtccacattagggaacttgcctcaaaaacagtccacagtggcaataccggacttctgttcaagctttttaaagtgctgagccttacaaacccctgaaggaaagtgaccctttaagagaggatcatctttttttatatttattttcaccaaatagggtgatgagggttggtttttgttccctcaacccatttgggtaaaataacggatctgattagaaactgttttaaggaggggctgggctcggtggctcacgcctgtaatcccagactttgagaggccaaggcggtcacgaggtcaggagttcgagaccagcctagccaacatggtgaaaccccgtctctacaaaaaatacaaaaattagccgggtgggacacgcctgtaatcccagctactcaagaggctgaggcaggagaatagcttgaacccgggaggcagaggttgcagtgagccgagatcacaccactgcactccagcctgggtgacagagcgaggctccgtctcaaaaaaaaaaaaaaaaaattgttttagcgctgggtttcccaaggtgggagagacagacccagcctggagctggcccctggcctgtgtgctgacttcttggggtcctcaaaccactgtatttttctgttgagcctgtacttggggagagatcagtagcatttgaggaagtaagagaaaagaatcatggtacctcagggtttctttccctttactcgctggcagccattgtctgtgggcacctcatgtttttccacactctactgggccgtggaggtaacgatcacccaggccagtctcctctgcctgggatgcgccctctgagaggaggcctagcagggcaggctccctctgggcatccctggatgcagcctctggacacatgcctcctttaaagtgtccgggtgcagctcaggttgagtggaggtagaaggagaaacagacatgtttaccacgcgttttccaaagctcctgatctttcccaagattgtaactgaaaactgctgtctcttgttttgttcgttttgggggtggtggtgctggctgggccatgcttgtgaagtgatgtgtgtctctgatttaacggattcactgttttctctgctaattgagagagcgttatttacattatttatttgttttgacacaagtgctttcagtgttttatcctagctaatggcttcttaaaggtaataaaacccttccaacgtaattggtcagataaaactttttttcttgtatgcttaaataaagcaattagtgaagcacttctatccaaaatgacttttttgtccttttttaaaaccaatttactgttactggaaactttttgtacaataaagcaatcacgcagattaaagaacatcctgcaatcctagtattaattttaa

SEQ ID NO: 18444 - protein, 20 aa, Artificial Sequence
  derived and/or modified sequence
EWVQKYVSDLELSAWKKILK

SEQ ID NO: 18445 - protein, 93 aa, Artificial Sequence
  derived and/or modified sequence
MQVSTAALAVLLCTMALCNQVLSAPLAADTPTACCFSYTSRQIPQNFIADYFETSSQCSKPSVIFLTKRGRQVCADPSEEWVQKYVSDLELSA

SEQ ID NO: 18446 - protein, 47 aa, Artificial Sequence
  derived and/or modified sequence
MQVSTAALAVLLCTMALCNQVLSAPQAGRSVLTPVRSGSRNTSVTWS

SEQ ID NO: 18447 - protein, 52 aa, Artificial Sequence
  derived and/or modified sequence
MQVSTAALAVLLCTMALCNQVLSAPLSRPREAGRSVLTPVRSGSRNTSVTWS

SEQ ID NO: 18448 - protein, 68 aa, Artificial Sequence
  derived and/or modified sequence
MQVSTAALAVLLCTMALCNQVLSAPLAADTPTACCFSYTSRQIPQNFIADYFETSSQCSKPSVMAAPG

SEQ ID NO: 18449 - DNA, 207 bp, Artificial Sequence
  derived and/or modified sequence
atgcaggtgagcaccgccgccctggccgtgctgctgtgcaccatggccctttgtaaccaggtgctgagtgcgccgcttgctgctgatacacccaccgcctgctgtttcagctataccagtagacagattcctcagaacttcattgcagattacttcgagacttcttcccagtgctccaaaccttccgtgatggcagcccctgggtag

SEQ ID NO: 18450 - DNA, 282 bp, Artificial Sequence
  derived and/or modified sequence
atgcaggtgagcacggcagcacttgctgtgctcttgtgcacaatggccctgtgcaaccaggtattgtctgcccctctggccgctgataccccgacagcctgctgtttcagctatacttcaaggcagattccacagaacttcattgccgattactttgagacctctagtcaatgttccaaacctagtgtcatcttccttactaagagaggaagacaggtctgcgccgaccctagtgaagagtgggtccagaagtacgtgtccgaccttgagttgagcgcttag

SEQ ID NO: 18451 - DNA, 144 bp, Artificial Sequence
  derived and/or modified sequence
atgcaagtttcaactgctgctctggccgtcttactctgtaccatggctctgtgcaatcaggttctttccgccccacaggctgggaggagtgtgctcacgcctgtcagatccgggagccgaaataccagcgtgacctggagttag

SEQ ID NO: 18452 - DNA, 159 bp, Artificial Sequence
  derived and/or modified sequence
atgcaggtctcaacggccgctctcgccgtgctgttgtgtaccatggccctttgtaaccaggtgctctcagcccctttgagccgaccacgagaggcaggcaggagcgtgcttacacccgtgaggtctggctcacgaaatacctcagttacttggtcttag

SEQ ID NO: 18453 - DNA, 207 bp, Artificial Sequence
  derived and/or modified sequence
atgcaggtttcaactgcagctctcgccgtgctgctctgcacaatggccctgtgcaatcaggtgctgtctgctcctctggcggcagatacccccaccgcttgttgtttcagttacactagtcgccagataccccagaactttattgctgactatttcgaaacatcttctcagtgcagcaaacctagcgtgatggctgccccagggtag

SEQ ID NO: 18454 - DNA, 282 bp, Artificial Sequence
  derived and/or modified sequence
atgcaagtgtccacagccgctctcgcagttcttctgtgcactatggcactatgtaatcaggtcctgtctgcacccctggcagccgacactcctacagcatgctgcttttcctacacttcaaggcagattcctcagaactttatcgccgattacttcgagacttcttcacagtgttcaaaacccagtgtcatttttctcaccaagagagggcgacaggtttgtgccgatccttcagaagaatgggtgcagaaatacgtgtcagatctggaactcagcgcatag

SEQ ID NO: 18455 - DNA, 144 bp, Artificial Sequence
  derived and/or modified sequence
atgcaggtttctacagcagccctggcggtactgctttgcacgatggcattatgtaaccaggtcctgagcgctcctcaagccggccgttccgttctaacccctgtgcgctccgggtctcgtaatacatctgtgacatggtcctag

SEQ ID NO: 18456 - DNA, 159 bp, Artificial Sequence
  derived and/or modified sequence
atgcaagtgtcaacagccgctcttgccgtcctactctgtactatggcgctctgcaaccaggtactgtctgctcctttatctaggcctcgtgaagccggacgcagcgttctcactccagttcgaagcggcagcaggaatactagcgtgacctggtcgtag

SEQ ID NO: 18457 - DNA, 207 bp, Artificial Sequence
  derived and/or modified sequence
atgcaagtttcaaccgccgccctggccgtgcttctttgtaccatggccctgtgtaatcaggtactctcagctccccttgccgccgacacacctaccgcttgttgtttcagttacaccagtcggcagatcccacagaacttcatcgccgactacttcgaaacctcctcacagtgttccaagccttccgttatggccgccccaggttag

SEQ ID NO: 18458 - DNA, 289 bp, Artificial Sequence
  derived and/or modified sequence
agaaggacgcaggcagcaaagagtagtcagtcccttcttggctctgctgacactcgagcccacattccatcacctgctcccaatcatgcaggtctccactgctgcccttgccgtcctcctctgcaccatggctctctgcaaccaggtcctctctgcaccacttgctgctgacacgccgaccgcctgctgcttcagctacacctcccgacagattccacagaatttcatagctgactactttgagacgagcagccagtgctccaagcccagtgtcatggctgccccaggc

SEQ ID NO: 18459 - DNA, 282 bp, Artificial Sequence
  derived and/or modified sequence
atgcaggtgagcaccgccgccctggccgtgctgctgtgcaccatggccctgtgcaaccaggtgctgagcgcccccctggccgccgacacccccaccgcctgctgcttcagctacaccagcagacagatcccccagaacttcatcgccgactacttcgagaccagcagccagtgcagcaagcccagcgtgatcttcctgaccaagagaggcagacaggtgtgcgccgaccccagcgaggagtgggtgcagaagtacgtgagcgacctggagctgagcgcctag

SEQ ID NO: 18460 - DNA, 144 bp, Artificial Sequence
  derived and/or modified sequence
atgcaggtgagcaccgccgccctggccgtgctgctgtgcaccatggccctgtgcaaccaggtgctgagcgccccccaggccggcagaagcgtgctgacccccgtgagaagcggcagcagaaacaccagcgtgacctggagctag

SEQ ID NO: 18461 - DNA, 159 bp, Artificial Sequence
  derived and/or modified sequence
atgcaggtgagcaccgccgccctggccgtgctgctgtgcaccatggccctgtgcaaccaggtgctgagcgcccccctgagcagacccagagaggccggcagaagcgtgctgacccccgtgagaagcggcagcagaaacaccagcgtgacctggagctag

SEQ ID NO: 18462 - DNA, 207 bp, Artificial Sequence
  derived and/or modified sequence
atgcaggtgagcaccgccgccctggccgtgctgctgtgcaccatggccctgtgcaaccaggtgctgagcgcccccctggccgccgacacccccaccgcctgctgcttcagctacaccagcagacagatcccccagaacttcatcgccgactacttcgagaccagcagccagtgcagcaagcccagcgtgatggccgcccccggctag

SEQ ID NO: 18463 - DNA, 282 bp, Artificial Sequence
  derived and/or modified sequence
atgcaggtcagcacagcagccctggcagtgctgttatgtacgatggccttgtgcaatcaggttttatctgctccactggctgctgatactccaaccgcttgctgtttctcatatacatctcggcaaatcccacagaactttatagccgattatttcgagaccagttcccaatgtagtaagccttccgtgattttcttaacgaagagagggcgacaagtctgtgcggatcccagtgaggagtgggtgcagaaatatgtgtccgatttggagctgagcgcttag

SEQ ID NO: 18464 - DNA, 144 bp, Artificial Sequence
  derived and/or modified sequence
atgcaggtctcaactgccgcattggccgtgttactatgtacgatggccctttgtaaccaggtcctttccgccccacaggccggccggtcagttctcacccccgtgcgcagtggttcacgcaacacgagtgttacttggagctag

SEQ ID NO: 18465 - DNA, 159 bp, Artificial Sequence
  derived and/or modified sequence
atgcaggtgtctacagctgccttagctgtcctgctgtgtaccatggccctgtgtaaccaggtactctccgctccactgtcacggccgagggaagcaggacgttctgtactcacacccgtgaggagtgggtccaggaatactagcgtgacctggtcttag

SEQ ID NO: 18466 - DNA, 207 bp, Artificial Sequence
  derived and/or modified sequence
atgcaggtgagcaccgctgcattggcagtgctcctttgcacgatggctctttgtaatcaagtcttatcggctcccttggcagcagacactccgacagcgtgctgctttagctataccagccgtcaaattcctcaaaactttattgcagattattttgagacttctagtcagtgtagcaagccttccgtcatggctgcaccaggatag

SEQ ID NO: 18467 - DNA, 282 bp, Artificial Sequence
  derived and/or modified sequence
atgcaggtgtccacagctgccctggccgtgctgctgtgcaccatggccctgtgcaaccaggtgctgagcgcccccctggccgctgacacccccacagcctgctgcttctcctacaccagccggcagatcccccagaacttcatcgctgactactttgagaccagcagccagtgcagcaagcccagcgtcatcttcctgaccaagaggggccggcaggtgtgtgccgaccccagcgaggagtgggtgcagaagtatgtgtctgacctggagctgagcgcctag

SEQ ID NO: 18468 - DNA, 144 bp, Artificial Sequence
  derived and/or modified sequence
atgcaggtgtccacagctgccctggccgtgctgctgtgcaccatggccctgtgcaaccaggtgctgagcgccccccaggccggccgctctgtgctgacccctgtgcgcagcggcagcaggaacacctctgtgacctggagctag

SEQ ID NO: 18469 - DNA, 159 bp, Artificial Sequence
  derived and/or modified sequence
atgcaggtgtccacagctgccctggccgtgctgctgtgcaccatggccctgtgcaaccaggtgctgagcgcccccctgagccggccccgggaggccggccgctctgtgctgacccctgtgcgcagcggcagcaggaacacctctgtgacctggagctag

SEQ ID NO: 18470 - DNA, 207 bp, Artificial Sequence
  derived and/or modified sequence
atgcaggtgtccacagctgccctggccgtgctgctgtgcaccatggccctgtgcaaccaggtgctgagcgcccccctggccgctgacacccccacagcctgctgcttctcctacaccagccggcagatcccccagaacttcatcgctgactactttgagaccagcagccagtgcagcaagcccagcgtgatggccgcccctggatag

SEQ ID NO: 18471 - DNA, 780 bp, Artificial Sequence
  derived and/or modified sequence
gaaggacgcaggcagcaaagagtagtcagtcccttcttggctctgctgacactcgagcccacattccatcacctgctcccaatcatgcaggtctccactgctgcccttgccgtcctcctctgcaccatggctctctgcaaccaggtcctctctgcaccacttgctgctgacacgccgaccgcctgctgcttcagctacacctcccgacagattccacagaatttcatagctgactactttgagacgagcagccagtgctccaagcccagtgtcatcttcctaaccaagagaggccggcaggtctgtgctgaccccagtgaggagtgggtccagaaatacgtcagtgacctggagctgagtgcctgaggggtccagaagcttcgaggcccagcgacctcagtgggcccagtggggaggagcaggagcctgagccttgggaacatgcgtgtgacctccacagctacctcttctatggactggttattgccaaacagccacactgtgggactcttcttaacttaaattttaatttatttatactatttagtttttataatttatttttgatttcacagtgtgtttgtgattgtttgctctgagagttccccctgtcccctccaccttccctcacagtgtgtctggtgacaaccgagtggctgtcatcggcctgtgtaggcagtcatggcaccaaagccaccagactgacaaatgtgtatcagatgcttttgttcagggctgtgatcggcctggggaaataataaagatgttcttttaaacggt

SEQ ID NO: 18472 - DNA, 282 bp, Artificial Sequence
  derived and/or modified sequence
atgcaggtgagcaccgccgccctggccgtgctgctgtgcaccatggcattgtgcaaccaggtcctgagcgccccactcgcagctgatactcccaccgcatgctgttttagctatacttccagacaaatcccacagaacttcattgcagattactttgagaccagttctcagtgcagcaagcctagtgtgatctttctcacaaaacggggtaggcaagtgtgcgctgacccaagcgaggaatgggtgcagaaatatgtctcagacctggaactctcagcatag

SEQ ID NO: 18473 - DNA, 144 bp, Artificial Sequence
  derived and/or modified sequence
atgcaggtgagcaccgccgccctggccgtgctgctgtgcaccatggctctttgcaaccaggtgctgagtgcaccccaggccgggaggagtgtcctgacacccgtgagatccggcagtcgtaatacatcagttacctggagttag

SEQ ID NO: 18474 - DNA, 159 bp, Artificial Sequence
  derived and/or modified sequence
atgcaggtgagcaccgccgccctggccgtgctgctgtgcaccatggcgttgtgtaaccaagtcctgagcgctcccctttcacgcccccgcgaagccggccggagtgtgttgaccccagtccgaagcggtagtaggaacactagcgtgacttggagctag

SEQ ID NO: 18475 - DNA, 229 bp, Artificial Sequence
  derived and/or modified sequence
agaaggacgcaggcagcaaagagtagtcagtcccttcttggctctgctgacactcgagcccacattccatcacctgctcccaatcatgcaggtctccactgctgcccttgccgtcctcctctgcaccatggctctctgcaaccaggtcctctctgcaccacaggccggcaggtctgtgctgaccccagtgaggagtgggtccagaaatacgtcagtgacctggagctga

SEQ ID NO: 18476 - DNA, 244 bp, Artificial Sequence
  derived and/or modified sequence
agaaggacgcaggcagcaaagagtagtcagtcccttcttggctctgctgacactcgagcccacattccatcacctgctcccaatcatgcaggtctccactgctgcccttgccgtcctcctctgcaccatggctctctgcaaccaggtcctctctgcaccactctccagaccaagagaggccggcaggtctgtgctgaccccagtgaggagtgggtccagaaatacgtcagtgacctggagctga

SEQ ID NO: 18477 - DNA, 282 bp, Artificial Sequence
  derived and/or modified sequence
atgcaggtgagcaccgctgctctcgctgtgcttctttgcaccatggcgctgtgcaatcaagtgctgagtgccccacttgctgccgacaccccaactgcatgttgtttctcctacaccagtagacagattcctcagaatttcatagccgactattttgaaacttcgtcccagtgtagcaagccatctgtgatatttctgaccaaacgaggacggcaggtatgtgctgaccccagcgaggagtgggttcagaagtatgtctcagacctagaactctcagcctag

SEQ ID NO: 18478 - DNA, 159 bp, Artificial Sequence
  derived and/or modified sequence
atgcaagtgtcaaccgctgccctggctgttcttctatgcacgatggctttatgtaaccaggttctgagcgcgcctctctctaggccacgcgaagccggtcgaagcgtcctgactcccgtgcgttcaggttcacgcaacaccagtgtcacatggtcctag

SEQ ID NO: 18479 - DNA, 144 bp, Artificial Sequence
  derived and/or modified sequence
atgcaggtgtccaccgccgcgcttgcagtactgctgtgtacaatggccctgtgcaaccaggtccttagtgcgcctcaggccgggcgtagtgttctcacccctgttcgatctggttcgcggaacacgagcgtgacttggtcttag

SEQ ID NO: 18480 - DNA, 282 bp, Artificial Sequence
  derived and/or modified sequence
atgcaggtgagcaccgccgccctggccgtgctgctgtgcaccatggctctgtgtaatcaggtactgagcgcacctctggctgcggacacacctaccgcttgctgtttttcgtacaccagtagacaaatcccgcaaaacttcattgccgactacttcgagaccagctcccagtgtagtaagccctctgtgattttcctcactaagcgggggaggcaggtctgtgccgatccctccgaggaatgggtgcagaaatatgtatcagacctcgagctgtctgcatag

SEQ ID NO: 18481 - DNA, 159 bp, Artificial Sequence
  derived and/or modified sequence
atgcaggtgagcaccgccgccctggccgtgctgctgtgcaccatggctctttgcaaccaagtgctgtctgcaccattgtccaggcctagggaagccggcagatccgtgctcacccccgtccgcagcgggtctaggaacacaagtgtgacctggagctag

SEQ ID NO: 18482 - DNA, 144 bp, Artificial Sequence
  derived and/or modified sequence
atgcaggtgagcaccgccgccctggccgtgctgctgtgcaccatggcactgtgtaaccaggtgttgtccgccccacaggctggcaggagcgtgctgacccccgtaaggtccggaagcaggaatacgtcagtgacatggagctag

SEQ ID NO: 18483 - DNA, 282 bp, Artificial Sequence
  derived and/or modified sequence
atgcaggtttctactgcagcgttggccgtcctgctgtgcaccatggccctgtgcaaccaggttttgtccgcccctctggcggcagacacaccgacagcttgttgctttagttacacctctagacagataccccagaattttatcgccgactactttgagacatccagccagtgttcaaaacctagcgtaatctttctgaccaaaagagggcgacaagtgtgcgccgatcccagcgaagagtgggtccagaagtatgtgagcgaccttgaactgagcgcctag

SEQ ID NO: 18484 - DNA, 159 bp, Artificial Sequence
  derived and/or modified sequence
atgcaggtgagtaccgctgccctcgctgtccttctatgtactatggctttgtgtaatcaagtgttgagtgccccactctccaggccccgtgaggccggtcggagcgtacttacgcctgtccgatccgggtcaaggaatacctccgtgacatggagctag

SEQ ID NO: 18485 - DNA, 144 bp, Artificial Sequence
  derived and/or modified sequence
atgcaggtttctactgccgctctcgccgtgctcctctgcacgatggcgctctgtaatcaggttttatctgctcctcaggcagggagatcagtattaactcctgttcggagtgggtcccgaaacacctccgttacatggagctag

SEQ ID NO: 18486 - DNA, 772 bp, Artificial Sequence
  derived and/or modified sequence
gcagcaaagagtagtcagtcccttcttggctctgctgacactcgagcccacattccatcacctgctcccaatcatgcaggtctccactgctgcccttgccgtcctcctctgcaccatggctctctgcaaccaggtcctctctgcaccacttgctgctgacacgccgaccgcctgctgcttcagctacacctcccgacagattccacagaatttcatagctgactactttgagacgagcagccagtgctccaagcccagtgtcatcttcctaaccaagagaggccggcaggtctgtgctgaccccagtgaggagtgggtccagaaatacgtcagtgacctggagctgagtgcctgaggggtccagaagcttcgaggcccagcgacctcagtgggcccagtggggaggagcaggagcctgagccttgggaacatgcgtgtgacctctacagctacctcttctatggactggttattgccaaacagccacactgtgggactcttcttaacttaaattttaatttatttatactatttagtttttataatttatttttgatttcacagtgtgtttgtgattgtttgctctgagagttccccctgtcccctccaccttccctcacagtgtgtctggtgacaaccgagtggctgtcatcggcctgtgtaggcagtcatggcaccaaagccaccagactgacaaatgtgtatcagatgcttttgttcagggctgtgatcggcctggggaaataataaagatgttcttttaaacggtaaa

SEQ ID NO: 18487 - RNA, 282 nt, Artificial Sequence
  derived and/or modified sequence
augcaaguguccacagccgcucucgcaguucuucugugcacuauggcacuauguaaucagguccugucugcaccccuggcagccgacacuccuacagcaugcugcuuuuccuacacuucaaggcagauuccucagaacuuuaucgccgauuacuucgagacuucuucacaguguucaaaacccagugucauuuuucucaccaagagagggcgacagguuugugccgauccuucagaagaaugggugcagaaauacgugucagaucuggaacucagcgcauag

SEQ ID NO: 18488 - RNA, 144 nt, Artificial Sequence
  derived and/or modified sequence
augcagguuucuacagcagcccuggcgguacugcuuugcacgauggcauuauguaaccagguccugagcgcuccucaagccggccguuccguucuaaccccugugcgcuccgggucucguaauacaucugugacaugguccuag

SEQ ID NO: 18489 - RNA, 159 nt, Artificial Sequence
  derived and/or modified sequence
augcaagugucaacagccgcucuugccguccuacucuguacuauggcgcucugcaaccagguacugucugcuccuuuaucuaggccucgugaagccggacgcagcguucucacuccaguucgaagcggcagcaggaauacuagcgugaccuggucguag

SEQ ID NO: 18490 - RNA, 207 nt, Artificial Sequence
  derived and/or modified sequence
augcaaguuucaaccgccgcccuggccgugcuucuuuguaccauggcccuguguaaucagguacucucagcuccccuugccgccgacacaccuaccgcuuguuguuucaguuacaccagucggcagaucccacagaacuucaucgccgacuacuucgaaaccuccucacaguguuccaagccuuccguuauggccgccccagguuag

SEQ ID NO: 18491 - protein, 732 aa, Artificial Sequence
  derived and/or modified sequence
MTEGTCLRRRGGPYKTEPATDLGRWRLNCERGRQTWTYLQDERAGREQTGLEAYALGLDTKNYFKDLPKAHTAFEGALNGMTFYVGLQAEDGHWTGDYGGPLFLLPGLLITCHVARIPLPAGYREEIVRYLRSVQLPDGGWGLHIEDKSTVFGTALNYVSLRILGVGPDDPDLVRARNILHKKGGAVAIPSWGKFWLAVLNVYSWEGLNTLFPEMWLFPDWAPAHPSTLWCHCRQVYLPMSYCYAVRLSAAEDPLVQSLRQELYVEDFASIDWLAQRNNVAPDELYTPHSWLLRVVYALLNLYEHHHSAHLRQRAVQKLYEHIVADDRFTKSISIGPISKTINMLVRWYVDGPASTAFQEHVSRIPDYLWMGLDGMKMQGTNGSQIWDTAFAIQALLEAGGHHRPEFSSCLQKAHEFLRLSQVPDNPPDYQKYYRQMRKGGFSFSTLDCGWIVSDCTAEALKAVLLLQEKCPHVTEHIPRERLCDAVAVLLNMRNPDGGFATYETKRGGHLLELLNPSEVFGDIMIDYTYVECTSAVMQALKYFHKRFPEHRAAEIRETLTQGLEFCRRQQRADGSWEGSWGVCFTYGTWFGLEAFACMGQTYRDGTACAEVSRACDFLLSRQMADGGWGEDFESCEERRYLQSAQSQIHNTCWAMMGLMAVRHPDIEAQERGVRCLLEKQLPNGDWPQENIAGVFNKSCAISYTSYRNIFPIWALGRFSQLYPERALAGHP

SEQ ID NO: 18492 - DNA, 2199 bp, Artificial Sequence
  derived and/or modified sequence
atgactgaaggcacatgcttgcggagacggggagggccatataaaacagagccagcaaccgacctcggaaggtggaggctcaattgtgagcggggccggcaaacgtggacgtacctgcaggatgaacgggccggaagggagcagactggcctggaagcctacgcccttggcctggacaccaaaaactattttaaggatctaccgaaagcacatacggctttcgaaggcgctttaaacggcatgactttctacgtgggtctccaggccgaggacggccactggacaggcgactatggtggccccctgttccttttgcctgggctactcattacctgccacgttgctcgcattcctttgcccgccggttaccgcgaagaaatcgttagatatttaagaagtgttcagctgcccgacgggggatggggtctgcatatcgaggacaagagcactgtcttcgggaccgcgttgaattacgtcagtctaagaatactgggagtcggcccggacgacccagacctcgtgcgggcgagaaacattctacacaaaaaaggaggcgctgttgcaataccatcttggggaaagttctggttggccgtgctgaacgtttatagctgggagggtctgaacactctttttcccgagatgtggttatttcctgactgggcgccggcacacccttcaacgctttggtgtcactgtcgccaggtgtacctgccaatgagttattgctacgccgtgagattgtctgccgctgaagatccgttggtacagtcacttaggcaggaactgtatgtagaagacttcgccagcatcgattggctggctcagcgcaataatgtcgcacccgatgaactctacactcctcatagctggctactgcgagtcgtctatgccctgctgaacctgtacgaacatcaccactcggcacacctcaggcagcgagcagtgcagaagctttacgagcacatcgtggccgacgatcgtttcaccaaatccatttccattggacccatatcaaagaccataaacatgctggtcagatggtacgttgacggaccagcctccacagcatttcaggaacacgtgtccagaattccggactacttgtggatgggattggacgggatgaaaatgcaggggaccaatggctcccagatttgggacacagcctttgcaatacaggctctgctcgaggccggcgggcatcaccgacccgagttcagttcttgcctccagaaagcacatgagttcctccgtctctcacaggtccctgacaacccgccagactaccaaaaatactaccggcagatgaggaaaggggggttttctttctcaaccctcgattgtggctggatcgtatccgactgcaccgcagaggcattgaaggcagtcctcctcctgcaagaaaaatgcccacacgttacagagcatatccctagagaaaggttgtgtgatgcagtcgccgtgttgcttaatatgagaaatcccgatggtggcttcgctacatacgaaactaagagggggggccacctgctggaacttctgaatccgtctgaggtgttcggggacattatgatcgattatacttacgtggagtgtacctccgcagtaatgcaagcactaaaatacttccacaaacggttcccagaacatagggccgcagagatcagggaaaccctgacgcagggactcgagttctgccgacgtcagcagagagccgatggctcttgggagggctcttggggggtatgttttacctatggaacgtggtttggccttgaagcctttgcctgtatggggcagacttatcgcgacggtaccgcttgcgcagaggtgtccagggcctgtgattttttactctctcgccagatggctgacggggggtggggggaggatttcgagtcttgcgaggagcgccggtacctccagtctgcacagtctcagattcataacacatgctgggccatgatgggcttgatggctgtgcgccacccggacattgaagcacaggagaggggtgtccgctgcttgcttgaaaagcagctgcctaatggggattggccgcaggagaatatagccggcgtatttaacaaatcatgtgcaatcagttatacctcttacagaaacatctttccaatctgggcgcttggccgttttagccagctttatcccgagcgcgctctcgctggccacccctag

SEQ ID NO: 18493 - DNA, 2199 bp, Artificial Sequence
  derived and/or modified sequence
atgactgaagggacctgcctcaggagaagggggggcccctacaagacagagcctgccactgatctggggcggtggcggctgaattgcgagagaggtcgccaaacctggacatacctccaggacgaaagggcgggacgagagcagactggtctggaggcttacgctctgggcttggacacgaagaattacttcaaagatctgcccaaagcacacacagcgttcgaaggagcccttaatgggatgaccttttatgttggactgcaggctgaggacgggcactggacaggtgactacggcgggcctctttttctgctgcccggcttgctgatcacatgccacgttgctcggattccactccccgccggttacagggaggaaattgtgcgatacctgcgctcggttcagctgcctgatggaggatggggcctgcatatcgaggataagtccactgtgttcggcacagccttgaactatgtgagtttgcgcatcctgggtgtagggcccgacgatcccgatctagtccgggcgcggaatatcctgcacaaaaaaggcggagccgtcgccattccttcatgggggaaattttggcttgccgttctgaatgtatactcttgggaaggactgaatacgttgtttcccgagatgtggctcttccccgattgggcaccagctcacccctcaactctctggtgccattgtcgccaggtgtatctgccaatgtcttactgttacgctgttcggctgagcgcagctgaagatccgcttgtgcagtcactgagacaggaactatacgtcgaggacttcgcttcaatcgattggctggctcagcgcaataacgtggcccccgatgagctgtacacaccccacagttggctgctgcgcgtcgtttacgctcttttgaacctttacgagcaccaccatagtgcacacctgaggcagagagccgtgcagaaactttatgagcacatcgttgccgacgataggtttaccaaatccatctctatcggccctatctctaagactatcaacatgctggtccggtggtacgtggatggccctgcctctaccgcctttcaggagcatgtatctcgaatcccagactacctgtggatgggactggacggcatgaaaatgcaaggcaccaatgggtcccagatatgggatactgcgtttgctatccaagctcttctggaggcaggggggcaccatagacctgagttcagtagctgtctgcagaaagcgcatgagtttctcaggctctctcaggtgcccgacaatcctcctgattaccaaaaatattaccgtcagatgaggaaggggggcttcagctttagcacactagactgcggttggatcgtgtctgactgcacagcagaagccctgaaagccgttctccttctgcaggagaaatgcccccatgtcacagagcatatcccacgggaaaggctatgcgacgctgtggcagtgctcttgaatatgaggaaccccgatggaggcttcgctacgtacgaaaccaagcgcggaggccacttactggagttgctgaatccaagtgaggtgtttggcgatattatgatcgactacacgtacgtggaatgcacatctgccgtgatgcaggctctgaaatatttccataaaagatttcccgaacaccgggcagccgagatacgggagaccttaacgcagggactggaattttgtcgcaggcagcagagagccgacggatcctgggagggtagctggggggtctgcttcacctatggcacgtggtttggactggaagcttttgcctgcatgggccagacctatcgcgacgggacagcctgtgccgaggtttctcgagcgtgtgattttctgttgtcccggcaaatggctgacggggggtggggagaggacttcgaaagctgcgaagaaagaagatacttgcagtcggcgcagtctcagattcataacacttgttgggctatgatgggcttaatggctgttaggcaccccgacatcgaagcccaggagcgcggcgtccggtgcctgctggagaaacagctgcctaacggcgattggcctcaggagaatatcgccggagtgtttaataaatcatgcgctatctcatacacctcatatagaaacatattccctatctgggccttaggtcggttttctcagctctaccctgaacgggcactggcgggccatccgtag

SEQ ID NO: 18494 - DNA, 1959 bp, Artificial Sequence
  derived and/or modified sequence
atgaccttttatgtgggtctacaggctgaagatggccactggaccggagattacgggggacccctgttcctgctgcctggcctcctcatcacctgccatgtagcccgcatcccgctcccagcggggtacagagaagaaatagtaagatacctccgcagcgttcagctgcctgatggaggctggggtctgcatatcgaggacaagagtacagtcttcgggaccgctctcaactacgtctcccttaggatccttggggtcgggccagacgaccccgacctcgtaagagcgagaaacatccttcacaagaaaggcggagccgttgccatcccatcctgggggaaattttggctggccgtgcttaacgtttactcttgggaaggtctgaacaccctttttccggagatgtggctgttccccgactgggccccagctcacccctccactctttggtgccactgtagacaggtttacctgcccatgagttactgctacgctgtcagactgtcggcagctgaggatccgctggtccagtcccttcgtcaggaactttacgtggaagatttcgcatccatcgactggctcgctcagcgcaacaatgtggcccccgatgaactctatacacctcattcatggttattacgagtggtctatgcactacttaatctgtacgagcaccaccattccgcacatctgcgacagagagctgtgcagaaactctatgagcatattgttgcagacgatcggtttactaaaagtattagcatcggcccaatctcaaaaacaataaatatgcttgtgaggtggtatgttgatgggccggcctccaccgctttccaggagcacgtcagccgaattcctgactacctctggatgggactcgacggaatgaagatgcagggaacaaacggtagtcaaatatgggacactgccttcgcaatccaagctctgctagaagcagggggccaccatcgacctgagttttctagctgcctgcagaaagcccatgagtttttaagattgagtcaggtcccggataaccccccggactatcagaagtactacaggcagatgcgaaaaggcggtttttctttttcaaccctcgactgtggctggatcgtatcagactgtaccgctgaggctctgaaggccgtgctgctgctccaggagaagtgtccccacgtgacggaacatatcccccgggagagactttgcgacgccgttgccgtgctgctgaacatgcgcaaccctgacggcggctttgcaacatatgagactaagcggggcggccatctgctggaattgctcaatccctcggaagtgtttggggatatcatgatcgattacacgtacgtcgagtgtacatctgcagtcatgcaggcccttaagtactttcataagcgttttccggaacaccgggcggccgagattagggaaaccctaactcaaggtctagagttttgccgcaggcagcaacgtgccgacggatcatgggagggaagctggggcgtgtgtttcacatacggcacatggttcgggttggaggctttcgcctgtatgggacaaacgtatcgggacggcaccgcgtgcgcagaggtgtctcgagcctgtgatttcctgctgagccggcagatggccgacggtggctggggggaggatttcgaaagttgtgaagagcgtagatacctccagagcgcacagtcacaaatccataatacttgttgggccatgatggggttgatggccgtgcgtcatccagacattgaggcgcaggagcggggtgttcggtgtttgctggaaaagcagctcccaaatggagactggcctcaggagaatatcgccggagtgttcaataagtcatgcgccatctcgtatacaagctatcggaatattttccccatttgggctctgggtcgctttagccagctctatcccgagcgcgccctcgccggtcatccctag

SEQ ID NO: 18495 - DNA, 2690 bp, Artificial Sequence
  derived and/or modified sequence
gggcggggctgggcggcaggtcccgggtgcggacatctggcagctggcagtgggcggcgtagagcactgcagcagcaatgacggagggcacgtgtctgcggcgccgagggggcccctacaagaccgagcccgccaccgacctcggccgctggcgactcaactgcgagaggggccggcagacgtggacctacctgcaggacgagcgcgccggccgcgagcagaccggcctggaagcctacgccctggggctggacaccaagaattactttaaggacttgcccaaagcccacaccgcctttgagggggctctgaacgggatgacattttacgtggggctgcaggctgaggatgggcactggacgggtgattatggtggcccacttttcctcctgccaggcctcctgatcacttgccacgtggcacgcatccctctgccagccggatacagagaagagattgtgcggtacctgcggtcagtgcagctccctgacggtggctggggcctgcacattgaggataagtccaccgtgtttgggactgcgctcaactatgtgtctctcagaattctgggtgttgggcctgacgatcctgacctggtacgagcccggaacattcttcacaagaaaggtggtgctgtggccatcccctcctgggggaagttctggctggctgtcctgaatgtttacagctgggaaggcctcaataccctgttcccagagatgtggctgtttcctgactgggcaccggcacacccctccacactctggtgccactgccggcaggtgtacctgcccatgagctactgctacgccgttcggctgagtgccgcggaagacccgctggtccagagcctccgccaggagctctatgtggaggacttcgccagcattgactggctggcgcagaggaacaacgtggcccccgacgagctgtacacgccgcacagctggctgctccgcgtggtatatgcgctcctcaacctgtatgagcaccaccacagtgcccacctgcggcagcgggccgtgcagaagctgtatgaacacattgtggccgacgaccgattcaccaagagcatcagcatcggcccgatctcgaaaaccatcaacatgcttgtgcgctggtatgtggacgggcccgcctccactgccttccaggagcatgtctccagaatcccggactatctctggatgggccttgacggcatgaaaatgcagggcaccaacggctcacagatctgggacaccgcattcgccatccaggctctgcttgaggcgggcgggcaccacaggcccgagttttcgtcctgcctgcagaaggctcatgagttcctgaggctctcacaggtcccagataaccctcccgactaccagaagtactaccgccagatgcgcaagggtggcttctccttcagtacgctggactgcggctggatcgtttctgactgcacggctgaggccttgaaggctgtgctgctcctgcaggagaagtgtccccatgtcaccgagcacatccccagagaacggctctgcgatgctgtggctgtgctgctgaacatgagaaatccagatggagggttcgccacctatgagaccaagcgtggggggcacttgctggagctgctgaacccctcggaggtcttcggggacatcatgattgactacacctatgtggagtgcacctcagccgtgatgcaggcgcttaagtatttccacaagcgtttcccggagcacagggcagcggagatccgggagaccctcacgcagggcttagagttctgtcggcggcagcagagggccgatggctcctgggaaggctcctggggagtttgcttcacctacggcacctggtttggcctggaggccttcgcctgtatggggcagacctaccgagatgggactgcctgtgcagaggtctcccgggcctgtgacttcctgctgtcccggcagatggcagacggaggctggggggaggactttgagtcctgcgaggagcggcgttatttgcagagtgcccagtcccagatccataacacatgctgggccatgatggggctgatggccgttcggcatcctgacatcgaggcccaggagagaggagtccggtgtctacttgagaaacagctccccaatggcgactggccgcaggaaaacattgctggggtcttcaacaagtcctgtgccatctcctacacgagctacaggaacatcttccccatctgggccctcggccgcttctcccagctgtaccctgagagagcccttgctggccacccctgagaacatgcctacctgctgggtgccgtctgtgcgttccatggccttcaagtcacaggacgcagcgattccctgccctcttcggtgttattacacaggcaggacttcagtgtcagtatccctgccttcagtcttctttagaaatcacatctgtgttcaatccattgtttagagggagtgtatttttcctgttccacgaagaggactttttgttcacaattggatcacaatgcagaggagtctgttcctcccccgtcggcttctcggtgctgggagggtgacctgtcccagatgactcatcaccctgacatgctcttgacaaaggacaccaccaagaggagatggcagctgtaccggtgcagcctctgtctgagggggatatttgcctcagtgtgattaaaaatcagtcatgaaaga

SEQ ID NO: 18496 - DNA, 4255 bp, Artificial Sequence
  derived and/or modified sequence
gggcggggctgggcggcaggtcccgggtgcggacatctggcagctggcagtgggcggcgtagagcactgcagcagcaatgacggagggcacgtgtctgcggcgccgagggggcccctacaagaccgagcccgccaccgacctcggccgctggcgactcaactgcgagaggggccggcagacgtggacctacctgcaggacgagcgcgccggccgcgagcagaccggcctggaagcctacgccctggggctggacaccaagaattactttaaggacttgcccaaagcccacaccgcctttgagggggctctgaacgggatgacattttacgtggggctgcaggctgaggatgggcactggacgggtgattatggtggcccacttttcctcctgccaggcctcctgatcacttgccacgtggcacgcatccctctgccagccggatacagagaagagattgtgcggtacctgcggtcagtgcagctccctgacggtggctggggcctgcacattgaggataagtccaccgtgtttgggactgcgctcaactatgtgtctctcagaattctgggtgttgggcctgacgatcctgacctggtacgagcccggaacattcttcacaagaaaggtggtgctgtggccatcccctcctgggggaagttctggctggctgtcctgaatgtttacagctgggaaggcctcaataccctgttcccagagatgtggctgtttcctgactgggcaccggcacacccctccacactctggtgccactgccggcaggtgtacctgcccatgagctactgctacgccgttcggctgagtgccgcggaagacccgctggtccagagcctccgccaggagctctatgtggaggacttcgccagcattgactggctggcgcagaggaacaacgtggcccccgacgagctgtacacgccgcacagctggctgctccgcgtggtatatgcgctcctcaacctgtatgagcaccaccacagtgcccacctgcggcagcgggccgtgcagaagctgtatgaacacattgtggccgacgaccgattcaccaagagcatcagcatcggcccgatctcgaaaaccatcaacatgcttgtgcgctggtatgtggacgggcccgcctccactgccttccaggagcatgtctccagaatcccggactatctctggatgggccttgacggcatgaaaatgcagggcaccaacggctcacagatctgggacaccgcattcgccatccaggctctgcttgaggcgggcgggcaccacaggcccgagttttcgtcctgcctgcagaaggctcatgagttcctgaggctctcacaggtcccagataaccctcccgactaccagaagtactaccgccagatgcgcaagggtggcttctccttcagtacgctggactgcggctggatcgtttctgactgcacggctgaggccttgaaggctgtgctgctcctgcaggagaagtgtccccatgtcaccgagcacatccccagagaacggctctgcgatgctgtggctgtgctgctgaacatgagaaatccagatggagggttcgccacctatgagaccaagcgtggggggcacttgctggagctgctgaacccctcggaggtcttcggggacatcatgattgactacacctatgtggagtgcacctcagccgtgatgcaggcgcttaagtatttccacaagcgtttcccggagcacagggcagcggagatccgggagaccctcacgcagggcttagagttctgtcggcggcagcagagggccgatggctcctgggaaggctcctggggagtttgcttcacctacggcacctggtttggcctggaggccttcgcctgtatggggcagacctaccgagatgggactgcctgtgcagaggtctcccgggcctgtgacttcctgctgtcccggcagatggcagacggaggctggggggaggactttgagtcctgcgaggagcggcgttatttgcagagtgcccagtcccagatccataacacatgctgggccatgatggggctgatggccgttcggcatcctgacatcgaggcccaggagagaggagtccggtgtctacttgagaaacagctccccaatggcgactggccgcaggaaaacattgctggggtcttcaacaagtcctgtgccatctcctacacgagctacaggaacatcttccccatctgggccctcggccgcttctcccagctgtaccctgagagagcccttgctggccacccctgagaacatgcctacctgctgggtgccgtctgtgcgttccagtgaggccaaggggtcctggccgggttggggagccctcccataaccctgtcttgggctccaacccctcaacctctatctcatagatgtgaatctgggggccaggctggaggcagggatggggacagggtgggtggcttagactcttgatttttactgtaggttcatttctgaaagtagcttgtcgggcttgggtgaggaagggggcacaggagccgtgacccctgaggaggcacagcgccttctgccacctctgggcacggcctcaaggtagtgaggctaggaggttttttctgaccaatagctgagttcttgggagaggagcagctgtgcctgtgtgattccttagtgtcgagtgggctctgggctggggtcggccctgggcaggcttctcctgcaccttttgtctgctgggctgagggacacgagggcaaccctgtgacaatggcaggtagtgtgcatccgtgaatagcccagtgcgggggttgctcatggagcatcctgaggccgtgcagcagggagccccatgcccctgggtcgtgagcttgcctgcgtatggggtggtgtcatggagcctcatgcccctgggtcgtgagctcgcctgagtatggggtggtgtcatggagccgcatacccctgggttgtgagctcgcctgcatatgcagggtctgtcatggaacatcccaagtctgtgcagcagggagccccatgcccctgggacatgaacccacctgcgtggaatgctgtttgtgaggtgtctacagggtttatagtagtcttgtggacacagaaatgcacaggggacacttacggacacagaaatgcacaggggaggccgagcataaccaggggtgaggggcaggcagcagttgtagttactgccgcggggcactgctatgtgcagggacagccagcacccagcccatcaccactccctgggctggctggcaggtatggcaccctgggagcccggcatatacccagggcacccctacggctgccgccagtctcatgcccaggtgggtgctctgggctggagcgagggccaggttttgggccgaggcttccccaggcaatcctgtgagctcccttctagcctctgacccagtctggtctggcttgcatggatgtagggcttggggtgggaagttcaggtcctggctttgcctttgcctgatgtggatgagcagctcacatgctcagggccacctgagactgtcactgctctcccctggctactgggaggagtcactgagagcttcgttacccctgctgccttgcccagggcacaccctatacctccttatctgctcttcccctccctgccgccttctgggcaggtagcagtccctggcctctccccctggctgatcactctccctcaggcagtggagatctgcgtctggacaccctcagatcctgtcattgcctgcccagagtccttcaggggcacccctctgccttggtgtgcagtccagggctctcacccaggtgccgcaccctctggggtcttctgtccagctcccttgccccatgtgctgtcactgactctccttgggactcgcctgcctgctcagagccctgcagggcttggtcagctgcctgttcagtgtcaacacttccctgcacatcttaaaactgggctttattttcgctgaaggaactgtgttgggacccttgacatctgtcaggtttgcacatgctgtttttttttctcagcccacgtgttctcccccacgtggggtagcagcaggacagacagtgaatcacagagtctgccctgagcagaggctgctgtccctgggactcctagccatggtcagactgtacaaaacggttttccagaaatgaaatgtaaatccatttttatactgaaaatgttactgaaagtcacttttatgagcatctgccttaataaacagacattgattcccttatcagaa

SEQ ID NO: 18497 - DNA, 4390 bp, Artificial Sequence
  derived and/or modified sequence
aggggcggggctgggcggcaggtcccgggtgcggacatctggcagctggcagtgggcggcgtagagcactgcagcagcaatgacggagggcacgtgagtcccctcgccccgggctcctgacgaatgcggggtggtcctaggtgctgaggagagcgcgactggggcagtgggccggcggccggcgttggggcggggcctgggtcgctgatggccggtggtcctcaggtgtctgcggcgccgagggggcccctacaagaccgagcccgccaccgacctcggccgctggcgactcaactgcgagaggggccggcagacgtggacctacctgcaggacgagcgcgccggccgcgagcagaccggcctggaagcctacgccctggggctggacaccaagaattactttaaggacttgcccaaagcccacaccgcctttgagggggctctgaacgggatgacattttacgtggggctgcaggctgaggatgggcactggacgggtgattatggtggcccacttttcctcctgccaggcctcctgatcacttgccacgtggcacgcatccctctgccagccggatacagagaagagattgtgcggtacctgcggtcagtgcagctccctgacggtggctggggcctgcacattgaggataagtccaccgtgtttgggactgcgctcaactatgtgtctctcagaattctgggtgttgggcctgacgatcctgacctggtacgagcccggaacattcttcacaagaaaggtggtgctgtggccatcccctcctgggggaagttctggctggctgtcctgaatgtttacagctgggaaggcctcaataccctgttcccagagatgtggctgtttcctgactgggcaccggcacacccctccacactctggtgccactgccggcaggtgtacctgcccatgagctactgctacgccgttcggctgagtgccgcggaagacccgctggtccagagcctccgccaggagctctatgtggaggacttcgccagcattgactggctggcgcagaggaacaacgtggcccccgacgagctgtacacgccgcacagctggctgctccgcgtggtatatgcgctcctcaacctgtatgagcaccaccacagtgcccacctgcggcagcgggccgtgcagaagctgtatgaacacattgtggccgacgaccgattcaccaagagcatcagcatcggcccgatctcgaaaaccatcaacatgcttgtgcgctggtatgtggacgggcccgcctccactgccttccaggagcatgtctccagaatcccggactatctctggatgggccttgacggcatgaaaatgcagggcaccaacggctcacagatctgggacaccgcattcgccatccaggctctgcttgaggcgggcgggcaccacaggcccgagttttcgtcctgcctgcagaaggctcatgagttcctgaggctctcacaggtcccagataaccctcccgactaccagaagtactaccgccagatgcgcaagggtggcttctccttcagtacgctggactgcggctggatcgtttctgactgcacggctgaggccttgaaggctgtgctgctcctgcaggagaagtgtccccatgtcaccgagcacatccccagagaacggctctgcgatgctgtggctgtgctgctgaacatgagaaatccagatggagggttcgccacctatgagaccaagcgtggggggcacttgctggagctgctgaacccctcggaggtcttcggggacatcatgattgactacacctatgtggagtgcacctcagccgtgatgcaggcgcttaagtatttccacaagcgtttcccggagcacagggcagcggagatccgggagaccctcacgcagggcttagagttctgtcggcggcagcagagggccgatggctcctgggaaggctcctggggagtttgcttcacctacggcacctggtttggcctggaggccttcgcctgtatggggcagacctaccgagatgggactgcctgtgcagaggtctcccgggcctgtgacttcctgctgtcccggcagatggcagacggaggctggggggaggactttgagtcctgcgaggagcggcgttatttgcagagtgcccagtcccagatccataacacatgctgggccatgatggggctgatggccgttcggcatcctgacatcgaggcccaggagagaggagtccggtgtctacttgagaaacagctccccaatggcgactggccgcaggaaaacattgctggggtcttcaacaagtcctgtgccatctcctacacgagctacaggaacatcttccccatctgggccctcggccgcttctcccagctgtaccctgagagagcccttgctggccacccctgagaacatgcctacctgctgggtgccgtctgtgcgttccagtgaggccaaggggtcctggccgggttggggagccctcccataaccctgtcttgggctccaacccctcaacctctatctcatagatgtgaatctgggggccaggctggaggcagggatggggacagggtgggtggcttagactcttgatttttactgtaggttcatttctgaaagtagcttgtcgggcttgggtgaggaagggggcacaggagccgtgacccctgaggaggcacagcgccttctgccacctctgggcacggcctcaaggtagtgaggctaggaggttttttctgaccaatagctgagttcttgggagaggagcagctgtgcctgtgtgattccttagtgtcgagtgggctctgggctggggtcggccctgggcaggcttctcctgcaccttttgtctgctgggctgagggacacgagggcaaccctgtgacaatggcaggtagtgtgcatccgtgaatagcccagtgcgggggttgctcatggagcatcctgaggccgtgcagcagggagccccatgcccctgggtcgtgagcttgcctgcgtatggggtggtgtcatggagcctcatgcccctgggtcgtgagctcgcctgagtatggggtggtgtcatggagccgcatacccctgggttgtgagctcgcctgcatatgcagggtctgtcatggaacatcccaagtctgtgcagcagggagccccatgcccctgggacatgaacccacctgcgtggaatgctgtttgtgaggtgtctacagggtttatagtagtcttgtggacacagaaatgcacaggggacacttacggacacagaaatgcacaggggaggccgagcataaccaggggtgaggggcaggcagcagttgtagttactgccgcggggcactgctatgtgcagggacagccagcacccagcccatcaccactccctgggctggctggcaggtatggcaccctgggagcccggcatatacccagggcacccctacggctgccgccagtctcatgcccaggtgggtgctctgggctggagcgagggccaggttttgggccgaggcttccccaggcaatcctgtgagctcccttctagcctctgacccagtctggtctggcttgcatggatgtagggcttggggtgggaagttcaggtcctggctttgcctttgcctgatgtggatgagcagctcacatgctcagggccacctgagactgtcactgctctcccctggctactgggaggagtcactgagagcttcgttacccctgctgccttgcccagggcacaccctatacctccttatctgctcttcccctccctgccgccttctgggcaggtagcagtccctggcctctccccctggctgatcactctccctcaggcagtggagatctgcgtctggacaccctcagatcctgtcattgcctgcccagagtccttcaggggcacccctctgccttggtgtgcagtccagggctctcacccaggtgccgcaccctctggggtcttctgtccagctcccttgccccatgtgctgtcactgactctccttgggactcgcctgcctgctcagagccctgcagggcttggtcagctgcctgttcagtgtcaacacttccctgcacatcttaaaactgggctttattttcgctgaaggaactgtgttgggacccttgacatctgtcaggtttgcacatgctgtttttttttctcagcccacgtgttctcccccacgtggggtagcagcaggacagacagtgaatcacagagtctgccctgagcagaggctgctgtccctgggactcctagccatggtcagactgtacaaaacggttttccagaaatgaaatgtaaatccatttttatactgaaaatgttactgaaagtcacttttatgagcatctgccttaataaacagacattgattcccttatcagaag

SEQ ID NO: 18498 - DNA, 2199 bp, Artificial Sequence
  derived and/or modified sequence
atgacagagggcacctgcctgcggaggagaggaggcccctacaagacagagcccgccacagacctgggccgctggaggctgaactgtgagcggggccggcagacctggacctacctgcaggatgagcgggccggccgggagcagacaggcctggaggcctatgccctgggcctggacaccaagaactacttcaaggacctgcccaaggcccacacagcctttgagggcgccctgaatggcatgaccttctacgtgggcctgcaggccgaggatggccactggacaggagactatggaggccccctcttcctgctgcccggcctgctgatcacctgccacgtggcccgcatccccctgcctgctggctaccgggaggagatcgtgcgctacctgcggtctgtgcagctgcctgatggcggctggggcctgcacatcgaggacaagagcacagtgtttggaacagccctgaactacgtgtccctgcgcatcctgggcgtgggcccagatgatcctgacctggtgcgggccaggaacatcctgcacaagaagggcggcgctgtggccatccccagctggggcaagttctggctggccgtgctgaatgtgtacagctgggagggcctgaacaccctcttccctgagatgtggctgttcccagactgggccccagcccaccccagcaccctgtggtgccactgccggcaggtgtacctgcccatgagctactgctatgctgtgcggctgtctgctgctgaggaccccctggtgcagagcctgcggcaggagctgtatgtggaggactttgccagcattgactggctggcccagagaaataatgtggccccagatgagctgtacaccccccacagctggctgctgcgggtggtgtatgccctgctgaacctgtatgagcaccaccacagcgcccacctgcggcagagagctgtgcagaagctgtatgagcacatcgtggctgatgaccgcttcaccaagagcatcagcatcggccccatcagcaagaccatcaacatgctggtgcgctggtacgtggatggccctgccagcacagccttccaggagcacgtgagccgcatcccagactacctgtggatgggcctggatggcatgaagatgcagggcaccaacggcagccagatctgggacacagcctttgccatccaggccctgctggaggccggcggccaccacaggcctgagttcagcagctgcctgcagaaggcccacgagttcctgcggctgagccaggtgcctgacaaccccccagactaccagaagtactaccggcagatgaggaaaggaggcttctccttcagcaccctggactgtggctggatcgtgtctgactgcacagctgaggccctgaaggctgtgctgctgctgcaggagaagtgcccccacgtgacagagcacatcccccgggagcggctgtgtgatgctgtggccgtgctgctgaacatgaggaacccagatggcggctttgccacctatgagaccaagaggggcggccacctgctggagctgctgaaccccagcgaggtgtttggagacatcatgattgactacacctacgtggagtgcaccagcgctgtgatgcaggccctgaagtacttccacaagcgcttccctgagcacagagctgctgagatccgggagaccctgacccagggcctggagttctgccggcggcagcagagagcagatggctcctgggagggctcctggggcgtgtgcttcacctacggcacctggtttggcctggaggcctttgcctgcatgggccagacctacagagatggaacagcctgtgccgaggtgtcccgggcctgtgacttcctgctgagccggcagatggctgatggcggctggggagaagattttgagagctgtgaggagcggcgctacctgcagagcgcccagagccagatccacaacacctgctgggccatgatgggcctgatggctgtgcgccacccagacatcgaggcccaggagcggggcgtgcgctgcctgctggagaagcagctgcccaacggggactggccccaggagaacattgctggggtcttcaacaagagctgtgccatctcctacaccagctacagaaacatcttccccatctgggccctgggccgcttcagccagctgtacccagagcgggccctggccggccacccctag

SEQ ID NO: 18499 - DNA, 1959 bp, Artificial Sequence
  derived and/or modified sequence
atgaccttctacgtgggcctgcaggccgaggatggccactggacaggagactatggaggccccctcttcctgctgcccggcctgctgatcacctgccacgtggcccgcatccccctgcctgctggctaccgggaggagatcgtgcgctacctgcggtctgtgcagctgcctgatggcggctggggcctgcacatcgaggacaagagcacagtgtttggaacagccctgaactacgtgtccctgcgcatcctgggcgtgggcccagatgatcctgacctggtgcgggccaggaacatcctgcacaagaagggcggcgctgtggccatccccagctggggcaagttctggctggccgtgctgaatgtgtacagctgggagggcctgaacaccctcttccctgagatgtggctgttcccagactgggccccagcccaccccagcaccctgtggtgccactgccggcaggtgtacctgcccatgagctactgctatgctgtgcggctgtctgctgctgaggaccccctggtgcagagcctgcggcaggagctgtatgtggaggactttgccagcattgactggctggcccagagaaataatgtggccccagatgagctgtacaccccccacagctggctgctgcgggtggtgtatgccctgctgaacctgtatgagcaccaccacagcgcccacctgcggcagagagctgtgcagaagctgtatgagcacatcgtggctgatgaccgcttcaccaagagcatcagcatcggccccatcagcaagaccatcaacatgctggtgcgctggtacgtggatggccctgccagcacagccttccaggagcacgtgagccgcatcccagactacctgtggatgggcctggatggcatgaagatgcagggcaccaacggcagccagatctgggacacagcctttgccatccaggccctgctggaggccggcggccaccacaggcctgagttcagcagctgcctgcagaaggcccacgagttcctgcggctgagccaggtgcctgacaaccccccagactaccagaagtactaccggcagatgaggaaaggaggcttctccttcagcaccctggactgtggctggatcgtgtctgactgcacagctgaggccctgaaggctgtgctgctgctgcaggagaagtgcccccacgtgacagagcacatcccccgggagcggctgtgtgatgctgtggccgtgctgctgaacatgaggaacccagatggcggctttgccacctatgagaccaagaggggcggccacctgctggagctgctgaaccccagcgaggtgtttggagacatcatgattgactacacctacgtggagtgcaccagcgctgtgatgcaggccctgaagtacttccacaagcgcttccctgagcacagagctgctgagatccgggagaccctgacccagggcctggagttctgccggcggcagcagagagcagatggctcctgggagggctcctggggcgtgtgcttcacctacggcacctggtttggcctggaggcctttgcctgcatgggccagacctacagagatggaacagcctgtgccgaggtgtcccgggcctgtgacttcctgctgagccggcagatggctgatggcggctggggagaagattttgagagctgtgaggagcggcgctacctgcagagcgcccagagccagatccacaacacctgctgggccatgatgggcctgatggctgtgcgccacccagacatcgaggcccaggagcggggcgtgcgctgcctgctggagaagcagctgcccaacggggactggccccaggagaacattgctggggtcttcaacaagagctgtgccatctcctacaccagctacagaaacatcttccccatctgggccctgggccgcttcagccagctgtacccagagcgggccctggccggccacccctag

SEQ ID NO: 18500 - DNA, 2199 bp, Artificial Sequence
  derived and/or modified sequence
atgaccgagggcacctgcctgcggcggcggggcggcccctacaagactgaacctgccactgacctgggaaggtggagactcaactgcgaaaggggaaggcaaacctggacatatctacaggacgagagggccggtcgggaacaaaccggcctcgaggcctatgctctggggttggataccaagaactactttaaggatcttcccaaggcccacactgccttcgagggtgctttgaacggaatgactttctacgtgggtctccaagcagaggatggacattggactggcgactacgggggtcctctatttctgttgccagggctacttattacctgccacgtggcacgtatccctctgcctgcaggctaccgcgaagaaatagtcaggtaccttagaagcgttcagctgccagatggggggtggggccttcatattgaagataaatctacagtctttgggaccgcactgaactacgtgtccctgcggatcctaggggtaggaccggatgatcccgatctggtgcgggcacgcaacattctccacaagaagggaggagccgtggccatcccaagctggggaaagttttggttagctgtactgaatgtttatagttgggaggggctcaacaccctgtttccagagatgtggttatttccagattgggcacctgcacatccaagcactctgtggtgtcactgtagacaagtttatttgcctatgtcctactgttacgccgtgcgactgtctgccgccgaagacccgctggtgcagagcctaaggcaggagctgtatgtcgaggatttcgcatctatagactggcttgcgcagcgaaacaatgtggcacccgacgaactttacaccccgcatagctggctgctccgagttgtgtacgcgctgctcaatttatatgaacaccatcatagtgctcacctcaggcagcgggctgttcagaaactgtacgaacatatcgtcgctgatgacagattcaccaagtccatctctattgggccaatctccaaaaccatcaatatgctcgtgaggtggtatgtggacggtccagctagtactgcttttcaggaacatgtgtccaggatcccggactatctgtggatgggattggatggtatgaagatgcagggaactaacggcagccaaatttgggatactgctttcgccatccaagcacttttggaggctggcggccatcatcgtcctgagtttagtagctgcctgcagaaggcacacgagtttctgagactaagtcaggtccctgataaccccccagattaccaaaaatactatcggcagatgcgtaaaggcgggttttcgttcagtaccttggattgcggttggatcgtgagtgactgtacagcagaagcgttgaaggccgtactactgctccaagagaaatgcccccacgtgacggaacatatcccacgagagagactgtgtgacgcagtcgcggtcctgctcaatatgcggaatcctgatggagggttcgccacctacgagacaaagcgaggcggccatttgctggagttgctaaaccctagcgaagtgtttggagacattatgatcgactatacatatgtggagtgcacgagtgcagtaatgcaggctttgaaatattttcacaagcgtttcccagaacatcgcgccgcagaaattagagagactctcacacaagggctggagttctgtcggcgtcagcaaagggctgatggttcctgggagggatcctggggggtatgctttacatatggcacatggtttggactagaagccttcgcatgtatgggacagacctacagggacggcaccgcttgcgcggaagtaagccgcgcatgtgacttcctgctaagcagacagatggcggatggtgggtggggcgaagacttcgaatcatgcgaggagcgtagatacttacagtccgcccagtcccaaattcataacacttgctgggctatgatggggttgatggccgtgcgtcaccctgatattgaggcccaggaaagaggcgtgcgttgtctgctggagaagcagctgccaaatggcgattggccccaggagaatatagccggagtctttaacaagagttgtgcaataagctatacatcttacaggaacatattccctatttgggccctcggtcgttttagccagctataccctgagagagcgctcgccggtcatccttag

SEQ ID NO: 18501 - DNA, 2199 bp, Artificial Sequence
  derived and/or modified sequence
atgaccgagggcacctgcctgcggcggcggggcggcccctacaagactgaacccgcaaccgacttgggccgctggcgtctgaattgtgagagagggcgccagacttggacttatcttcaggacgagcgagcgggacgggaacagacaggactggaagcgtacgccctgggcctggacactaaaaattactttaaggatctgccgaaggcccacaccgcgtttgagggggcactgaatggaatgaccttttacgtgggacttcaggctgaggacggccactggactggagactatggcggccctctgtttttgttgcccggcttactcatcacctgccacgtcgcccggattccactccccgccggctaccgcgaggaaatcgtgaggtatcttcgtagtgtgcaattaccggatggcggctggggactgcatattgaagacaaaagcacggtcttcggaacagccttgaactatgtgtcgcttaggatcttaggagtcgggcctgatgacccggatctggtcagagcccgcaatattttacataagaaggggggagcagtcgccattccttcttggggaaagttttggctggccgttctgaacgtgtatagttgggagggcctgaatactcttttccccgagatgtggctgttcccagattgggccccagcccatcctagcaccttgtggtgtcactgtcggcaggtgtacctcccaatgtcatattgttatgccgtgaggctcagcgccgcagaagaccctttagtgcagagccttagacaggaactctatgtcgaggactttgctagtatagactggctggcccaacggaacaatgtcgcgccagatgaactatataccccccatagctggcttcttcgagtggtgtatgcactcctcaatctatatgaacaccatcatagcgctcacttgcggcaaagggccgtgcagaagttatacgaacacatcgttgcagatgacaggttcacgaagagtatctctattggccctatatctaaaactatcaacatgctggtccggtggtacgtggacggtccagccagtaccgcttttcaggaacatgtcagccggattcctgactatctgtggatgggcctggatggaatgaaaatgcagggaaccaacggatcacagatttgggatacagccttcgctatccaggccttattggaggctgggggccatcacagaccagaattctcttcatgcctgcagaaagctcacgagtttcttcgattgagtcaggtgcccgataatcctccggattaccagaagtattaccggcagatgcgcaaaggcggcttttcattctcaacattggactgtggatggatcgtctctgactgcacagccgaggccttgaaagctgtgttgctgctgcaagagaagtgcccccatgtcactgaacacatccctcgggaacgcctgtgtgacgcggtggccgttttgctgaacatgcgcaaccctgacggtgggttcgccacatacgagacgaagcggggcggccacctactcgaactgctgaacccatcggaggtgtttggtgacatcatgatcgactatacgtatgttgagtgcacatccgcagttatgcaagctctaaagtactttcataagcgcttcccagagcatcgcgccgccgagattagggaaactcttacacagggactggaattttgcaggcgccaacaaagggccgatggcagttgggagggctcttggggcgtctgctttacatacgggacctggttcggtcttgaggccttcgcctgcatggggcaaacgtatagagacggcaccgcatgtgccgaagtgagcagggcctgcgactttctgctatctcgccagatggctgacggaggatggggggaggactttgagtcttgtgaggaaaggagatatctccagagtgcccagtcacaaatccacaacacatgctgggcaatgatgggtcttatggctgtacggcaccctgacatcgaggcccaggaacgcggcgtccggtgcttattagaaaaacaactcccaaacggggactggccacaagagaatatcgccggggtgttcaataagagctgcgctataagctacacatcttaccggaacatcttcccaatctgggccctgggccggttcagtcagctgtaccccgagcgagccttggctggtcatccctag

SEQ ID NO: 18502 - DNA, 1959 bp, Artificial Sequence
  derived and/or modified sequence
atgaccttctacgtgggcctgcaggccgaggacggccactggaccggagactatggcggccccctgttcctgctgccagggctcctgataacatgccacgtcgcccgaattcctctgcctgccgggtatcgagaagagattgtgcgctaccttcggagcgtgcagttaccggatggggggtggggactgcacattgaagataagagcactgtgttcggcaccgctttgaactatgtgagtctgcggatcttgggcgtcggccccgacgatcctgatctcgtgcgcgccaggaatattttgcataaaaagggcggcgccgtggcaataccatcctggggaaagttctggctcgcggttttgaatgtgtattcctgggagggcctcaacaccctgttccccgaaatgtggctctttccagattgggcacccgcccatccatctacgttgtggtgccattgtagacaggtctatttgcctatgagctattgttatgccgtgcggctaagtgccgccgaggatcctttggtgcaaagcctgagacaggaactgtacgtggaagattttgctagcattgattggctggcccagcgtaacaacgtcgcacccgacgagttatatacaccccactcttggctcttgcgagtggtgtatgcattactgaacctgtacgagcaccaccacagcgcccatctacggcagcgtgcagttcagaaactgtatgagcacatagtggcggatgaccgattcacgaagtcaatctcaataggacctatttcaaagacgataaacatgctggtgcggtggtacgtggacggacccgctagtaccgcatttcaagaacacgtgagccgaattcccgactatctctggatgggcctggacggtatgaagatgcaggggacgaacggtagtcagatctgggacacagccttcgctatccaggcactgctggaggccggtggtcaccataggcctgaattcagtagctgtttgcagaaagctcatgagttcttaaggctaagtcaagtccccgacaatcctcctgactaccagaagtattaccgtcagatgcggaaaggtgggtttagtttctctactctagattgcgggtggattgtttctgactgtactgccgaagcactgaaagcggtcttgctgctacaggaaaagtgcccacacgtgaccgaacacatcccacgcgagcggctttgtgatgccgtggccgtgcttcttaatatgcgcaatcctgacgggggttttgctacatatgaaaccaaacggggcggacatttactggagctgctcaacccctcagaggtgttcggcgatatcatgatcgactatacgtatgtcgaatgtactagtgccgtgatgcaggcactgaagtatttccataagcgctttccagaacacagggccgccgagattagggaaacactcactcagggtttggaattttgccgacgccagcaacgagccgatggcagttgggagggctcctggggtgtctgttttacatatgggacttggtttgggctagaggctttcgcttgtatgggacagacctaccgcgatggtacagcctgtgcggaagtttctagggcttgtgattttctgctgagcagacaaatggccgatggcgggtggggcgaagactttgagtcttgcgaggagcgcaggtacttgcagagtgcacagagtcagatccacaacacttgctgggcaatgatgggtctgatggcagtccgacacccagatattgaagcacaggagagaggagtgagatgcctgctagaaaaacagcttccaaatggagactggcctcaggaaaatattgctggagtttttaataagagctgcgccatctcctatacatcttatcggaatatttttccgatttgggcacttggacgattcagccagctgtatccagagcgggcattagcaggccatccttag

SEQ ID NO: 18503 - DNA, 2199 bp, Artificial Sequence
  derived and/or modified sequence
atgacggagggcacatgtttgcgcaggcgtggaggcccttacaaaacagaacccgctactgacctgggcaggtggaggctgaactgcgagagaggtcgacaaacatggacatacctccaggacgagagagctggaagggaacaaacagggctggaggcctatgccctggggctcgatacaaagaactattttaaggacctcccaaaggcacataccgcgttcgaaggagccctaaacggaatgactttctatgtgggactgcaggcagaagacggacactggacaggagactacggcggacctttgttcctgctccccggtctgctcattacttgtcacgttgccaggattcccctccctgccggatatcgggaagagatagtcagataccttcgctccgtgcagttacccgacggcggatggggactacatattgaggacaagagcacggtattcggcactgccctaaactatgtaagtctaaggatcctgggggtgggccctgacgatcctgatctcgtgcgggcacggaacatcctgcacaaaaaagggggtgcagttgctatccctagctggggcaaattctggttggctgtgctgaacgtatatagttgggaggggcttaatactttgttcccagagatgtggctgtttcctgattgggcccctgcccacccgtccactctgtggtgtcactgcaggcaggtctaccttccaatgagctattgttatgctgtgcgtttaagtgcagcagaagacccgttggtacaaagcctgcgtcaggaactgtatgtggaggacttcgccagcatcgattggcttgcccagcggaacaatgttgcaccagacgagctgtatacccctcatagctggctcctacgggtggtatatgccttgctgaatctatacgaacaccatcactcagctcacctaagacaaagggctgtccagaaactatacgaacacatcgtggcggacgataggtttaccaagtctatcagcatcggtcccatttcaaagacaatcaacatgcttgtgaggtggtatgtggacgggcctgcctccactgcgtttcaagaacacgtgtccagaattcccgactacctttggatggggttagacgggatgaaaatgcaagggaccaacggcagccagatttgggatactgcgtttgctatccaagcccttctggaggcgggtggacaccatagaccagaattttcatcttgcctgcagaaggcacatgaattcttgcgtttaagccaggtccctgacaaccctccagattatcagaaatattacagacaaatgagaaagggcggtttctcatttagtacgctcgactgtggctggatcgttagcgactgcaccgcagaggcgctaaaagcagtgttgttgctgcaagagaaatgtcctcatgtgactgaacacataccaagagaacggctatgcgatgccgtggcggtcctcctgaatatgagaaaccctgacggcggatttgcaacttacgagacaaaacggggtggacatttacttgagttgttgaatccctccgaagtgttcggggatatcatgatcgattatacctacgtggagtgtacatcagcggtgatgcaggcgttaaagtatttccacaagcgctttccagaacaccgtgctgcagaaatacgcgaaacgctgacccagggtctggagttctgccgtaggcaacagcgggctgacggtagctgggagggctcgtggggtgtctgcttcacatacggtacgtggtttgggctggaggctttcgcttgtatgggccagacctaccgagatggcaccgcatgtgctgaagtttcccgtgcgtgtgactttcttctttcgcggcagatggctgacggcggatggggagaggatttcgagtcatgtgaggaaagacgctacctgcaatccgcccagagccagatccataatacctgctgggccatgatgggcctcatggccgtccgacaccctgacatcgaggcacaagagcgcggtgtaagatgtcttcttgagaaacagctgccaaacggtgattggccgcaggagaacatcgccggagtctttaataagagttgtgcaataagttacacatcgtacagaaacatatttcctatatgggctcttgggagattttctcaactctatcccgaacgcgctctcgcgggacacccgtag

SEQ ID NO: 18504 - DNA, 2199 bp, Artificial Sequence
  derived and/or modified sequence
atgaccgagggaacatgcctcaggagaaggggcggtccctacaagaccgaacctgctactgatctgggaaggtggagactaaattgtgaaaggggaaggcagacatggacctacttgcaagatgaacgtgccggtcgggagcagaccggcctggaggcttacgccctgggtctcgataccaagaactatttcaaagacctgccgaaggcccataccgcattcgaaggcgctctcaatggtatgacattctacgtaggcttgcaggccgaagacgggcactggacaggcgattatggaggccctcttttcctcctcccaggcctgctgatcacatgccatgttgccaggattcctctgcccgctgggtaccgggaggagattgtccggtatctgcgtagcgttcagttgccagatggagggtgggggctgcacatcgaagacaaaagcaccgtgttcggcacagcactgaactacgtcagtctgagaatcctgggagtggggccagacgacccagacctggtccgcgcacgcaacatcctccacaaaaagggcggtgctgttgctatcccgagctggggcaaattttggctggccgtgctgaatgtgtattcctgggagggacttaatactctcttccccgagatgtggctctttccagattgggctccagctcaccccagcactctgtggtgccattgcaggcaggtgtatcttcccatgtcttattgctacgcggtcagactgagtgccgcagaagatcccctggtgcagagcctcagacaggaattatacgtggaagactttgcaagcattgactggcttgcacaacgtaataacgtggcaccagatgaattgtacacgccacactcctggctgctccgcgtggtgtatgctcttctgaatctgtatgagcaccatcactccgcccatcttcgtcaaagggccgtgcagaagttgtacgagcacattgtggcggatgacaggttcacaaaatcgatctcaatcggccctatcagtaaaaccattaacatgcttgtccggtggtacgttgatggtccggcaagtacagctttccaggagcatgtgtctcgcataccagattatctctggatgggcttggacgggatgaagatgcaaggaaccaatggcagtcagatctgggatactgcatttgccatccaggcgttgctggaggctggtggccaccatcggcctgagttcagttcctgcttgcagaaggcccatgagttcctccgcctgtcccaggtgcccgacaacccccctgattaccagaaatactaccggcagatgcggaaaggcggattctctttcagtacgcttgattgcggctggatcgtgagtgattgcacagcagaagcgctgaaagccgtcctactgctccaggagaagtgtccccatgtaaccgagcacattccgagagagcgcctttgcgacgcagtggctgtgcttctgaatatgagaaatcccgatggagggttcgctacttatgaaaccaaaaggggaggacacctgctggagctactgaacccctccgaggtgttcggagacattatgattgactacacgtatgtggagtgcacatccgcagttatgcaggccctgaaatatttccataagcgatttcctgagcatcgggcagcagagattcgcgagactctgacacagggcttggaattctgccgaaggcagcagcgagccgatgggtcttgggaagggagctggggcgtgtgctttacatatggaacctggtttggcctggaagcctttgcctgcatggggcagacatacagggatggaactgcttgcgctgaggtatctagggcctgcgattttctgcttagccgccagatggctgacggaggatggggggaggacttcgagtcgtgcgaagagcgacgttacctgcagtccgcccagagtcagatacataacacctgctgggccatgatggggcttatggctgtacgccacccagatatcgaagcccaagagaggggtgtaaggtgcctccttgagaagcaactgcccaacggtgattggccccaagagaatatcgctggcgtgttcaataagtcctgtgctatcagctatacatcgtacagaaatatctttccgatttgggcattgggcagattctctcaactgtatcccgaaagggcgctcgccggacacccatag

SEQ ID NO: 18505 - DNA, 1959 bp, Artificial Sequence
  derived and/or modified sequence
atgactttctatgtcggattacaggcggaagacgggcactggaccggggattatggagggccattgttcctgttacccggactcttaatcacatgccacgtagcgaggattcccttgcctgccggataccgcgaggagattgtgcgttatctgcggtccgtgcagcttccagacggaggatggggattgcatattgaagacaagtccactgtctttgggaccgcgttaaactacgtgtctctgaggatcttgggagtgggcccagatgatccggacttggtgcgggctcggaatatactgcacaagaagggaggcgcagtggccattccttcatggggcaagttctggttggcagtcttgaacgtgtacagttgggagggcctgaacaccctgttccccgaaatgtggctatttccggattgggcacccgctcatccctcgaccctgtggtgtcattgccgtcaggtctacctgccgatgtcctattgctacgccgttcgtttatccgcagcagaagaccctcttgttcagtctttgagacaagagctttatgtggaggatttcgcatccatcgattggttagctcagcgaaacaacgtggcaccagacgaattgtacaccccacacagttggctactgagggttgtttatgcccttctgaacctgtacgagcaccaccattctgcccatctccgacagcgggctgtgcagaagctgtacgaacacattgttgcagatgatcggttcactaagagtatcagtatcggccctattagtaaaactatcaacatgcttgtgaggtggtacgtggatggaccggctagcacagctttccaggagcatgtgtcgcgcatccccgactacctctggatgggattggacgggatgaagatgcaaggaaccaacgggagtcagatctgggacaccgcttttgcgattcaagccctgctggaggccggtggccatcatcggcctgagtttagctcctgcttacagaaagcacatgagttcctgcggctaagtcaggtacccgataaccccccagactaccagaaatactatcgccagatgcgcaagggagggttttccttcagcacacttgactgcggctggatcgtatccgactgcaccgccgaagccctgaaggccgtcttactcctgcaggagaagtgcccccatgttacagaacatatcccaagagaaaggctgtgcgacgctgtggcggtcctgcttaatatgcgcaaccctgacggaggattcgctacctacgagactaagcggggtggccacctgctggagctgctcaacccatcagaggttttcggcgatattatgattgattacacttatgtggaatgtactagcgcagtgatgcaagccttgaaatactttcacaagcgctttcctgagcatcgcgctgcggaaattcgggagacgctaacccagggcttagagttctgtagacggcagcaacgggcagatgggagctgggaggggagttggggggtttgcttcacgtatggaacatggtttggactcgaggcatttgcttgtatggggcaaacctaccgggatgggactgcgtgcgccgaggtttcacgggcttgtgactttctgttatcgaggcagatggcagacggtgggtggggcgaggacttcgagtcctgtgaagaacgtagatatctgcagagcgcacaaagtcagatccacaacacctgttgggcgatgatgggtctcatggccgttcgccaccccgacatcgaagcgcaggagcggggtgttcgatgcttactggagaaacagctgcccaacggtgactggcctcaagagaatatcgcaggagtgtttaacaaatcttgcgccattagttatacctcttaccgcaacatcttccctatttgggccctgggccgtttcagtcaactctaccccgaacgggctctagcgggacacccatag

SEQ ID NO: 18506 - DNA, 2199 bp, Artificial Sequence
  derived and/or modified sequence
atgaccgagggcacctgcctgagaagaagaggcggcccctacaagaccgagcccgccaccgacctgggcagatggagactgaactgcgagagaggcagacagacctggacctacctgcaggacgagagagccggcagagagcagaccggcctggaggcctacgccctgggcctggacaccaagaactacttcaaggacctgcccaaggcccacaccgccttcgagggcgccctgaacggcatgaccttctacgtgggcctgcaggccgaggacggccactggaccggcgactacggcggccccctgttcctgctgcccggcctgctgatcacctgccacgtggccagaatccccctgcccgccggctacagagaggagatcgtgagatacctgagaagcgtgcagctgcccgacggcggctggggcctgcacatcgaggacaagagcaccgtgttcggcaccgccctgaactacgtgagcctgagaatcctgggcgtgggccccgacgaccccgacctggtgagagccagaaacatcctgcacaagaagggcggcgccgtggccatccccagctggggcaagttctggctggccgtgctgaacgtgtacagctgggagggcctgaacaccctgttccccgagatgtggctgttccccgactgggcccccgcccaccccagcaccctgtggtgccactgcagacaggtgtacctgcccatgagctactgctacgccgtgagactgagcgccgccgaggaccccctggtgcagagcctgagacaggagctgtacgtggaggacttcgccagcatcgactggctggcccagagaaacaacgtggcccccgacgagctgtacaccccccacagctggctgctgagagtggtgtacgccctgctgaacctgtacgagcaccaccacagcgcccacctgagacagagagccgtgcagaagctgtacgagcacatcgtggccgacgacagattcaccaagagcatcagcatcggccccatcagcaagaccatcaacatgctggtgagatggtacgtggacggccccgccagcaccgccttccaggagcacgtgagcagaatccccgactacctgtggatgggcctggacggcatgaagatgcagggcaccaacggcagccagatctgggacaccgccttcgccatccaggccctgctggaggccggcggccaccacagacccgagttcagcagctgcctgcagaaggcccacgagttcctgagactgagccaggtgcccgacaacccccccgactaccagaagtactacagacagatgagaaagggcggcttcagcttcagcaccctggactgcggctggatcgtgagcgactgcaccgccgaggccctgaaggccgtgctgctgctgcaggagaagtgcccccacgtgaccgagcacatccccagagagagactgtgcgacgccgtggccgtgctgctgaacatgagaaaccccgacggcggcttcgccacctacgagaccaagagaggcggccacctgctggagctgctgaaccccagcgaggtgttcggcgacatcatgatcgactacacctacgtggagtgcaccagcgccgtgatgcaggccctgaagtacttccacaagagattccccgagcacagagccgccgagatcagagagaccctgacccagggcctggagttctgcagaagacagcagagagccgacggcagctgggagggcagctggggcgtgtgcttcacctacggcacctggttcggcctggaggccttcgcctgcatgggccagacctacagagacggcaccgcctgcgccgaggtgagcagagcctgcgacttcctgctgagcagacagatggccgacggcggctggggcgaggacttcgagagctgcgaggagagaagatacctgcagagcgcccagagccagatccacaacacctgctgggccatgatgggcctgatggccgtgagacaccccgacatcgaggcccaggagagaggcgtgagatgcctgctggagaagcagctgcccaacggcgactggccccaggagaacatcgccggcgtgttcaacaagagctgcgccatcagctacaccagctacagaaacatcttccccatctgggccctgggcagattcagccagctgtaccccgagagagccctggccggccacccctag

SEQ ID NO: 18507 - DNA, 1959 bp, Artificial Sequence
  derived and/or modified sequence
atgaccttctacgtgggcctgcaggccgaggacggccactggaccggcgactacggcggccccctgttcctgctgcccggcctgctgatcacctgccacgtggccagaatccccctgcccgccggctacagagaggagatcgtgagatacctgagaagcgtgcagctgcccgacggcggctggggcctgcacatcgaggacaagagcaccgtgttcggcaccgccctgaactacgtgagcctgagaatcctgggcgtgggccccgacgaccccgacctggtgagagccagaaacatcctgcacaagaagggcggcgccgtggccatccccagctggggcaagttctggctggccgtgctgaacgtgtacagctgggagggcctgaacaccctgttccccgagatgtggctgttccccgactgggcccccgcccaccccagcaccctgtggtgccactgcagacaggtgtacctgcccatgagctactgctacgccgtgagactgagcgccgccgaggaccccctggtgcagagcctgagacaggagctgtacgtggaggacttcgccagcatcgactggctggcccagagaaacaacgtggcccccgacgagctgtacaccccccacagctggctgctgagagtggtgtacgccctgctgaacctgtacgagcaccaccacagcgcccacctgagacagagagccgtgcagaagctgtacgagcacatcgtggccgacgacagattcaccaagagcatcagcatcggccccatcagcaagaccatcaacatgctggtgagatggtacgtggacggccccgccagcaccgccttccaggagcacgtgagcagaatccccgactacctgtggatgggcctggacggcatgaagatgcagggcaccaacggcagccagatctgggacaccgccttcgccatccaggccctgctggaggccggcggccaccacagacccgagttcagcagctgcctgcagaaggcccacgagttcctgagactgagccaggtgcccgacaacccccccgactaccagaagtactacagacagatgagaaagggcggcttcagcttcagcaccctggactgcggctggatcgtgagcgactgcaccgccgaggccctgaaggccgtgctgctgctgcaggagaagtgcccccacgtgaccgagcacatccccagagagagactgtgcgacgccgtggccgtgctgctgaacatgagaaaccccgacggcggcttcgccacctacgagaccaagagaggcggccacctgctggagctgctgaaccccagcgaggtgttcggcgacatcatgatcgactacacctacgtggagtgcaccagcgccgtgatgcaggccctgaagtacttccacaagagattccccgagcacagagccgccgagatcagagagaccctgacccagggcctggagttctgcagaagacagcagagagccgacggcagctgggagggcagctggggcgtgtgcttcacctacggcacctggttcggcctggaggccttcgcctgcatgggccagacctacagagacggcaccgcctgcgccgaggtgagcagagcctgcgacttcctgctgagcagacagatggccgacggcggctggggcgaggacttcgagagctgcgaggagagaagatacctgcagagcgcccagagccagatccacaacacctgctgggccatgatgggcctgatggccgtgagacaccccgacatcgaggcccaggagagaggcgtgagatgcctgctggagaagcagctgcccaacggcgactggccccaggagaacatcgccggcgtgttcaacaagagctgcgccatcagctacaccagctacagaaacatcttccccatctgggccctgggcagattcagccagctgtaccccgagagagccctggccggccacccctag

SEQ ID NO: 18508 - protein, 492 aa, Artificial Sequence
  derived and/or modified sequence
MVILLLQHGADPTLIDGEGFSSIHLAVLFQHMPIIAYLISKGQSVNMTDVNGQTPLMLSAHKVIGPEPTGFLLKFNPSLNVVDKIHQNTPLHWAVAAGNVNAVDKLLEAGSSLDIQNVKGETPLDMALQNKNQLIIHMLKTEAKMRANQKFRLWRWLQKCELFLLLMLSVITMWAIGYILDFNSDSWLLKGCLLVTLFFLTSLFPRFLVGYKNLVYLPTAFLLSSVFWIFMTWFILFFPDLAGAPFYFSFIFSIVAFLYFFYKTWATDPGFTKASEEEKKVNIITLAETGSLDFRTFCTSCLIRKPLRSLHCHVCNCCVARYDQHCLWTGRCIGFGNHHYYIFFLFFLSMVCGWIIYGSFIYLSSHCATTFKEDGLWTYLNQIVACSPWVLYILMLATFHFSWSTFLLLNQLFQIAFLGLTSHERISLQKQSKHMKQTLSLRKTPYNLGFMQNLADFFQCGCFGLVKPCVVDWTSQYTMVFHPAREKVLRSV

SEQ ID NO: 18509 - protein, 958 aa, Artificial Sequence
  derived and/or modified sequence
KVARFQKIPNGENETMIPVLTSKKASELPVSEVASILQADLQNGLNKCEVSHRRAFHGWNEFDISEDEPLWKKYISQFKNPLIMLLLASAVISVLMHQFDDAVSITVAILIVVTVAFVQEYRSEKSLEELSKLVPPECHCVREGKLEHTLARDLVPGDTVCLSVGDRVPADLRLFEAVDLSIDESSLTGETTPCSKVTAPQPAATNGDLASRSNIAFMGTLVRCGKAKGVVIGTGENSEFGEVFKMMQAEEAPKTPLQKSMDLLGKQLSFYSFGIIGIIMLVGWLLGKDILEMFTISVSLAVAAIPEGLPIVVTVTLALGVMRMVKKRAIVKKLPIVETLGCCNVICSDKTGTLTKNEMTVTHIFTSDGLHAEVTGVGYNQFGEVIVDGDVVHGFYNPAVSRIVEAGCVCNDAVIRNNTLMGKPTEGALIALAMKMGLDGLQQDYIRKAEYPFSSEQKWMAVKCVHRTQQDRPEICFMKGAYEQVIKYCTTYQSKGQTLTLTQQQRDVYQQEKARMGSAGLRVLALASGPELGQLTFLGLVGIIDPPRTGVKEAVTTLIASGVSIKMITGDSQETAVAIASRLGLYSKTSQSVSGEEIDAMDVQQLSQIVPKVAVFYRASPRHKMKIIKSLQKNGSVVAMTGDGVNDAVALKAADIGVAMGQTGTDVCKEAADMILVDDDFQTIMSAIEEGKGIYNNIKNFVRFQLSTSIAALTLISLATLMNFPNPLNAMQILWINIIMDGPPAQSLGVEPVDKDVIRKPPRNWKDSILTKNLILKILVSSIIIVCGTLFVFWRELRDNVITPRDTTMTFTCFVFFDMFNALSSRSQTKSVFEIGLCSNRMFCYAVLGSIMGQLLVIYFPPLQKVFQTESLSILDLLFLLGLTSSVCIVAEIIKKVERSREKIQKHVSSTSSSFLEVSSSSGNFVAVWLWERSGQQLVEIHPHLETGLPLTEDVSCV

SEQ ID NO: 18510 - protein, 949 aa, Artificial Sequence
  derived and/or modified sequence
MKVARFQKIPNGENETMIPVLTSKKASELPVSEVASILQADLQNGLNKCEVSHRRAFHGWNEFDISEDEPLWKKYISQFKNPLIMLLLASAVISVLMHQFDDAVSITVAILIVVTVAFVQEYRSEKSLEELSKLVPPECHCVREGKLEHTLARDLVPGDTVCLSVGDRVPADLRLFEAVDLSIDESSLTGETTPCSKVTAPQPAATNGDLASRSNIAFMGTLVRCGKAKGVVIGTGENSEFGEVFKMMQAEEAPKTPLQKSMDLLGKQLSFYSFGIIGIIMLVGWLLGKDILEMFTISVSLAVAAIPEGLPIVVTVTLALGVMRMVKKRAIVKKLPIVETLGCCNVICSDKTGTLTKNEMTVTHIFTSDGLHAEVTGVGYNQFGEVIVDGDVVHGFYNPAVSRIVEAGCVCNDAVIRNNTLMGKPTEGALIALAMKMGLDGLQQDYIRKAEYPFSSEQKWMAVKCVHRTQQDRPEICFMKGAYEQVIKYCTTYQSKGQTLTLTQQQRDVYQQEKARMGSAGLRVLALASGPELGQLTFLGLVGIIDPPRTGVKEAVTTLIASGVSIKMITGDSQETAVAIASRLGLYSKTSQSVSGEEIDAMDVQQLSQIVPKVAVFYRASPRHKMKIIKSLQKNGSVVAMTGDGVNDAVALKAADIGVAMGQTGTDVCKEAADMILVDDDFQTIMSAIEEGKGIYNNIKNFVRFQLSTSIAALTLISLATLMNFPNPLNAMQILWINIIMDGPPAQSLGVEPVDKDVIRKPPRNWKDSILTKNLILKILVSSIIIVCGTLFVFWRELRDNVITPRDTTMTFTCFVFFDMFNALSSRSQTKSVFEIGLCSNRMFCYAVLGSIMGQLLVIYFPPLQKVFQTESLSILDLLFLLGLTSSVCIVAEIIKKVERSREKIQKHVSSTSSSFLEVWLWERSGQQLVEIHPHLETGLPLTEDVSCV

SEQ ID NO: 18511 - DNA, 2877 bp, Artificial Sequence
  derived and/or modified sequence
aaggtagcacgctttcaaaaaatccctaatggagagaatgaaactatgatacccgtgttgacctcgaagaaggcatctgaactgccagtcagcgaggtcgcttctatattgcaggcagatctgcagaatggtctgaacaagtgcgaagtgagtcacaggcgcgccttccacggttggaacgagttcgacatatctgaggacgaacccttgtggaaaaaatacattagccagttcaaaaacccgctgattatgctgctgcttgccagtgccgtcattagcgtccttatgcatcagtttgacgacgcagtctctatcacagtggccattttaatcgtagtgacagtggccttcgtacaggagtacaggtccgaaaaatctctcgaagaactgagtaaactggtgcccccggagtgtcactgcgtaagggaaggcaagctggaacacactctggcgagggatcttgtacctggagataccgtatgtctgagcgtgggcgatagggttcccgcggatctgcgcctgttcgaggccgtggatctttccatcgacgaatcgagcttaaccggagaaacaaccccctgtagcaaagtgacagctccgcagcctgccgcaactaatggtgacctggcctcccgaagcaacatcgctttcatgggcacactggtgaggtgcggaaaggccaaaggtgtcgtgatcggaactggcgagaattcagaattcggtgaggtcttcaaaatgatgcaagccgaggaggcgcctaaaacaccacttcagaaatctatggatcttctaggtaaacaattgtccttctactcctttggtatcatcggaatcataatgctggtgggctggctgctgggtaaggacatcctcgaaatgtttactatctctgtgtccctcgccgtggcagctatccccgaggggctcccaatcgtggtgacagtgacgttagctcttggcgtcatgcgcatggtgaagaagagagctatagtcaaaaagctgccaattgtcgagacccttgggtgctgtaatgtgatctgtagcgacaagaccggtacactgactaaaaacgaaatgacggtgacccacatatttacctccgatggacttcacgccgaggtgactggggtcggctataatcagtttggggaggtgatcgttgatggtgatgttgtacatggcttctataatcctgccgtttcccgcatcgtcgaagccggatgtgtgtgcaacgacgcagtaatccgaaataataccttaatgggaaaaccaaccgagggtgcacttatcgccctggccatgaagatgggcctggacggactgcagcaggattatatccgcaaagcagaatatcctttctccagtgagcagaagtggatggcggtaaaatgtgtccatagaacacagcaggaccgacctgagatatgctttatgaagggggcttatgagcaggtaataaagtactgtaccacataccagagcaaggggcagaccttaactttgactcagcaacagcgtgatgtctatcaacaggaaaaggcacggatggggtccgctggcttaagggtgctggcactcgcctctggcccggagctgggccaactgacattcctcggcctggtcgggattattgatcctccgagaaccggtgtaaaagaggctgttaccaccctgattgcttccggcgtttccatcaagatgattaccggtgacagtcaggaaactgcagttgcgatcgccagccgactcggtttgtacagtaagaccagccagtccgtgagcggcgaggaaattgatgccatggacgtgcagcaactgtcccagattgtgcccaaagtcgccgtattctaccgcgcctcacctcgtcacaagatgaaaatcatcaaatcattacaaaaaaatggctccgtggtcgctatgacaggagacggtgtgaacgacgccgtggctttgaaagctgccgacataggtgtcgccatgggccaaacggggacagatgtctgcaaggaggccgccgacatgattttagtcgacgatgacttccagacaattatgtctgccatcgaggaagggaagggaatctacaataacatcaaaaactttgttagattccagctgtctacttccatcgccgccttaaccctcatatcattagcaacgctaatgaattttcccaatcctctaaacgccatgcaaatcctctggataaatataatcatggacggcccccctgcacaatccttgggcgtggagccagtagataaggatgttattaggaaaccacctaggaattggaaggactccattcttacaaagaacctgatcttgaaaatcttagtgtcctcaatcatcattgtgtgtggcacattgttcgttttctggagggagctgcgggacaacgtgattacacccagggatacgactatgaccttcacctgttttgtttttttcgatatgttcaacgccctttcttctcgctctcagactaaatctgtctttgagattggcctgtgtagtaatagaatgttctgctatgccgtcttaggcagtattatgggtcaactgcttgtcatctactttccacccctgcagaaagtgttccaaacagagtctttgtccattcttgatcttctgttcctactcgggctgacgtcctcagtctgcattgtagccgagattatcaagaaggtcgagcgcagtcgagagaaaatacaaaagcatgtcagcagtactagctctagctttttggaggtttcctcttccagtggcaactttgtcgccgtatggctgtgggaaagaagcggccagcagctggtggaaatccacccacatctggagacgggcttgccactgactgaggatgtgagctgtgtgtag

SEQ ID NO: 18512 - DNA, 2850 bp, Artificial Sequence
  derived and/or modified sequence
atgaaggttgcaaggtttcaaaaaatccccaacggggaaaacgaaaccatgatacctgttcttacctctaagaaggcttccgaactacccgtcagtgaggttgcatccatcctgcaggctgatctccaaaatggtttgaacaagtgcgaagtatctcatcgccgggctttccatggatggaacgaattcgacatatcagaagacgagcccctgtggaaaaagtatatctcccaattcaaaaaccctcttataatgcttctcttagccagtgctgtgatatctgtgttaatgcatcagtttgacgatgccgttagcattacagtggctatcctgatcgtggtcacagtggcgtttgtgcaggaatacagatccgaaaagtctctggaagagttgagcaagctggtccccccagagtgccactgcgtacgggagggcaaacttgaacataccctggcacgtgacctggtgccgggagataccgtctgcttgtccgtgggggatagggtgcccgcagatttgagattattcgaggcagtggacctctccatcgacgagagttcactgacaggcgagaccacaccctgttccaaggtaacagcaccacaacctgcagccacaaacggtgacctggcaagtaggagcaacattgctttcatgggcactctggtgaggtgcggcaaggcaaagggagttgttatcggaactggagaaaattccgagttcggggaggtattcaaaatgatgcaggccgaagaggcccctaaaacccccttgcaaaaatccatggaccttcttggtaaacagctgtctttctattcctttggcatcataggtatcatcatgcttgttgggtggctgctagggaaggacattctggagatgtttactatttccgtaagcctcgctgtagccgctatacctgagggcctccccatagtcgttacagtgacgctggcccttggtgtgatgcgcatggtgaagaaacgcgctattgtaaaaaagcttcccatcgtggagactttggggtgctgtaacgtgatctgttctgataaaacaggtaccttaacgaaaaatgagatgactgttactcatattttcactagtgatggattgcacgcagaggtgacgggcgtggggtacaaccaatttggagaggtgatcgttgatggagacgtcgtgcatggattttataacccagcagtgtcaagaatcgtcgaagcgggctgtgtctgcaatgatgcagtgattaggaataacactctgatggggaaaccaacagaaggtgcactcattgccctggcgatgaagatgggcttggacggactccaacaagattatattcggaaggccgagtatcccttctcatcggagcaaaaatggatggccgtaaagtgcgtacatagaactcaacaagacaggcccgaaatctgcttcatgaagggagcgtacgaacaagtgatcaagtactgcacaacttaccagtcgaagggccaaactcttaccttgacccagcagcagcgggatgtgtaccaacaggagaaagcacggatgggcagcgccgggctgcgggtcttggcactcgcctctggacccgagctaggccagctcacgtttctgggactggtcggtattattgatccaccacggaccggcgtgaaggaagcagtcacgactttaatagcatctggagtcagtataaagatgattaccggtgacagtcaggagacagcagtggctattgcatcacgtctggggttgtactcgaaaactagtcagagtgtaagcggggaagagatcgatgccatggatgtgcaacaactctcccagattgtacctaaggtggccgtgttctaccgcgccagtcctaggcacaaaatgaagatcatcaagtccctacagaaaaatgggtcagtggtggctatgacaggggacggcgtgaacgacgcagtggccctaaaggctgccgatatcggtgtggcgatggggcagactggaaccgacgtttgtaaagaggccgcggatatgattctagtggacgacgacttccagactatcatgagtgccattgaggagggaaaaggaatatacaataatataaagaacttcgttcgatttcagctaagtaccagcatcgcagcactgaccctgatctccctggccacccttatgaactttccgaatcctctgaatgcaatgcagatcctgtggatcaatatcattatggacggcccccccgctcagtccctgggggtggaacctgtcgacaaggatgtgatcagaaagccgcccaggaactggaaggactctatcctgacgaagaacctgatcctcaagattctggtgtcaagcatcatcatcgtctgtggcaccctgtttgtgttttggagagaactaagagacaacgtgataacgcctcgtgacacgacaatgacttttacttgttttgtgttcttcgacatgttcaacgctctgtcatcaagaagccaaaccaagagcgtctttgagataggcctatgttcaaaccgcatgttctgctatgccgtattaggcagtattatggggcagttactggttatatatttcccacccctccagaaggtgtttcagactgaatccttgagcatcctagatctcctgttcctgcttgggctcacatcttcagtctgtattgtggccgaaattatcaaaaaagtcgaacgatcccgtgaaaagatccagaaacacgtttcttcgacttcatcaagtttcctggaggtgtggctctgggagcggagtggacagcagctcgttgagattcatccccatctggaaaccgggttgcccctgaccgaggatgtgtcatgcgtgtag

SEQ ID NO: 18513 - DNA, 2760 bp, Artificial Sequence
  derived and/or modified sequence
atgaaagtggcgcgttttcagaagatcccaaacggcgaaaacgagacgatgatccctgtgctgacgtcaaaaaaagctagcgaactgcccgtatccgaggtcgcctccatcttgcaagcagatctgcaaaatgggcttaacaagtgtgaggtgtcccacaggcgggctttccatggatggaacgaatttgatatctctgaagacgagcctctgtggaagaagtatatctcccagtttaaaaaccccctgatcatgcttttgctggcctctgccgtcatatcagtgctgatgcatcagtttgatgacgctgtgtcaattaccgtggccatccttatagttgtaacagtcgcttttgtgcaggagtatcgtagcgagaaaagcttggaggagttgagcaagctcgtcccccccgaatgccattgcgttcgcgaaggcaaactcgaacacacccttgcccgagacctcgtcccaggcgatacagtttgtttgagtgtgggcgacagagttcccgccgacctgcgtctgtttgaagcagtggacctgagcatcgatgagtcaagtctgaccggcgagaccaccccttgtagtaaggtgacagcacctcaacccgcagccaccaacggggatctggcatccaggagcaacattgctttcatgggaaccctcgtccggtgcgggaaggccaaaggcgtcgtcattggtaccggggagaattccgaattcggggaagtattcaaaatgatgcaggccgaggaggccccaaaaaccccactacaaaaatccatggatctccttggcaaacaactgagtttttattccttcggcataattggcataatcatgttagtaggctggctcttgggtaaggatatcctggagatgtttacaatttcagtttcccttgcggtcgctgctattcctgaggggctacctattgttgtgactgtcacactggcgctgggcgtgatgcgcatggttaaaaagcgtgcaattgtcaaaaagctgcctattgtggaaaccctgggctgttgcaatgtgatctgctctgacaaaactggcacgcttactaaaaacgagatgactgtaacacatatttttacaagcgacgggctgcacgccgaagtgacgggggtcggatacaaccagtttggagaggtcatagtcgatggcgacgtagttcacggcttctataacccagccgtcagccggattgtcgaagcaggctgtgtgtgtaacgatgccgtgattcgtaacaatacgttgatggggaagccgaccgagggagcactgatagccttagccatgaagatggggctcgacgggttgcagcaagactacattaggaaggccgagtacccattttcgtctgaacagaaatggatggctgtgaagtgcgtgcaccgaacacagcaagatcgccccgaaatttgctttatgaagggagcatatgaacaggttattaaatactgcacgacttaccagagcaagggtcaaacacttactttgactcaacagcagagagacgtgtaccagcaagaaaaagctcgtatgggttctgctggccttagagtcctggcactggccagcggcccagaactggggcagctgaccttcctgggtctggtgggaattatagatccacccagaacgggtgtcaaggaagcagtgacaaccttgatcgccagcggcgtttctattaagatgattaccggggattcacaggagactgccgtggccatcgcatcccgactgggactctacagtaagacatctcagtcagtgtctggagaagaaattgacgcaatggacgtgcagcagctgagccagattgttcctaaggtggccgtattctatcgcgcctccccccggcacaaaatgaaaatcatcaagagcctgcagaagaatggcagcgttgtggctatgactggcgatggagtcaatgatgccgtggctctgaaggccgccgacattggagtagcaatgggccagactggcacagacgtctgcaaggaggcagctgacatgatacttgtggatgatgacttccaaactatcatgtccgcaattgaggagggcaaggggatctataacaacattaagaatttcgtgaggtttcagctgagtaccagcatagcagcactgaccctgatttctctcgctacgttaatgaactttcccaatcctctgaatgcgatgcagattctgtggatcaatataattatggacggccctcccgctcagagcctgggggtcgagcccgtcgataaggacgtgattagaaagcctcccagaaattggaaggattccatattgaccaaaaacctcattctgaaaatcctggtctcttccatcatcatcgtgtgcggcacactctttgtgttctggcgtgaactccgtgacaacgtgattaccccacgggataccacgatgactttcacatgcttcgttttttttgacatgtttaatgcgctgagtagccgatctcaaacaaagtcagtttttgagatcggactttgctccaaccgcatgttctgttatgccgtattgggaagtatcatgggccagctgttagtcatctacttccctcccctgcagaaagtcttccagacagaatcactgtccatcctggatttactatttcttctggggctcacgagttctgtgtgtatcgtggctgaaatcatcaaaaaagtcgagagaagcagagagaagatccaaaagcatgtgtcctctacatcatcaagtttccttgaagtttag

SEQ ID NO: 18514 - DNA, 2712 bp, Artificial Sequence
  derived and/or modified sequence
atgattccagtgctcacgagcaaaaaggcctccgaactccccgtgtcagaagtggcctcgattctgcaggcagacctgcagaatggattaaataagtgcgaagtgtcccacagaagggccttccatgggtggaacgaattcgacatatctgaagacgaacccctgtggaagaaatacatcagccagtttaaaaatcctctgatcatgctgctcctagcttccgccgtgattagcgtgttgatgcaccagtttgacgacgcagtgagcattaccgtggcgatactgatagtggtcactgtggcgtttgttcaggaatacagaagtgaaaaaagcctcgaggagttatccaagctggtccctccagaatgtcactgtgtgagagaaggaaagctagaacacactcttgcccgagacctggttccaggtgacaccgtctgtctatctgttggggatagggtgccagctgatctgcgtctgttcgaggctgtcgacctgtccatagacgaaagttctttgaccggagagaccacaccctgcagtaaggtaaccgcaccacagcccgcagctacgaatggcgaccttgcctcccggtccaacattgccttcatgggcacccttgtcaggtgcggcaaagctaaaggtgtggtgattggcactggagagaattcagagttcggcgaggtatttaagatgatgcaagcagaagaagcccccaagacccctcttcaaaaaagcatggaccttttaggaaagcagctgtctttttactcgttcggtattatcggcatcataatgcttgtcggctggttgctaggcaaagatattctcgagatgttcaccatatctgtgagcctggccgtggcggctatcccggaagggcttcccatcgtggttaccgtgaccctggcactgggagtgatgaggatggttaaaaaacgagcaatcgtcaagaaactgccaattgtggaaactctaggctgctgcaatgttatctgtagcgacaagacaggcactcttacaaagaatgagatgaccgtgacgcacatcttcacttccgatggccttcacgccgaggtgacaggagtcggatataaccaatttggggaggtgattgttgacggggatgtggtgcatggattttacaaccccgctgtgtcacggatcgtggaggcaggctgcgtgtgtaatgatgccgtgatcaggaacaataccctgatggggaagcccaccgaaggagccttgatcgctttagccatgaagatgggcctcgacgggcttcaacaagattacataaggaaagccgagtacccattctcaagcgagcagaagtggatggccgtgaaatgcgtgcacaggactcagcaagatcgacctgagatctgctttatgaagggcgcctatgagcaggtcatcaaatactgcactacgtatcagagtaagggccagactctcacattgactcagcaacagcgggacgtgtaccaacaggaaaaggctagaatgggctctgcaggactgcgggtactggcgctcgcgtcagggccggagctcgggcagttgacgttccttggactcgtgggcatcatcgatcctccaagaaccggcgtgaaggaggcagtcacaaccctgattgcgtccggcgtctctatcaagatgataacgggcgattctcaggagacagccgtggccatcgctagccggttaggactctactccaaaacatcccagtctgtgagcggtgaggagatcgatgccatggacgtgcaacagctttctcaaatcgtcccaaaggtggccgttttctatagggcctcaccacgtcacaaaatgaagattatcaagagtctccagaaaaatggctcggtggtcgcgatgaccggagatggagtcaacgatgccgtggctctgaaggcagccgacattggtgtggccatgggacagactggcacggatgtatgtaaggaggcagccgatatgatccttgttgatgacgactttcagaccattatgtccgcaatcgaggaagggaaaggcatttataacaacattaagaactttgtaagatttcagctgtccacttctatagcggcccttacccttatctcgctcgccaccctgatgaacttccctaatccacttaacgccatgcagatcctctggataaatatcataatggacggcccacccgcgcaaagtctgggagtcgagcccgtcgacaaggatgtcattcgcaaacccccacgaaactggaaggacagcatactgaccaagaatctgattttaaagatcttagtcagcagcattattatagtgtgcgggaccttatttgtgttctggcgcgaactgcgggataacgtgataaccccaagggacactactatgacattcacctgttttgtcttcttcgacatgtttaatgctttgagcagtagatctcaaaccaagtccgtgttcgagatcggattgtgtagcaatcgcatgttctgctatgccgtgctcggttcaattatgggccaacttctggtcatctattttcccccactacagaaagtgttccagacagagagcctatcaatcttggatcttttatttcttcttgggcttacatcatcagtttgcatcgtagcagagataataaaaaaagtagagaggagtcgggagaagatccagaagcacgtaagctccacttcatcttccttcttggaggtgtag

SEQ ID NO: 18515 - DNA, 2712 bp, Artificial Sequence
  derived and/or modified sequence
atgatccctgtgttaaccagtaaaaaagcttccgagttacctgtatcagaagtggcttcaatcctccaagccgatctccaaaacggcctgaacaaatgcgaagtgtcgcatcggcgagcctttcatggctggaacgaattcgacatttctgaggacgagcctttgtggaagaagtacattagccaatttaagaaccccttaatcatgctattactggcttccgctgttattagcgtcctgatgcaccagtttgacgacgccgtgtcaattacggtggccattttaattgttgttacagtggcttttgtacaggagtaccggtcagagaagagccttgaagagttatccaaactcgtcccacctgaatgccactgcgttagggagggaaaacttgagcacaccctggcaagggacctcgtccccggcgataccgtctgcctcagcgtgggagaccgagtgccagcagacctccggctcttcgaagctgtggaccttagcattgatgagagctcgctgacaggcgaaacaacaccatgctccaaagtgacagcgccacaacccgccgccaccaacggggatctggcatctcgctccaatatcgcatttatgggcactcttgtgcgatgtggaaaggccaaaggagtggtaattggcactggcgaaaatagcgagttcggcgaggtctttaaaatgatgcaggcagaagaggcccccaagacccctctccaaaaaagtatggatctgcttggcaagcagcttagcttctacagctttggcatcattggcatcatcatgttagtaggctggttactgggcaaggatatcttggagatgttcactatcagcgtcagtctggccgtggcggctatcccggagggcttgcccatcgttgtaaccgtcaccctggcgctgggggtcatgcgcatggtaaaaaaaagggcaattgttaaaaaactgccaatagtggaaactcttggatgttgcaatgtgatttgttctgataaaaccggcacactcactaagaacgaaatgaccgtgacccacatctttacatccgatggcttacatgcagaagtcactggcgttggctacaaccaatttggagaggtgatcgtggacggggacgtagtccacggcttctataaccccgcggtctcgcggatcgtggaggctgggtgcgtgtgcaacgatgccgtgatcaggaataacacattaatggggaaacctaccgaaggtgctctcatcgcactggcaatgaaaatggggttagacgggcttcaacaggactacatccggaaagccgagtacccattttcatccgagcagaaatggatggcggtcaagtgcgtgcaccgtacccagcaggatcgaccagagatctgctttatgaaaggggcctatgagcaggtcattaagtactgtacaacataccaatccaagggccagacactgaccctcacacagcaacagagagatgtgtaccaacaggagaaagcaaggatggggagtgccgggcttagagtgcttgccttggcctctggaccagagctgggacagctaacattcctggggttggttggcataatcgacccaccccgtaccggagtcaaggaagccgtcacaacacttattgcatccggggtgagcatcaagatgattactggggattcccaggagactgccgtggccatagccagccggctgggactgtattctaagaccagccaatcagtatccggggaggaaatcgatgctatggatgttcagcagttgagtcagatcgttcccaaggtggcggtcttctacagagcgagtccccgccataagatgaagataattaaatcactgcagaaaaacgggagtgttgtcgcaatgacgggggatggggtcaatgacgcagtcgcacttaaggcagctgatattggagtcgcaatgggtcagaccggcactgacgtgtgcaaagaggccgcagatatgatcctggtggatgatgattttcaaacaattatgtctgccattgaggagggcaaggggatttataacaatattaaaaatttcgtccggtttcagcttagtacaagcattgctgccctgactctcataagtctggccacccttatgaacttcccaaaccctttgaatgcaatgcaaatactatggatcaacataattatggatgggccacctgctcagtccttgggggtggaacctgtggataaagacgtgataaggaagcctccccgaaactggaaggatagcatcttaacaaaaaacctgatattaaagatcttagtcagttctattattattgtgtgcgggactctctttgtgttttggcgcgaactgcgagacaacgtgattaccccccgcgacaccacgatgacgttcacttgttttgttttctttgatatgtttaatgccctttccagtcggtcccagaccaaaagtgtatttgagatcggcctgtgctccaatagaatgttttgctacgccgttctcggaagcattatgggacagttgctggttatttactttccgccattacagaaggtgtttcaaacagagtccctgagcattctagacctcctgttcctgttagggcttacctcttccgtttgtattgtcgcagagatcataaaaaaggtggaaagatctcgggagaagatccaaaagcacgtatctagcacatcaagctcctttctggaagtgtag

SEQ ID NO: 18516 - DNA, 2760 bp, Artificial Sequence
  derived and/or modified sequence
atgaaggtggccaggttccagaaaatcccgaacggggaaaatgaaacaatgattcccgtgcttacatcaaagaaagcgtctgaactgcccgttagtgaagtggcgagcattctccaggcagacctccagaacgggctgaacaagtgcgaagtgagtcatagacgtgctttccacggatggaacgagttcgacattagtgaggacgaaccactgtggaaaaaatatatctctcagtttaagaacccactgatcatgctcttgctggcttccgctgtgatttctgtgctaatgcatcaattcgatgatgcagtctccattacagtggccattctcattgtagtgacagtagccttcgtgcaagagtaccgctctgaaaagagcctggaagagctatctaagctcgtgcctcccgaatgccattgcgtccgtgaggggaaactggagcatactctggctagggatctggtacctggcgatactgtttgtctttcggtgggtgatcgggtgcccgcagaccttaggctgtttgaggccgtcgacctgtcaattgatgagtccagccttacgggtgagaccactccgtgcagcaaggttaccgccccccagcctgccgccaccaatggagatctcgcctctaggtctaacattgccttcatgggaaccctagtacggtgtggtaaggcgaaaggggtggtgattggtacaggagagaattcagagttcggcgaggtatttaaaatgatgcaagctgaagaagctcccaagactcctcttcagaagagcatggatctgctgggcaagcagctctctttctactcattcgggatcatcggcattattatgctggttgggtggctactggggaaggacatcctagaaatgtttacaataagcgtgagcctggctgtagcagctattcctgaaggcttacccattgtggtaaccgtgacacttgcgctgggtgtgatgcgcatggtgaaaaaaagagccatcgtgaaaaagctgcctattgtggagacactgggttgctgcaatgttatctgtagtgataagacaggcaccctaactaaaaacgaaatgacggtgactcatatttttacttctgatggtcttcacgctgaggtgactggggtgggatataaccaatttggggaggttatcgtggatggcgacgtcgtgcacggcttctacaatcctgcagtcagtaggatcgtcgaggctggctgcgtatgtaatgatgcggtcattcgcaataatactctcatggggaagcccactgaaggggcccttattgctctcgccatgaaaatgggcttggatgggctccagcaagactacataaggaaagcggagtacccattttccagcgaacaaaaatggatggccgtaaagtgtgtgcaccgtacgcagcaagacagaccagaaatttgttttatgaagggcgcctacgagcaagtgataaagtactgtaccacttaccaatcgaaggggcaaactctcaccctgacacaacagcaacgcgacgtttaccagcaggagaaggcgaggatggggtcagccgggttgagggtgcttgcattggcctcaggcccggagttaggacagctgactttcctcggtctggtgggtattattgatcctcctcggacaggcgtgaaggaagcagttacaacgttgatagctagcggcgtcagtatcaagatgatcacaggtgactcacaggaaactgctgtcgccatagcgtccaggctgggtctgtactcaaaaaccagtcagtccgtgagcggcgaggagatcgatgccatggatgttcaacagctgagccaaattgtgcccaaagtggccgttttctacagggcgtctccccgacataaaatgaagatcatcaagtctctgcagaagaatgggtcagtggtcgcgatgacaggcgatggggtgaatgacgcagtggcactgaaagcggctgatatcggggtggctatggggcagaccgggaccgacgtttgtaaagaggcagctgacatgatcctcgttgacgatgacttccagacaattatgtccgcgattgaggaagggaagggtatttataataatataaaaaatttcgtcagatttcaactctcaaccagcattgccgcgctcacgcttatatcattagccactctcatgaatttcccaaaccccctgaacgccatgcagatactctggatcaacatcattatggatggcccccctgctcagtccttgggtgtggaaccagtggataaagacgtcatccgcaaacccccccgcaattggaaggacagcatccttaccaaaaatttaattctgaagatcttagtatcttctatcattatcgtttgtggtacactgttcgtgttttggcgggagctgcgcgacaacgtaattacgccgagggatacaacaatgacttttacttgttttgtcttcttcgatatgttcaatgccttatcaagtcgttctcaaactaaatcagtgtttgaaattggcctctgttctaaccgaatgttttgttatgccgttctgggctcgattatgggacagctcctggttatttactttccgcccctgcagaaggtgttccaaaccgaatcactgagtatattggaccttcttttcctgttggggctgacctcaagcgtttgcattgtggctgagatcattaaaaaagttgaacggagccgggaaaaaattcagaaacacgtcagcagtacaagctcaagctttctggaggtctag

SEQ ID NO: 18517 - DNA, 2760 bp, Artificial Sequence
  derived and/or modified sequence
atgaaggtggcaaggtttcagaagattcctaacggggagaatgagaccatgatccccgtccttacgagtaagaaggctagtgagctgcccgtctctgaggtggcgagtattctgcaggccgaccttcagaacggcctgaacaagtgcgaagttagccacagacgcgcctttcacggatggaacgagttcgacatctcagaggatgaacctctttggaaaaagtatatttcacagttcaagaacccgctgattatgctgttgctggctagcgctgttatatccgttctgatgcaccaatttgacgatgcagttagcatcacagttgctatcctgatcgtggtgactgtggcattcgtgcaggaatacaggtctgaaaaaagtctggaagagctatctaaacttgtcccacctgagtgtcactgcgttagggagggaaaactggagcataccctggctagagatcttgtgcccggagacactgtgtgtttgtcagtaggcgacagggtccccgctgatctgcgactcttcgaagccgtcgacctgagcatcgatgaatcttctctcaccggggaaaccaccccttgctcaaaagtcacagccccccagcccgcggcaactaatggagacctggcatcacggtctaatattgctttcatggggaccctcgtccgatgtggcaaagctaagggcgtggttattgggactggggaaaactcagagtttggggaagtgtttaagatgatgcaagctgaggaggctcctaaaaccccacttcaaaaaagcatggatttgttagggaaacagctgagcttctatagctttggaatcattggcattatcatgctggtcgggtggctactgggcaaggacatcctcgaaatgtttacaattagcgtctcacttgccgttgctgcaattcctgaagggctcccgattgtggttacggtcacactagcgcttggagttatgagaatggttaaaaaaagagccatcgtgaagaagctgcccattgtagagaccctgggctgttgtaatgtaatttgttctgataagaccggaaccttgaccaagaacgagatgaccgtgacgcatatttttaccagtgacgggctgcacgctgaggttactggagttggatataaccagtttggagaggttatagttgatggagacgtggtgcacggcttctacaatccagctgtgagccgcatagtcgaggcaggttgcgtttgtaacgacgccgtcatccggaataacacactcatggggaagcccacggagggggctctgatcgctttggccatgaagatgggcctggatggcctccagcaggactacatccgcaaggccgagtacccattttcatctgagcagaagtggatggcggtgaaatgtgtgcaccgtacacaacaggaccggccggagatctgtttcatgaagggcgcctacgagcaggtcataaagtactgcacaacataccaaagcaaagggcagacactcaccctgacacagcagcaacgggatgtctatcaacaggagaaagcccgtatgggatctgcaggcttaagggtcctggctttagcgtctggccctgaactagggcaattgacctttctgggcttggtgggcattatagatcctcctaggaccggtgtgaaggaagcagttacgacgcttattgccagtggcgtgagtattaagatgattactggggatagtcaggagactgccgtggccattgcttctagattgggtctgtatagcaaaaccagtcagtctgtgtccggcgaggaaattgacgccatggatgtgcaacagctgtctcagattgtgccaaaggtggccgtcttctaccgcgcctccccccgccataagatgaagattatcaaaagcttgcagaagaacgggtcagtggttgctatgacgggggacggtgtaaatgatgccgtcgccctaaaagcagccgatatcggagtcgctatgggccagaccggcactgacgtgtgcaaggaagctgcagatatgatcttagtcgatgatgacttccagaccattatgagtgcaattgaggaaggaaagggcatctacaacaatattaagaatttcgtccggttccagctttcaacctctattgcagcactgacactcatctccctggcaaccctgatgaatttccccaaccccttgaacgccatgcaaatcctctggatcaacattattatggatgggcctcccgctcagagccttggagttgaacctgttgataaggatgtcattaggaaaccacccaggaactggaaggacagtattctaaccaaaaacctaatccttaagattctggtttcctcaattatcatcgtgtgtggaactctttttgttttctggcgtgagctgcgcgataatgtcatcacccccagagacacgacgatgaccttcacatgttttgtattcttcgatatgtttaatgcactgtccagtagaagccagacaaagtctgtgttcgagattggactctgctctaacaggatgttttgctacgctgttcttggatcaattatgggccagcttctggttatttactttccacctcttcagaaagtcttccagacagagagtctctcaatactcgatctgctctttctgctgggcctcacctcttctgtttgcatagtggctgaaatcattaaaaaggtggaaaggtccagggagaaaatccaaaaacatgtgtcatccacctcgtcatccttcctggaagtctag

SEQ ID NO: 18518 - DNA, 2877 bp, Artificial Sequence
  derived and/or modified sequence
aaggtggcccgcttccagaagatccccaacggggagaatgagaccatgatccctgtgctgaccagcaagaaggccagcgagctgcctgtgtctgaggtggccagcatcctgcaggccgacctgcagaatggcctgaacaagtgtgaggtgagccacagaagagccttccacggctggaatgaatttgacatcagtgaagatgagcccctgtggaagaagtacatcagccagttcaagaaccccctcatcatgctgctgctggccagcgctgtgatctctgtgctgatgcaccagtttgatgatgctgtgtccatcaccgtggccatcctgattgtggtgacagtggcctttgtgcaggagtacagaagtgagaagagcctggaggagctgagcaagctggtgcccccagagtgccactgtgtgcgggagggcaagctggagcacaccctggcccgggacctggtgcctggggacacagtgtgcctgtctgtgggggacagagtgcctgctgacctgcggctgtttgaagctgtggacctgagcattgatgagagcagcctgaccggggagaccaccccctgcagcaaggtgacagccccccagcctgctgccaccaacggggacctggccagccgcagcaacatcgccttcatgggcaccctggtgcgctgtgggaaggccaagggcgtggtgattggcaccggggagaacagcgagtttggagaggtgttcaagatgatgcaggccgaggaggcccccaagacccccctgcagaagtccatggacctgctgggcaagcagctgtccttctacagctttggcatcatcggcatcatcatgctggtgggctggctgctgggcaaggacatcctggagatgttcaccatctctgtgtccctggccgtggccgccatccctgagggcctgcccatcgtggtgacagtgaccctggccctgggcgtgatgaggatggtgaagaagagggccatcgtgaagaagctgcccatcgtggagaccctgggctgctgcaacgtcatctgcagcgacaagacaggcaccctgaccaagaatgagatgacagtgacccacatcttcaccagtgatggcctgcacgccgaggtgactggagtgggctacaaccagtttggagaggtgattgtggatggagatgtggtgcacggcttctacaacccagctgtgtccagaattgtggaggccggctgtgtgtgcaatgatgctgtgatccggaacaacaccctgatgggcaagcccacagaaggagccctgattgccctggccatgaagatgggcctggatggcctgcagcaggactacatcaggaaggccgagtaccccttcagcagcgagcagaagtggatggctgtgaagtgtgtgcacaggacccagcaggacaggcctgagatctgcttcatgaagggggcctatgagcaggtgatcaagtactgcaccacctaccagagcaagggccagaccctgaccctgacccagcagcagagagatgtgtaccagcaggagaaggccaggatgggcagcgctggcctgcgggtgctggccctggccagcggccctgagctgggccagctgaccttcctgggcctggtgggcatcatcgacccccccaggactggagtgaaggaggccgtgaccaccctgattgccagcggcgtgtccatcaagatgatcactggagacagccaggagacagctgtggccatcgccagccggctgggcctgtacagcaagaccagccagagcgtgtctggagaggagattgatgccatggatgtgcagcagctgagccagatcgtgcccaaggtggccgtgttctaccgggccagccccaggcacaagatgaagatcatcaagagcctgcagaagaatggatctgtggtggccatgactggagatggagtgaatgatgctgtggccctgaaggctgctgacatcggcgtggccatgggccagacaggaacagatgtgtgcaaggaggccgctgacatgatcctggtggatgatgacttccagaccatcatgtctgccatcgaggagggcaagggcatctacaacaacatcaagaactttgtgcgcttccagctgagcaccagcattgctgccctgaccctcatcagcctggccaccctgatgaacttccccaaccccctgaatgccatgcagatcctgtggatcaacatcatcatggatggccccccagcccagagcctgggcgtggagcctgtggacaaggatgtgatcaggaagcccccaagaaactggaaggacagcatcctgaccaagaacctgatcctgaagatcctggtgagcagcatcatcatcgtgtgtggcaccctgtttgtgttctggagggagctgcgggacaacgtcatcaccccccgggacaccaccatgaccttcacctgctttgtgttctttgacatgtttaatgccctgagcagccgcagccagaccaagtctgtgtttgaaattggcctgtgcagcaacaggatgttctgctatgctgtgctgggcagcatcatgggccagctgctggtgatctacttcccccccctgcagaaggtgttccagacagagagcctgagcatcctggacctgctcttcctgctgggcctgaccagctctgtgtgcatcgtggccgagatcatcaagaaggtggagaggagccgggagaagatccagaagcacgtgagcagcaccagcagcagcttcctggaggtgagcagcagcagcggcaactttgtggccgtgtggctgtgggagaggagcggccagcagctggtggagatccacccccacctggagaccggcctgcccctgacagaagatgtgtcctgtgtgtag

SEQ ID NO: 18519 - DNA, 2850 bp, Artificial Sequence
  derived and/or modified sequence
atgaaggtggcccgcttccagaagatccccaatggagaaaatgagaccatgatccctgtgctgaccagcaagaaggccagcgagctgcctgtgtctgaggtggccagcatcctgcaggccgacctgcagaatggcctgaacaagtgtgaggtgagccaccggcgggccttccacggctggaatgaatttgacatcagtgaagatgagcccctgtggaagaagtacatcagccagttcaagaaccccctcatcatgctgctgctggccagcgctgtgatctctgtgctgatgcaccagtttgatgatgctgtgtccatcaccgtggccatcctgattgtggtgacagtggcctttgtgcaggagtacagaagtgagaagagcctggaggagctgagcaagctggtgcccccagagtgccactgtgtgcgggagggcaagctggagcacaccctggcccgggacctggtgcctggggacacagtgtgcctgtctgtgggggacagagtgcctgctgacctgcggctgtttgaggccgtggacctgagcattgatgagagcagcctgactggagagaccaccccctgcagcaaggtgacagccccccagcctgctgccaccaatggagacctggccagccgcagcaacatcgccttcatgggcaccctggtgcgctgtgggaaggccaagggcgtggtgattggaactggagaaaattctgaatttggagaggtgttcaagatgatgcaggccgaggaggcccccaagacccccctgcagaagtccatggacctgctgggcaagcagctgtccttctacagctttggcatcatcggcatcatcatgctggtgggctggctgctgggcaaggacatcctggagatgttcaccatctctgtgtccctggccgtggccgccatccctgagggcctgcccatcgtggtgacagtgaccctggccctgggcgtgatgaggatggtgaagaagagggccatcgtgaagaagctgcccatcgtggagaccctgggctgctgcaacgtcatctgcagcgacaagacaggcaccctgaccaagaatgagatgacagtgacccacatcttcaccagtgatggcctgcatgctgaggtgactggagtgggctacaaccagtttggagaggtgattgtggatggagatgtggtgcacggcttctacaacccagctgtgagccgcatcgtggaggccggctgtgtgtgcaatgatgctgtgatccggaacaacaccctgatgggcaagcccacagagggcgccctgattgccctggccatgaagatgggcctggatggcctgcagcaggactacatcaggaaggccgagtaccccttcagcagcgagcagaagtggatggctgtgaagtgtgtgcacaggacccagcaggacaggcctgagatctgcttcatgaagggggcctatgagcaggtgatcaagtactgcaccacctaccagagcaagggccagaccctgaccctgacccagcagcagagagatgtgtaccagcaggagaaggccaggatgggcagcgctggcctgcgggtgctggccctggccagcggccctgagctgggccagctgaccttcctgggcctggtgggcatcattgatcctcccaggactggagtgaaggaggccgtgaccaccctcatcgccagcggcgtgtccatcaagatgatcaccggggacagccaggagacagctgtggccatcgccagccggctgggcctgtacagcaagaccagccagagcgtgtctggagaggagattgatgccatggatgtgcagcagctgagccagatcgtgcccaaggtggccgtgttctaccgggccagccccaggcacaagatgaagatcatcaagagcctgcagaagaatggatctgtggtggccatgactggagatggagtgaatgatgctgtggccctgaaggctgctgacattggagtggccatgggccagacaggaacagatgtgtgcaaggaggccgctgacatgatcctggtggatgatgacttccagaccatcatgtctgccatcgaggagggcaagggcatctacaacaacatcaagaactttgtgcgcttccagctgagcaccagcattgctgccctgaccctcatcagcctggccaccctgatgaacttccccaaccccctgaatgccatgcagatcctgtggatcaacatcatcatggatggccccccagcccagagcctgggcgtggagcctgtggacaaggatgtgatcaggaagccacccaggaactggaaggacagcatcctgaccaagaacctgatcctgaagatcctggtgagcagcatcatcatcgtgtgtggcaccctgtttgtgttctggagggagctgcgggacaacgtcatcaccccccgggacaccaccatgaccttcacctgctttgtgttctttgacatgtttaatgccctgagcagccgcagccagaccaagtctgtgtttgagatcggcctgtgcagcaacaggatgttctgctatgctgtgctgggcagcatcatgggccagctgctggtgatctacttcccccccctgcagaaggtgttccagacagagagcctgagcatcctggacctgctcttcctgctgggcctgaccagctctgtgtgcatcgtggccgagatcatcaagaaggtggagaggagccgggagaagatccagaagcacgtgagcagcaccagcagcagcttcctggaggtgtggctgtgggagaggagcggccagcagctggtggagatccacccccacctggagaccggcctgcccctgacagaagatgtgtcctgtgtgtag

SEQ ID NO: 18520 - DNA, 2760 bp, Artificial Sequence
  derived and/or modified sequence
atgaaggtggcccgcttccagaagatccccaatggagaaaatgagaccatgatccctgtgctgaccagcaagaaggccagcgagctgcctgtgtctgaggtggccagcatcctgcaggccgacctgcagaatggcctgaacaagtgtgaggtgagccaccggcgggccttccacggctggaatgaatttgacatcagtgaagatgagcccctgtggaagaagtacatcagccagttcaagaaccccctcatcatgctgctgctggccagcgctgtgatctctgtgctgatgcaccagtttgatgatgctgtgtccatcaccgtggccatcctgattgtggtgacagtggcctttgtgcaggagtacagaagtgagaagagcctggaggagctgagcaagctggtgcccccagagtgccactgtgtgcgggagggcaagctggagcacaccctggcccgggacctggtgcctggggacacagtgtgcctgtctgtgggggacagagtgcctgctgacctgcggctgtttgaggccgtggacctgagcattgatgagagcagcctgactggagagaccaccccctgcagcaaggtgacagccccccagcctgctgccaccaatggagacctggccagccgcagcaacatcgccttcatgggcaccctggtgcgctgtgggaaggccaagggcgtggtgattggaactggagaaaattctgaatttggagaggtgttcaagatgatgcaggccgaggaggcccccaagacccccctgcagaagtccatggacctgctgggcaagcagctgtccttctacagctttggcatcatcggcatcatcatgctggtgggctggctgctgggcaaggacatcctggagatgttcaccatctctgtgtccctggccgtggccgccatccctgagggcctgcccatcgtggtgacagtgaccctggccctgggcgtgatgaggatggtgaagaagagggccatcgtgaagaagctgcccatcgtggagaccctgggctgctgcaacgtcatctgcagcgacaagacaggcaccctgaccaagaatgagatgacagtgacccacatcttcaccagtgatggcctgcatgctgaggtgactggagtgggctacaaccagtttggagaggtgattgtggatggagatgtggtgcacggcttctacaacccagctgtgagccgcatcgtggaggccggctgtgtgtgcaatgatgctgtgatccggaacaacaccctgatgggcaagcccacagagggcgccctgattgccctggccatgaagatgggcctggatggcctgcagcaggactacatcaggaaggccgagtaccccttcagcagcgagcagaagtggatggctgtgaagtgtgtgcacaggacccagcaggacaggcctgagatctgcttcatgaagggggcctatgagcaggtgatcaagtactgcaccacctaccagagcaagggccagaccctgaccctgacccagcagcagagagatgtgtaccagcaggagaaggccaggatgggcagcgctggcctgcgggtgctggccctggccagcggccctgagctgggccagctgaccttcctgggcctggtgggcatcattgatcctcccaggactggagtgaaggaggccgtgaccaccctcatcgccagcggcgtgtccatcaagatgatcaccggggacagccaggagacagctgtggccatcgccagccggctgggcctgtacagcaagaccagccagagcgtgtctggagaggagattgatgccatggatgtgcagcagctgagccagatcgtgcccaaggtggccgtgttctaccgggccagccccaggcacaagatgaagatcatcaagagcctgcagaagaatggatctgtggtggccatgactggagatggagtgaatgatgctgtggccctgaaggctgctgacattggagtggccatgggccagacaggaacagatgtgtgcaaggaggccgctgacatgatcctggtggatgatgacttccagaccatcatgtctgccatcgaggagggcaagggcatctacaacaacatcaagaactttgtgcgcttccagctgagcaccagcattgctgccctgaccctcatcagcctggccaccctgatgaacttccccaaccccctgaatgccatgcagatcctgtggatcaacatcatcatggatggccccccagcccagagcctgggcgtggagcctgtggacaaggatgtgatcaggaagccacccaggaactggaaggacagcatcctgaccaagaacctgatcctgaagatcctggtgagcagcatcatcatcgtgtgtggcaccctgtttgtgttctggagggagctgcgggacaacgtcatcaccccccgggacaccaccatgaccttcacctgctttgtgttctttgacatgtttaatgccctgagcagccgcagccagaccaagtctgtgtttgagatcggcctgtgcagcaacaggatgttctgctatgctgtgctgggcagcatcatgggccagctgctggtgatctacttcccccccctgcagaaggtgttccagacagagagcctgagcatcctggacctgctcttcctgctgggcctgaccagctctgtgtgcatcgtggccgagatcatcaagaaggtggagaggagccgggagaagatccagaagcacgtgagcagcaccagcagcagcttcctggaggtgtag

SEQ ID NO: 18521 - DNA, 2712 bp, Artificial Sequence
  derived and/or modified sequence
atgatccctgtgctgaccagcaagaaggccagcgagctgcctgtgtctgaggtggccagcatcctgcaggccgacctgcagaatggcctgaacaagtgtgaggtgagccaccggcgggccttccacggctggaatgaatttgacatcagtgaagatgagcccctgtggaagaagtacatcagccagttcaagaaccccctcatcatgctgctgctggccagcgctgtgatctctgtgctgatgcaccagtttgatgatgctgtgtccatcaccgtggccatcctgattgtggtgacagtggcctttgtgcaggagtacagaagtgagaagagcctggaggagctgagcaagctggtgcccccagagtgccactgtgtgcgggagggcaagctggagcacaccctggcccgggacctggtgcctggggacacagtgtgcctgtctgtgggggacagagtgcctgctgacctgcggctgtttgaggccgtggacctgagcattgatgagagcagcctgactggagagaccaccccctgcagcaaggtgacagccccccagcctgctgccaccaatggagacctggccagccgcagcaacatcgccttcatgggcaccctggtgcgctgtgggaaggccaagggcgtggtgattggaactggagaaaattctgaatttggagaggtgttcaagatgatgcaggccgaggaggcccccaagacccccctgcagaagtccatggacctgctgggcaagcagctgtccttctacagctttggcatcatcggcatcatcatgctggtgggctggctgctgggcaaggacatcctggagatgttcaccatctctgtgtccctggccgtggccgccatccctgagggcctgcccatcgtggtgacagtgaccctggccctgggcgtgatgaggatggtgaagaagagggccatcgtgaagaagctgcccatcgtggagaccctgggctgctgcaacgtcatctgcagcgacaagacaggcaccctgaccaagaatgagatgacagtgacccacatcttcaccagtgatggcctgcatgctgaggtgactggagtgggctacaaccagtttggagaggtgattgtggatggagatgtggtgcacggcttctacaacccagctgtgagccgcatcgtggaggccggctgtgtgtgcaatgatgctgtgatccggaacaacaccctgatgggcaagcccacagagggcgccctgattgccctggccatgaagatgggcctggatggcctgcagcaggactacatcaggaaggccgagtaccccttcagcagcgagcagaagtggatggctgtgaagtgtgtgcacaggacccagcaggacaggcctgagatctgcttcatgaagggggcctatgagcaggtgatcaagtactgcaccacctaccagagcaagggccagaccctgaccctgacccagcagcagagagatgtgtaccagcaggagaaggccaggatgggcagcgctggcctgcgggtgctggccctggccagcggccctgagctgggccagctgaccttcctgggcctggtgggcatcattgatcctcccaggactggagtgaaggaggccgtgaccaccctcatcgccagcggcgtgtccatcaagatgatcaccggggacagccaggagacagctgtggccatcgccagccggctgggcctgtacagcaagaccagccagagcgtgtctggagaggagattgatgccatggatgtgcagcagctgagccagatcgtgcccaaggtggccgtgttctaccgggccagccccaggcacaagatgaagatcatcaagagcctgcagaagaatggatctgtggtggccatgactggagatggagtgaatgatgctgtggccctgaaggctgctgacattggagtggccatgggccagacaggaacagatgtgtgcaaggaggccgctgacatgatcctggtggatgatgacttccagaccatcatgtctgccatcgaggagggcaagggcatctacaacaacatcaagaactttgtgcgcttccagctgagcaccagcattgctgccctgaccctcatcagcctggccaccctgatgaacttccccaaccccctgaatgccatgcagatcctgtggatcaacatcatcatggatggccccccagcccagagcctgggcgtggagcctgtggacaaggatgtgatcaggaagccacccaggaactggaaggacagcatcctgaccaagaacctgatcctgaagatcctggtgagcagcatcatcatcgtgtgtggcaccctgtttgtgttctggagggagctgcgggacaacgtcatcaccccccgggacaccaccatgaccttcacctgctttgtgttctttgacatgtttaatgccctgagcagccgcagccagaccaagtctgtgtttgagatcggcctgtgcagcaacaggatgttctgctatgctgtgctgggcagcatcatgggccagctgctggtgatctacttcccccccctgcagaaggtgttccagacagagagcctgagcatcctggacctgctcttcctgctgggcctgaccagctctgtgtgcatcgtggccgagatcatcaagaaggtggagaggagccgggagaagatccagaagcacgtgagcagcaccagcagcagcttcctggaggtgtag

SEQ ID NO: 18522 - DNA, 2877 bp, Artificial Sequence
  derived and/or modified sequence
aaggtggcccggttccagaagatccccaacggcgagaacgagaccatgatacccgtgctgacctccaaaaaggccagcgaactgccagtgagtgaggtggccagcatcttgcaggcggatttacagaatggactcaacaagtgcgaagttagtcacaggagagcatttcacggttggaatgagtttgatatctccgaggacgagcccttgtggaagaagtacatctcccagtttaagaatccgctcattatgctgctgctcgcatctgctgtaatcagtgtgttgatgcaccagttcgatgacgcagtatccattacagtagctattctcatcgtggtcacagtggcttttgtccaggagtatcgttccgaaaagagcctcgaagaactgtcaaaactcgtgccacctgaatgccattgcgtcagggaaggaaaactggagcataccctggctagagacctcgtacccggagacaccgtttgcctctccgtgggggaccgggtgccagcggatttgcgcctcttcgaagctgttgaccttagtatagatgagtcctctctgaccggagagacaacaccatgctccaaggtcaccgctccacagcccgcagcgaccaacggggacctcgcatccagaagtaacatagcatttatgggtacattagtaagatgcggaaaggcaaagggcgtggtgattgggacgggcgagaattccgagttcggggaagttttcaaaatgatgcaggcagaggaggcacccaagacacccctccagaagtcgatggacctgcttggcaaacagttatccttctactcatttggaataatcggcataataatgctggttggatggcttctgggcaaggatatactcgagatgtttacaattagcgtttcactggctgtcgcggctatccccgaagggctgcctatagtggtgacggtcactttggcgctcggcgtgatgcgcatggtcaagaaacgagcgatcgtgaaaaagcttccgatagtcgagactctggggtgttgtaacgtaatatgttccgataaaacaggaaccctcactaagaacgagatgactgtaacgcacatcttcacgtccgatggtctgcatgccgaagtgactggggtgggatacaatcagttcggagaggtgatagttgacggggacgtagtgcatggattttacaaccctgccgtctctcgaattgtggaggccggctgcgtgtgtaatgacgccgtgattagaaataacactctcatggggaagcctacagaaggcgccttgatagctcttgctatgaagatgggacttgacggtctacagcaagattacattcgcaaggccgagtaccctttctcctcagagcagaaatggatggccgttaagtgcgtgcaccgcactcagcaggaccgccctgaaatctgtttcatgaagggggcctatgaacaagtaatcaaatattgtacgacttaccagtccaaaggccaaactttaactttgacccagcagcagcgcgacgtgtatcaacaggaaaaagctaggatgggttccgcgggactacgggtgcttgccctcgcatcaggacctgaattaggacagttgacattcctgggtctcgtgggaattatagacccgccccgcaccggcgtgaaggaggctgttacgactctcatcgcatccggtgtgtcgattaagatgattaccggggactctcaggaaaccgcagttgcgatcgcgtccagactgggactctactccaagactagccagagcgtctctggggaggaaatcgatgctatggacgtccagcagctatcccagatcgtccctaaagtcgccgtattctaccgggcttcacccagacataagatgaaaattataaagagtctccagaaaaatggcagtgtggtcgcaatgacaggcgatggcgtgaacgacgctgtggccctcaaagccgcagacatcggagttgccatggggcagaccggaaccgacgtatgcaaagaagcagctgatatgatattagtagatgacgactttcaaaccattatgtcagccattgaagagggtaagggaatttataacaacataaaaaacttcgttaggtttcagctgtcaacaagtatagccgccttgaccttgatctccctggcgacgttgatgaatttccctaatcccctcaatgctatgcagatcctttggataaacatcatcatggatggaccacccgctcagagcctgggggtagagcccgtggataaagatgtgataagaaagccccctagaaattggaaggatagcatcctaacgaaaaaccttatcctgaaaatcctagtgtccagtataattatcgtgtgcggcacactatttgtcttttggcgcgaactgcgcgacaacgtgattacaccccgtgatacgacaatgaccttcacctgttttgtattctttgacatgttcaacgctctgtcctctaggtcccaaacaaaaagcgtgttcgagattgggctgtgcagtaataggatgttctgctatgcagtcctgggctccatcatgggccagctgttggtcatctacttcccacccctgcagaaggtgtttcagaccgaaagtctgagcatcctggacttgctgtttcttttggggctgacctcctccgtctgcatcgtggccgaaattattaagaaggtggagcgaagtagagagaagatccaaaaacacgtgtcctcgaccagttcttcatttctggaagtgtccagttcatcgggcaacttcgtggccgtgtggctttgggagcgaagcggacagcagctcgtcgagattcatccccacctggagacaggcctgccgctcacagaagatgtcagctgtgtgtag

SEQ ID NO: 18523 - DNA, 2850 bp, Artificial Sequence
  derived and/or modified sequence
atgaaggtggcccggttccagaagatccccaacggcgagaacgagaccatgattccagtcctgaccagcaagaaagcatctgagcttccagtgagcgaggtggcaagcatcttgcaagcagaccttcagaatggactcaataaatgcgaagtgagccatcgcagagcgtttcacggatggaacgagtttgacatctctgaagatgaaccgctctggaaaaagtacatctcgcagttcaagaatcccctgattatgctcttactggcaagtgcggtcatctctgttctgatgcatcaattcgacgatgctgtgtctattaccgtggcaattttgatagttgtgacggtcgcctttgttcaagagtatagatctgaaaagagtttagaggagctttctaaactagtgccccctgagtgccattgtgtgcgagagggtaaactggaacacaccttagcacgggatttagttcccggcgatacagtgtgtttaagcgtgggcgaccgcgtgccagctgacctcagactcttcgaagccgttgacctttccattgacgaaagctccctaacaggtgagacgaccccttgtagtaaagtgaccgcaccccaacccgccgctactaacggcgacctagcttctaggtctaacatagccttcatgggaactctggtaagatgtggaaaggcaaaaggagtggtcattggaactggcgagaactccgagttcggggaagtcttcaagatgatgcaggccgaggaggcacccaagacgccattacaaaaaagcatggacctcctgggaaaacagctgtccttctattccttcggtattatcggcattatcatgctggtgggctggctgctcgggaaagatattctcgaaatgtttactatctctgtcagtttggccgttgcagcgatacccgaaggcctgccaatcgtggtgactgtgactctagcactaggcgttatgaggatggtcaagaagagagctattgtaaaaaaattgcctatcgttgagaccctcggatgctgtaacgtcatatgctcggataagaccggtactctgaccaagaacgagatgacagtcacgcacatctttaccagtgatgggctgcacgctgaagttactggggtaggctacaaccagttcggcgaggtgatcgtcgacggagatgtggttcatggcttttacaacccagccgtatctaggattgtggaggccggctgcgtatgcaatgatgctgttattcgtaataataccttgatggggaagcctacggagggggccctcatcgctctcgccatgaagatgggcctggacggccttcaacaagactatatccggaaggcagaataccccttttctagtgagcagaagtggatggcggttaagtgcgtgcataggacccaacaggatcggcccgagatctgtttcatgaagggcgcctacgagcaggtgattaaatactgtactacatatcaatccaagggacagacattaacgttgacgcagcagcagcgtgatgtctaccagcaggagaaggcacgtatggggtcggccggcctgcgagtgttggcccttgcttccggtcccgaacttggacagctaacattcctgggcctcgtgggaatcatcgacccgccgcgcaccggcgtaaaagaagcggtaaccaccctgatcgcctctggcgtgagtatcaagatgatcactggggactcacaggaaacggctgtagcaattgcatcacggctaggactgtactctaagactagtcaaagtgtttcaggcgaggaaatcgacgccatggatgtccaacagctgagtcaaattgtaccgaaagtggcagtgttctaccgcgcttcgccccgtcacaagatgaaaatcattaagtcgcttcaaaagaacgggagtgtcgtggccatgacaggagatggcgtgaacgatgcagttgcactcaaagccgccgacattggcgtcgccatgggccagaccgggactgacgtttgtaaggaggcagctgatatgatcctggttgacgacgactttcagacaattatgtctgcgatcgaggaaggcaagggtatatataataacattaagaattttgtcaggtttcagctgtcaacctccattgccgccctcaccctgatctcccttgcaaccctaatgaatttcccgaaccccctgaacgccatgcagatcctgtggatcaatattataatggacggacctcccgcccagagtctcggggtggagccagtagataaggatgtgattcgcaagcccccacggaactggaaggacagcattctgaccaaaaatctgatcctgaaaattctcgtgtcatccatcatcattgtgtgtggaactctgttcgtgttctggcgagaattacgcgataatgtcataactccaagagataccactatgacctttacatgctttgttttcttcgacatgttcaatgcactgtccagtaggtcacagaccaaaagcgtgttcgagatcggcctgtgtagtaatcgaatgttctgctacgctgtgctgggctctattatgggtcagctgctagtgatttattttcccccattgcaaaaggtctttcagaccgaatcgctgtctatattggatctgttattcctcctgggtctcacaagtagtgtgtgtatcgtcgccgagatcataaaaaaggtagagagatcccgcgagaagatccaaaaacacgtcagcagtacctccagttcctttttagaggtttggctgtgggagcgaagcggccagcaactcgtggagatccacccacatctcgagaccggactccctttgacggaggatgtgtcctgcgtgtag

SEQ ID NO: 18524 - DNA, 2760 bp, Artificial Sequence
  derived and/or modified sequence
atgaaggtggcccggttccagaagatccccaacggcgagaacgagaccatgattcccgtgctgacgtctaaaaaggcatcagaactgccagtctctgaagtagcgtcaatcttacaggccgacctacagaacggcctcaacaagtgtgaagtgtctcacaggcgggcattccacggttggaacgagttcgacatttcagaggatgagcccctttggaaaaagtatatctcacagtttaagaatccgctcatcatgctgctgctggcctccgcggtaatcagcgtcctgatgcaccagttcgatgacgccgtatctattactgtggccatcctaattgtcgtcacagtcgcgttcgtccaggagtaccgatccgaaaaaagcctagaagagctgagcaaattggtaccacccgaatgtcattgcgtgcgggagggcaaactggagcatacactggcacgtgacctagtacccggcgacacagtctgcctgagtgtcggggatcgggtacccgctgatctgcgactttttgaagccgtggacttgagcattgatgagtccagcctcactggcgagaccaccccatgtagtaaggtaacggccccccagccggctgcgactaacggggatctggcaagccggtccaacattgcctttatgggcaccttggttagatgcgggaaagcaaagggcgtggtgattggtaccggcgaaaattcagagttcggcgaggtttttaagatgatgcaggccgaggaagcccctaaaactccgctgcagaaaagtatggacctgcttgggaagcagctgagcttttacagtttcggcatcatcgggatcattatgctggtggggtggctacttggcaaagacattttagagatgtttacgatcagcgttagtctggcagtcgcagccattcccgaagggctgcctattgttgtcactgtcacacttgctcttggggtcatgaggatggttaagaagagggctattgtcaagaaacttccgattgttgaaaccctcggctgttgcaatgtaatctgctcggataagaccggcactttaacgaaaaacgaaatgacagttacccacattttcactagtgatggcctccacgcggaagttacgggcgtaggatataatcaatttggggaggtgattgtcgatggcgacgtcgtgcacggtttctacaatcccgctgtatctagaattgtggaagcaggctgtgtctgcaatgacgcagtcatccggaataacaccctcatgggaaagccgaccgagggcgccctgatcgcattggccatgaagatgggcctagacggtttacagcaagactacattaggaaggccgagtacccatttagctctgagcagaagtggatggccgtgaaatgcgtacaccgaacacagcaagaccggcccgaaatctgtttcatgaagggtgcatatgaacaggtgatcaaatattgtaccacctatcagtcaaaggggcaaacattgaccctgacccagcaacagagggacgtctatcagcaggagaaagcacggatgggatcagcgggattgagagttcttgccctcgcttcagggcctgaactgggacagttgacttttcttggattggtcggcatcatagatcctcctcgcacgggggtgaaggaggcggttacaactctgatcgcctcgggtgtgtctattaaaatgataaccggcgatagtcaggagacggctgttgccatcgcatcccggctgggcctgtactccaagacctctcagagcgtgagcggagaggaaatcgatgccatggacgttcaacagcttagtcaaatcgtaccaaaagtcgccgtgttctaccgagcctccccaaggcacaagatgaagatcatcaagagtctacaaaaaaacgggtccgtcgtggccatgacaggcgatggcgtcaacgatgccgttgccctgaaggccgctgatataggcgtggccatgggccagaccggaactgacgtctgtaaggaagccgctgatatgattttggtagacgacgacttccagaccatcatgagcgccatagaagaggggaaaggtatttataataacattaagaactttgtccgctttcagcttagcaccagcatcgccgccctgaccctgatttccctggccacactgatgaattttcctaaccccctcaacgcaatgcaaatcctttggataaacatcatcatggacggacctccagcccagtccctcggcgtcgaacccgttgataaggacgtgatcaggaagccaccaagaaactggaaagattctattcttacaaaaaacttaattctcaagattttggtgtcaagtataataatcgtctgcgggacactctttgtcttttggagagagctcagagacaacgtcattacgccaagggacactactatgacctttacttgttttgtgttttttgatatgttcaacgcattatcttcacgatctcagacgaagtcagtctttgagataggtctttgtagtaatagaatgttctgttacgcggtcctgggctcaatcatggggcagctgctcgtgatatactttccccccttacagaaagtgtttcagacagaaagtctgtccattcttgatctgctgtttctcctgggtttaacttcaagcgtttgcatcgttgccgaaatcattaagaaggtcgaacgatctcgcgagaagattcaaaagcatgtgagctccacatcgagctcttttttggaggtttag

SEQ ID NO: 18525 - DNA, 2712 bp, Artificial Sequence
  derived and/or modified sequence
atgatccccgtgctgaccagcaagaaggccagcgagctgcccgtgtccgaagtcgcaagtatcctccaggccgacttgcaaaatggtctgaacaaatgtgaagtgagtcaccgaagagctttccacggctggaacgagtttgacatttcagaggacgagcctttgtggaaaaagtatatcagccagtttaagaatcccctgatcatgctcctcctggcctcagcagtaatcagtgtgctgatgcaccagttcgatgacgcagtgtcaatcacagtggcaatcctaatagtggtgaccgtagcctttgttcaggaatatcggtctgaaaaatctttggaagagttatcaaaactcgtaccacctgagtgccattgtgtgcgagaaggaaaactagagcataccctcgctagggacctagtgccaggtgataccgtgtgtctgtctgtgggtgatagggtcccagccgacctcaggttgtttgaggctgtggaccttagcatcgacgagagttcgctcaccggagagaccactccctgttccaaagtcactgccccacagcctgcggccacaaatggcgatctggccagcagaagtaatattgctttcatggggacgctggttaggtgcggaaaggctaaaggcgtagttatcggtacgggtgaaaacagcgagttcggagaagttttcaagatgatgcaagccgaggaagcccccaaaaccccactacagaagtcaatggacctattaggtaagcagctgtccttctatagcttcggaataattgggattatcatgctggtgggttggctgctcggaaaggacattctagagatgttcaccatcagcgtatcccttgccgttgcagcgattcccgagggtctaccgattgttgttaccgtgaccctggcgctcggagtaatgcggatggtaaaaaagagggcgatcgtgaagaagctgcccatcgtggagaccctgggctgttgcaatgttatttgcagcgataagaccgggacactgacgaaaaacgaaatgaccgtcactcatatctttacaagtgatggcctgcacgcagaggttaccggggtcgggtacaaccagttcggtgaggtgatcgtcgatggtgacgtcgtccatggtttctataatcctgctgtcagtaggatagtcgaagcaggctgcgtctgtaacgacgctgtgattcgcaataatacgctgatgggcaagcctacagaaggagcgcttatagctctggccatgaagatggggcttgatggattacagcaggactacattaggaaggcagagtatccattctcatcagaacagaaatggatggcggtgaaatgcgtccacagaacacagcaggacaggcctgagatttgtttcatgaaaggggcttatgagcaggtgattaagtactgtacgacatatcaatcaaaaggtcagactttaactctcacacagcagcagagggacgtttaccaacaggagaaagccagaatgggatccgctggactgcgagtgctcgccttggctagcggtcccgaactaggtcagctcacattcctcggcttagtgggcatcattgatcccccacggactggcgttaaagaggctgtgactaccctaattgcctcgggggtgtccatcaagatgattactggagactctcaagagactgcagtggccattgcatcaaggctgggcctttatagcaagacaagtcagagtgtatccggcgaggagatcgatgcaatggacgtgcagcagctgagccagattgttccaaaagtggccgtgttctacagagccagcccgcggcacaaaatgaaaatcattaagtccttacaaaagaacggtagtgtggtggccatgactggcgatggagtcaatgacgctgtagctttgaaagctgccgatataggggtggccatgggtcagaccggtactgacgtgtgtaaagaagccgccgacatgatcctagtggacgatgacttccagaccataatgtctgcgattgaggaaggcaagggtatctataataacatcaagaatttcgtcagatttcaattgtcaacatcaattgccgccctgacccttatctcactggccactctgatgaattttcccaaccccctgaatgccatgcagatactatggattaatatcatcatggatggaccgcctgctcagtcccttggtgttgagccagtggacaaagacgtgatccgcaagcccccaaggaattggaaagatagtatcctgaccaagaatcttatactgaaaattctggtgagttccataattatcgtctgtggcaccctttttgtgttctggagagagttgagagacaatgtaataactccacgagatacaacaatgaccttcacatgtttcgtttttttcgacatgtttaacgccctctcatctcgctcccagactaaatctgtttttgagatcggcctatgctctaatcggatgttttgctatgcagttctgggatctattatgggccagctgctcgtgatctactttccgcccctgcagaaagtctttcagacagagtcgctcagcatcctggacctgctctttttattaggcttgacgtcatccgtgtgtatcgtggcagaaatcatcaagaaagtggagcgcagccgtgaaaaaattcagaaacatgtgtcaagtacgagcagctccttcttggaggtctag

SEQ ID NO: 18526 - DNA, 2712 bp, Artificial Sequence
  derived and/or modified sequence
atgatccccgtgctgaccagcaagaaggccagcgagctgcccgtgtctgaggttgccagcattctccaggccgatctgcagaatgggctgaataagtgcgaggttagccataggcgagcattccacggttggaacgagtttgatatctctgaggatgagccattgtggaaaaagtacatcagtcagttcaaaaaccctctgattatgttgctgctggcgtcagccgtcatcagcgtgctgatgcaccaatttgacgacgccgtgtcaatcactgtggcaattttaatcgtcgtgactgttgcctttgttcaagagtaccggtcagagaaatccctagaagaactgtcaaagttggttcctcccgagtgtcattgcgtaagagaaggcaaactggagcacacactggctcgcgacttggtccctggcgacaccgtgtgtctctctgttggggatcgggtacctgctgacctacgactttttgaagcagttgatttaagtattgacgaaagctcactcacaggcgagactaccccttgtagcaaggttacggccccgcagcccgccgcaacgaatggtgatcttgcaagtagatcaaatatagcctttatgggtaccctcgtgcgctgcggtaaggctaaaggcgtggtgattgggacaggtgaaaacagcgagtttggggaagtatttaaaatgatgcaggctgaggaagcccccaagacacccctccaaaaaagcatggaccttctgggcaagcaactgtccttttactcattcggaatcataggcatcattatgttagtgggatggctgctgggaaaagacatcctcgagatgtttacaattagtgttagtttagcagtggccgccatccctgagggactgcctatcgtggtcaccgttactctggccttgggtgtgatgcggatggtgaaaaagagagctattgtgaagaagctaccaattgtggaaacactgggctgctgtaacgttatttgctcagacaagaccgggactttaacaaaaaatgaaatgacagtgactcacattttcacaagtgacggcttacacgccgaggtcactggtgtgggctataatcaatttggtgaggtgattgtcgacggggatgtagtgcacggtttctacaaccctgcagtgagtaggatagttgaagctggctgcgtctgcaacgacgcagttattcgcaataatacactgatgggtaagccaactgagggtgccctgatcgctttggcgatgaagatgggcctggacggactgcagcaggattatatcaggaaagctgaatacccatttagcagtgagcaaaagtggatggctgtgaaatgcgtgcatagaactcaacaggacagacccgagatctgcttcatgaagggcgcgtacgagcaagtgattaaatactgtaccacctaccagtccaagggacagactctaacactcactcagcaacagagagacgtataccagcaagagaaggcccgcatgggcagcgctggcttgagagtactcgccctggcctcagggccagaactcgggcagcttacctttctggggctggtgggcattatagaccctcctcggactggtgtcaaggaagccgtcaccacacttatcgcttccggcgtctctattaaaatgattacaggggactctcaggagaccgccgtggcaattgcgagcaggctcgggctctactcaaagacatctcaaagcgtgtctggtgaagagattgatgctatggacgtgcagcagctatcacagatcgtgcccaaggtggccgtgttttaccgtgcctctccaagacataagatgaaaatcattaagtccctccagaagaacggctccgtcgtcgccatgaccggggacggcgtgaatgacgctgtggctcttaaggcagcagacatcggcgtcgccatggggcagacagggacagatgtgtgcaaggaggctgctgatatgattctagttgatgacgacttccagacgatcatgagtgcaattgaagagggaaaagggatttacaacaatatcaagaactttgtgcgctttcagctgagtacaagcattgctgccctgactcttatttcccttgctacgttgatgaactttccaaaccccctgaacgccatgcaaattctgtggatcaatatcataatggacggcccccctgcccaatcgctgggcgtggaaccagtcgataaagacgtcatccgaaaacccccccgcaattggaaggattctattcttactaagaatctgatcctgaaaatcctcgtgtcaagtataatcatcgtatgcggcaccctgttcgtcttctggcgggaactgcgcgacaatgtaattacacccagggacaccactatgactttcacctgtttcgttttttttgatatgtttaacgcactttccagtcggtcccagacaaagtcagtgttcgaaatcggcctgtgctctaaccgaatgttctgttatgccgtcctggggtccataatgggccagcttctcgttatttatttcccgcctttgcagaaagtatttcaaactgagagcctgagcattttagatctcctctttcttctgggtctgacctcgtccgtgtgtatagtggccgaaatcataaaaaaggtcgaacgatctcgtgagaagatccagaaacatgtttcctctacatcttcgtcctttctggaggtctag

SEQ ID NO: 18527 - DNA, 2760 bp, Artificial Sequence
  derived and/or modified sequence
atgaaggtggcccggttccagaagatccccaacggcgagaacgagaccatgatcccggtgttgacttctaagaaagctagcgaactgccagtttcagaagtggcgtctattctgcaagcagacctacagaatggattgaacaaatgcgaggtcagccacagacgggctttccatgggtggaacgagttcgacataagcgaagatgagcctctgtggaagaaatacataagccagttcaagaaccccctaataatgttgttgctggccagtgcggtcatttcagttctgatgcaccagttcgacgacgcggtgtcgatcacagtcgcgatcctcattgtagtgactgtcgcattcgtccaggaataccgcagcgaaaagagcctggaggagctctctaagctggtacctccagagtgtcactgcgttcgcgaaggcaagctagagcacaccctcgctcgcgacctagtaccaggcgacaccgtctgcctgagtgtgggcgatcgggtgccagctgaccttaggttgttcgaggctgtcgacctatctattgacgaaagttcactcaccggtgagacaaccccctgtagtaaagtgactgcgccccagccagcagcaacgaatggcgatctggcatctcggtccaacattgcttttatgggaacactcgtgcgatgcggtaaggcaaaaggagtggttattggcacaggtgaaaacagcgagttcggcgaggtgtttaaaatgatgcaagccgaggaagcaccaaagactccccttcagaaaagcatggatctcctcggcaaacagttatcgttctatagttttggtatcattggtattatcatgctcgtgggttggctcctcggaaaggacattctggaaatgtttactatctctgtgtccctggccgtagcggctatccctgaagggttgcctattgtggtgacggttaccctggcgcttggggtgatgaggatggtcaagaagcgagccatcgtgaagaaactgcccatcgtagaaacacttggttgctgcaatgttatctgcagtgacaaaaccggaacactgactaaaaatgaaatgaccgtgactcatattttcacatccgatggcctgcacgctgaggtaacaggcgtgggctataaccagttcggtgaggtcattgtcgacggagacgtcgtgcacggcttttataaccccgccgtaagccgtattgttgaagccggctgtgtctgcaatgatgcagtgattcggaacaatacactcatgggtaagcctacggaaggagcgctgatcgcattagccatgaaaatgggcctggacggcctacaacaggattacattcgcaaggccgaataccctttcagctctgaacagaagtggatggccgtgaagtgcgtccacaggacacagcaggataggccagaaatttgtttcatgaaaggcgcatatgagcaagtcattaaatactgcaccacgtaccagagcaaagggcagacgctgactctgacacagcagcagcgagatgtctatcagcaggaaaaggcaaggatgggatcagccggcttgagggtgctggcgctggcttcaggaccagagttaggacagcttactttcctcggcctagtggggattatagacccaccccgcaccggtgtgaaggaggctgtaaccaccctcatcgcatccggagtgtctattaaaatgattacaggggattcgcaggaaaccgctgttgccatcgcatcccgtctcggcctgtattcaaagacaagtcagtctgtatccggcgaggagattgatgccatggatgtccagcaactatctcagatcgtgccaaaggtggctgtgttttatcgggcttcacctcggcataagatgaagatcattaaaagcctccagaaaaatgggagtgtggtggccatgacaggggacggggtcaacgatgctgtggccttaaaggccgccgacattggcgtagccatgggacaaaccggcactgacgtctgtaaggaggccgctgatatgatactggtcgacgacgattttcagaccataatgtctgccatcgaggagggtaagggcatttacaacaatatcaagaactttgtgcggttccagttgtcaacttctatcgccgctctgacgctcattagcctggccactctgatgaatttcccaaatccactgaatgcaatgcagatcctttggatcaacatcattatggacggaccccctgcccagtcccttggggtggaacctgttgataaggacgtcattaggaagccaccacgcaactggaaagacagcatcttaactaagaatctcatcctgaaaatcttggtgagctcaataatcatagtatgcggcacactcttcgtcttttggagggagctgcgagacaatgttataacccctcgcgatacaacaatgacattcacatgcttcgtgttcttcgatatgttcaatgctctctcctctagatcacaaaccaagtctgtgttcgagattggcctctgttcaaataggatgttctgctacgccgtcttgggttctatcatgggccaattactcgttatatacttccccccgctgcaaaaggtttttcagacggaaagcctgtccattctcgatctgttgttcttattgggcctaaccagctctgtgtgtatagtcgcagagattattaagaaggtcgagcgctcacgagagaaaatccagaaacatgtctcttctacatcctcatccttcctggaagtctag

SEQ ID NO: 18528 - DNA, 2760 bp, Artificial Sequence
  derived and/or modified sequence
atgaaggtggcccggttccagaagatccccaacggcgagaacgagaccatgattcccgtcctgacatcaaagaaagcatctgagctgcctgttagcgaagtggcgtccattctacaagcggatctgcagaatggtttgaacaaatgtgaggtttcgcaccgccgcgcatttcacgggtggaacgagttcgacatttccgaggatgaacctttgtggaaaaagtatatctcacagttcaaaaatccactcatcatgctactcctggctagcgccgtgatctctgttctgatgcatcagttcgacgatgcggtgtccattactgtggctatactcattgtggtgacggtcgcctttgtacaggagtatcgctctgagaagtcgctggaagagttaagcaagctcgtaccccccgaatgtcattgcgtccgggagggtaagctagagcacactttggccagagacctcgttcctggcgacaccgtatgcttgtccgtcggtgatcgggtgccggctgatctacgacttttcgaggctgtcgacctcagcatcgatgaatcatctttaactggcgaaacgacaccatgttccaaggtaactgcaccacagccggccgcaactaacggcgacctcgcgagtagaagcaatatcgcgtttatgggcacactggttcggtgcggcaaggcgaagggggtcgtcataggaactggcgagaactcagaatttggggaggtttttaagatgatgcaggccgaggaggcccctaagacccctttgcaaaaaagcatggatcttctaggtaaacagctgtctttttattccttcggcatcattgggatcattatgttggttggctggctgctggggaaggacatcctagagatgttcacaatcagcgtttctctagctgtggcggccatccctgaaggcttgccaatagttgttactgtcactttagctctgggtgttatgaggatggttaaaaagcgcgctatcgtgaagaagctcccgatagtagaaacactcggttgctgtaatgtgatctgtagcgataagactggtacattaaccaaaaatgagatgacggtcacacatatatttacttcggatggccttcatgcagaggtgaccggggtcggctacaatcagttcggtgaggtcatcgttgacggcgatgtcgtccatgggttctacaatccagccgtgtctcgtattgtggaagctggctgtgtgtgcaacgacgcagttatacgtaataacacactgatgggcaagccaaccgagggcgccctcatcgcattagctatgaagatgggtctggacggtctccaacaggactatattcggaaggcggaataccccttcagctccgaacagaagtggatggccgttaaatgcgtgcaccgaacacaacaggacaggccagaaatttgctttatgaagggcgcctatgagcaggtaatcaagtattgcacaacctatcagtccaaagggcagacgctgacactaactcagcaacagcgggatgtttatcaacaggaaaaagctcggatgggttccgccggccttcgggtattagccctcgcctcagggcccgagctcggccagctgactttcctgggcctggtcggaattatcgatccgcccagaaccggagtgaaggaggccgtgaccacccttatcgccagcggagtgtctatcaaaatgattaccggtgacagccaggagaccgcggtcgcgatcgctagccgtctcggtctttactccaagacaagtcaatcggtgagcggagaggaaatagatgcgatggacgtacagcagttgtctcaaatcgtgccgaaagtcgcagttttttaccgcgctagccctaggcacaagatgaagatcattaagagccttcaaaagaatggcagtgtggtcgccatgacaggcgacggcgtaaacgatgccgtggcgctaaaggccgcagatatcggtgtggctatggggcagaccggaaccgatgtgtgcaaagaggcggcagatatgatactggtggacgatgacttccagacaattatgtctgccatcgaggaaggaaaaggaatctacaacaacataaagaatttcgtgcggttccagttaagtacaagcatcgctgctctaacactgatctcgttggcaactctgatgaattttcccaatcctttgaacgccatgcagatactgtggatcaacattatcatggatgggcccccagcgcagagcttgggggtcgaacctgtagacaaggatgtcatccgtaaacctcccaggaattggaaagattcaatcctgaccaagaacctgatcctcaagatcttggtgagctctataatcatagtctgtggtaccctattcgtcttctggagagaactccgggataatgtaatcacccctcgagacaccactatgactttcacttgtttcgttttctttgacatgtttaatgcgctttcaagccgctcccagacgaagtctgtgttcgagatcgggttgtgctcaaatcggatgttttgctatgccgtgctcgggtccattatgggtcagctcctggtgatttattttcctcctctgcaaaaagtgttccagaccgaaagcctttcgatcctcgatctgttattccttttgggtctcacctcctccgtgtgcatcgtggccgaaattatcaaaaaggtggagcgatctcgggaaaaaattcagaagcacgtttcttctaccagcagcagctttctggaagtttag

SEQ ID NO: 18529 - DNA, 2877 bp, Artificial Sequence
  derived and/or modified sequence
aaagtggctagatttcaaaagatacccaacggtgaaaatgaaacgatgattcccgtgctgactagcaagaaggcttccgaactccctgtgtcagaagtggcttcaatactgcaggcagatttgcagaacgggctaaacaagtgtgaggtgagccatcgcagggcttttcatggatggaatgaattcgacatcagcgaggacgaaccattatggaaaaagtatatctctcaattcaaaaaccctctcatcatgcttttactggccagcgcagtaatttctgtattgatgcatcaattcgacgatgccgtcagcattaccgtagcgattctcatcgtggtgaccgtcgcttttgtacaggagtacaggagtgaaaagtccttggaggaactctctaagttggtcccccctgaatgccactgtgtgagagaaggcaagctcgaacatacactcgctagggatctggtgcctggagacactgtgtgcctgagcgttggcgatagggtgccagccgatctaagactgtttgaagccgtggatctgagcatcgatgaaagcagcctcacgggagagactactccttgttcaaaagtgaccgccccacagccagccgctaccaacggagacttggcctcacggtccaatatcgcattcatgggcaccttggtacgttgcggcaaagccaaaggtgtcgtgattggaaccggtgaaaattccgaatttggtgaagtgttcaagatgatgcaggctgaagaggctcccaagacccctcttcaaaagagtatggatctactgggtaaacagctatctttttatagcttcggaatcatcggcattatcatgctagtgggatggttactgggtaaggacatcctggagatgtttactataagtgtgtccctggcggttgcagccatccctgaaggcctgccaatagtcgttacagtgaccctggcacttggggtgatgcggatggtaaagaaaagagcaatcgtcaagaaattgccgatcgtggaaaccctcggttgctgcaatgtgatttgctctgataagacaggtaccctgactaagaatgagatgactgtgacccatatctttacatcggacggtctgcacgctgaggttaccggagtggggtataaccagttcggcgaagtcattgtggacggcgacgtggtgcatggcttctataatccagccgtaagccggatcgtggaggccggttgcgtctgcaacgatgcagtgatccggaacaacaccctgatgggaaaacctactgaaggcgctttaatagccctggcaatgaagatgggcttagacggcctccaacaggactacataaggaaagccgagtatcccttttctagcgaacaaaaatggatggcagtgaaatgcgtgcaccgcacccaacaagatcgccctgagatatgcttcatgaagggagcctacgagcaggttattaaatattgtaccacttatcagtccaaaggtcagactctgactttaacacaacagcagagggatgtgtatcagcaggagaaggctaggatgggttctgccggacttcgagttctggcactcgctagcggaccagagctgggccagctcactttcctgggtctggtggggatcattgacccacccagaacaggcgtgaaggaagcggtgacgaccctgattgcctccggggtgagcattaaaatgatcaccggcgatagtcaagagaccgctgtcgccatagcctctaggcttgggctgtactccaaaacatcgcagtctgtctccggggaggagatagacgccatggatgtccagcagcttagccagattgtgcccaaggtggctgtattttatcgcgcaagccctaggcacaagatgaaaatcattaaaagccttcagaagaatgggtcagtcgtcgcgatgacgggagatggggtaaatgacgctgtcgccctgaaggctgccgacataggggtcgctatgggacagacagggactgatgtgtgcaaggaagctgcagatatgatccttgtggacgatgactttcagaccatcatgtctgctatcgaagagggcaagggcatttataacaatatcaagaacttcgtccgctttcaattgtccacctccatagccgctctcactctcatttcactggctacgcttatgaactttcccaatccgttgaatgccatgcaaatcttatggattaatatcatcatggatggtccacctgcacagagtctaggcgtggagcccgttgacaaagacgtgatccgcaaaccccctcgtaattggaaagattcgattctgaccaagaacttgatcctgaagatcctggtatctagtattatcatcgtctgcggcactctgttcgtgttttggagggaactgagagacaacgtgatcaccccacgggataccactatgacattcacatgcttcgtgttttttgatatgtttaatgcactgagtagtaggtcccagacaaaaagcgtgtttgaaatcggtctgtgttctaaccgaatgttttgttatgctgtgctgggaagtattatgggacagttgctcgtcatctacttcccacccctccagaaagtgttccagaccgaaagcctcagtatccttgacctactttttctcctgggactcacctcctctgtttgtatcgtagcagagattatcaagaaggtcgaacgctccagagagaagatccagaagcatgtgtcttcaacatcctcatctttcctggaggtgtcgtcgtccagcggcaattttgtcgctgtatggctatgggaaagaagcgggcagcagctggtcgagattcacccccacctagaaacgggtcttccactgacggaggacgtgtcctgcgtgtag

SEQ ID NO: 18530 - DNA, 2850 bp, Artificial Sequence
  derived and/or modified sequence
atgaaagttgctcggttccagaagatacctaatggcgagaatgaaaccatgatccctgtgctcacatctaaaaaagcgtcagagctaccagtctccgaagttgctagtattctgcaagccgatctccagaatggcctgaataaatgcgaagtatcccataggcgcgcttttcacggttggaatgagtttgacattagcgaggacgagccactgtggaagaagtacattagccagttcaaaaatcccctcataatgctgctgttggcgtcagccgtgataagtgtgctgatgcatcagttcgatgacgctgtctcaatcactgtagccatattgatagtggtcacagtagctttcgtgcaggagtatcgcagcgaaaaatcactggaggagttgtcaaagctagtgccccctgaatgtcactgtgtccgagagggaaagctagagcacaccttggctcgcgatctagtaccgggagatacagtttgtctcagtgtgggggatagggttccagcagatctgcggctcttcgaggcagtggacctcagtattgatgagagctccctgacaggggaaacaaccccttgctctaaagtaacagctcctcagccagcagcaaccaacggcgacctcgcatctcgttctaacatcgcctttatggggactctagtgcgctgtgggaaggcaaagggtgtcgtgatcgggaccggcgaaaattcagaattcggcgaggtgtttaagatgatgcaggctgaggaggctcctaaaaccccgctgcagaagtcaatggatctgctgggtaaacagctctcattttacagctttggtatcattggcatcatcatgttggtggggtggctcctcggcaaggacatcttggagatgtttaccatatctgtgtctctagccgtggcagccatccctgaggggcttcccattgtggtcactgttaccttagcgttaggggtgatgcgcatggtaaagaagcgggctatcgtgaagaaactgccaatagttgaaaccttgggatgctgtaatgtgatatgctccgataagacagggacgctcacaaagaacgaaatgactgtgacccacatcttcacctcagacggattacacgccgaagtcaccggggtcgggtacaatcaatttggtgaagtgattgtcgacggggatgtcgttcacgggttttataatccagctgtaagccgcatagtcgaggctgggtgcgtgtgcaatgacgcggtcatccggaacaacaccttgatgggaaaacctacggagggcgcactcatcgctctagccatgaaaatgggactcgacggtctgcagcaggattacatccgaaaggccgagtatcccttctctagtgagcaaaagtggatggccgtgaaatgcgttcaccggacacagcaggatcgtcctgagatttgtttcatgaagggagcatacgagcaagtgattaaatattgcacaacctatcagtcaaaagggcagactctgacactgacccagcagcaacgcgacgtataccagcaggagaaagccaggatgggctcagctggcttgcgtgtgctcgccctggcctcaggtcctgaattgggtcagctgactttccttgggttggtggggattatcgaccccccacggaccggcgttaaggaagccgtgacaacacttattgctagtggtgtctctattaaaatgattaccggtgatagccaggaaacagctgtagccatagcctcacgcttgggtctatacagcaaaacttcccagagtgtatcaggagaggaaatcgatgctatggacgtgcagcaactgagccaaatcgtccctaaggtggcagtattctaccgggcatcaccccgacacaaaatgaaaattattaagagtctgcagaaaaacggaagcgtcgtcgctatgaccggggacggggttaacgatgccgttgccctgaaggctgcagacattggtgtcgcaatgggacaaaccggaaccgatgtgtgtaaggaggccgctgacatgatcttagtggatgatgacttccaaacgattatgtctgctattgaagaaggcaaagggatttataacaacatcaagaatttcgtgcgtttccagctttctacgtcaatcgctgccttgaccctgattagcttagccacgctcatgaacttcccgaacccacttaacgcaatgcagatcctctggataaatataattatggatggacctcctgcccagtcattgggagtcgagccagtagataaggacgtgatccgcaagcctccaagaaattggaaagatagtatccttaccaaaaatctgatcctcaaaattctcgtttcctcaataattatcgtctgtgggacgttattcgtgttctggcgcgaacttcgggacaacgtcatcactcctcgcgacaccaccatgacattcacatgtttcgtgttcttcgatatgtttaatgccctctctagccgctctcagaccaaaagcgtgttcgaaatcggcctgtgctcaaataggatgttctgttacgccgtgctggggtcaattatgggacagttgctggtaatttatttccccccactccaaaaagtgttccagactgaaagtctcagcatcttggatttgctatttctccttggtttgacgtcctccgtgtgcattgttgcagagatcataaaaaaagttgaacgatctcgcgagaagatccagaagcacgtgtcctcgactagctcttcttttttggaagtgtggttgtgggaaaggtccggacagcagctcgtcgaaatccatccacatcttgaaacaggcctgccgttgacagaagacgtgtcctgcgtgtag

SEQ ID NO: 18531 - DNA, 2760 bp, Artificial Sequence
  derived and/or modified sequence
atgaaagtggccagatttcagaagatcccaaacggggagaacgaaacaatgatcccggtgctgacttccaagaaggccagcgagctccctgtgtctgaagtggcctctatcctgcaggcagatctgcagaacggcttgaataaatgtgaggtgagtcacagacgtgcatttcacggttggaatgaatttgatatctcggaagacgagcccctctggaaaaagtacatctcccagttcaagaatcctttgattatgctgttactcgcatcagccgtaattagcgtattgatgcaccagtttgacgatgccgtgtctattactgtggctatcctgattgtcgtgacagtggcattcgttcaggagtatcggagcgaaaagagcctcgaagaactgagcaaacttgtcccaccagagtgtcattgtgtcagggaaggaaagttggaacatacgctagcgagagatttggttcctggtgatacagtctgcctgagcgtgggggatagagtacccgcagatcttcgtctgtttgaggcagtggacctgtccattgacgaatcttctcttaccggagaaactacaccatgttctaaggttacagcaccacagccagccgcaacaaacggggaccttgcaagccgctctaatattgcttttatggggactctcgttagatgcgggaaggctaaaggcgtagtcattggaacaggcgaaaactctgagtttggtgaggtgtttaagatgatgcaagcagaagaggccccaaagacgccactccagaaaagtatggacctgctgggcaagcagctgagcttctatagttttgggatcatcggcattattatgctggtgggatggcttctcggaaaggacatactggaaatgttcactatctccgtctcactcgcagtggcagccatcccggagggcttgccaatcgtggtcaccgtgactctggcccttggtgtcatgcggatggttaagaaacgtgccatagtgaaaaagttgcccattgtcgaaaccttgggctgttgtaacgtgatttgctcagataaaacaggcacactgaccaaaaacgagatgactgtaacccacattttcacaagcgacgggctgcacgctgaggtgacaggagtgggctataaccagttcggcgaagttatcgtggatggggatgtggttcacggcttctataatccagccgttagccgcatcgttgaggctgggtgcgtgtgcaacgatgctgttatcaggaacaacacactcatgggaaagcccacagaaggcgcactcatcgccctggccatgaagatgggactggacggcctacagcaagattacatccgtaaggccgagtacccgttcagcagtgaacaaaaatggatggctgtgaaatgcgtgcaccggacccaacaagacaggccagaaatttgttttatgaaaggagcttatgaacaggtgataaagtactgcacaacttaccaaagtaaaggccagactctcactctgacacagcaacaacgtgacgtttatcagcaggaaaaggctcgaatgggctcagcgggattaagagtgctggctctcgcgtcgggccctgagctcggccagctgacattcctggggctggtggggataattgacccaccgaggacaggggttaaagaagccgtgacaacccttatcgcgtccggcgtgtctatcaagatgattaccggtgattcgcaggaaaccgcggtagcgattgcatcacgcttaggactgtacagtaaaaccagccagtcagtgagcggagaagagatcgatgcgatggatgtccagcagctgtctcagattgtgcccaaagtagctgtcttctacagggcatcacctagacataagatgaaaattatcaaatccttgcagaaaaacgggagcgtggtggccatgacgggcgacggggtaaatgacgcagtggccctgaaggcggctgacattggagtggccatgggtcagactggcaccgacgtatgcaaggaggcagccgatatgatcctggtggacgatgactttcagacaattatgtctgccattgaggagggaaaaggcatctacaacaatatcaagaacttcgttaggttccagctgtcaacttccattgccgctcttacattgattagcctggccacattaatgaattttcccaacccccttaacgcgatgcagatcctttggattaatatcataatggacgggcctccagctcagagtctaggggtggaacccgtggacaaagatgtcatccgcaagcctcccaggaattggaaggattccattctgacaaagaacttaatcctcaaaattcttgtttcatccattatcatagtttgcgggacactatttgtgttttggcgggagctccgcgacaacgtgattacacctagggatactactatgactttcacctgtttcgtcttttttgacatgttcaatgcacttagtagccgctcacagaccaagagtgtgttcgaaatcggactttgcagcaacagaatgttctgttacgccgtcctagggtcgatcatgggtcagctgctcgtcatttattttccccctctgcagaaggtattccagacagagtccctgtctattttggacctgctgttcctgctcgggctaaccagttccgtgtgtattgtcgccgagattataaagaaagtggagcgctctagggagaagatacagaaacatgtcagttctacgagctctagcttcctcgaggtttag

SEQ ID NO: 18532 - DNA, 2712 bp, Artificial Sequence
  derived and/or modified sequence
atgatccccgtgctgacttctaagaaagccagcgagctaccagtcagcgaagtcgcctctatcctgcaagccgacctacaaaatggccttaacaagtgtgaagtatcacatagaagggcgtttcacggatggaatgaatttgatatctctgaagatgagccactgtggaagaagtacattagccagtttaagaatccactcattatgttactcctcgccagtgcagtcatcagtgttcttatgcatcaatttgatgacgcagtgtctatcacagtggcaatcctcatcgtcgtgacagtggcgttcgtgcaagagtatagaagcgagaaatcactggaagagctgtcgaaactcgtaccgcctgagtgccattgcgttcgagaaggcaagctcgagcacaccttggcacgagatctggtgcctggagataccgtgtgcttgtccgttggagaccgggttccagccgacctgaggctgtttgaggctgtagatttatctattgacgaaagttccctcacaggggagaccactccgtgcagcaaggttaccgctccccagcctgcggcaaccaatggcgacctggctagtcggtcgaatatcgctttcatgggcaccctggtgagatgtggaaaagctaaaggagttgtaattgggacaggagagaatagcgagtttggcgaggtgttcaaaatgatgcaggctgaggaggcacccaagactcccctgcagaagtcgatggatctgttaggaaagcagttatccttctatagttttggcatcattggtatcatcatgttggtcgggtggctgctgggcaaagatattctggagatgtttaccatctcagtcagccttgccgtggcggcaatcccggagggcttgcccatcgttgttaccgtaacgctggccctcggagtgatgcgtatggtgaagaagcgcgcaattgttaaaaaattacctatcgtcgagactctgggatgttgtaatgtgatctgttccgacaaaactggaacgctcactaagaacgagatgacagtgactcatattttcacttctgacggcttacatgcagaggtcacaggggttggatacaatcagttcggtgaagtcatcgtagacggagatgtcgtgcatggattctataatcccgctgttagtcgaatagtggaagcaggttgtgtgtgcaatgacgccgttattaggaacaatacattgatgggaaagccgactgaaggcgctctcatcgccctggcgatgaaaatgggattggatgggctccaacaggattatattaggaaagctgaataccccttctctagcgaacagaaatggatggccgtaaagtgcgtgcatcgcacacagcaggatcgccctgaaatctgttttatgaagggcgcatatgaacaggtcatcaagtattgtactacataccaatctaaagggcagacattgacgctgactcagcagcagcgtgacgtctaccaacaggaaaaagctagaatgggctcagcaggactacgcgtattagccctcgcatctggacctgaactcggtcaactcacattcctcggccttgttggcattattgaccctccaagaactggtgtcaaagaagcagttacaacacttattgccagcggcgtcagcattaaaatgatcactggcgatagtcaggaaaccgctgtggcaatagcgagccgtctgggcctgtactctaagacctcacaatccgtgtccggagaggaaatagatgctatggatgtccagcagctttcccagattgtacctaaggtggcagtcttctacagggccagccctcggcacaagatgaagatcataaagagtctgcaaaagaacggaagcgtggtggcaatgaccggcgatggggtgaatgacgccgtcgcacttaaggccgcagatataggtgtggccatgggacagaccggcactgatgtttgtaaagaagccgctgacatgatcctggtcgatgacgatttccagacaatcatgtccgctatcgaagaaggtaagggcatctataacaacattaaaaattttgtgcgatttcagctgagtacaagtatcgccgcactcaccctgatttctcttgccaccctgatgaacttcccaaacccactaaatgcaatgcaaatcctttggattaacattattatggatggtcccccagctcagagcctgggagtggagcccgtggacaaagatgtcattagaaaacctccacgaaactggaaggatagcattctgactaaaaaccttattctgaagattctcgtttcctccatcattattgtgtgtggaactctgttcgtcttttggagagaactcagggacaatgttatcacccccagggacacaaccatgacttttacttgttttgtgttctttgacatgttcaacgcgctgtcatctcgttctcagactaagtctgtcttcgaaatcggactgtgctctaatcgcatgttttgttacgccgtcctgggcagcatcatgggacaactcctggttatttactttccaccgttgcagaaggtgtttcaaactgagagtctgagtattctggacttgttatttctcctggggcttactagttctgtgtgcattgtcgccgagattatcaagaaggtggagaggtcccgggaaaaaattcagaaacacgtttcaagcacatcttcttctttccttgaagtgtag

SEQ ID NO: 18533 - DNA, 2712 bp, Artificial Sequence
  derived and/or modified sequence
atgatccctgtcctgacctccaaaaaggccagcgagcttcctgtgtctgaggttgccagcattttgcaggcagacctgcaaaacggattaaataagtgtgaggtaagtcatagacgagcttttcacggctggaatgagttcgacataagcgaggacgagcccctgtggaagaaatacatttctcaatttaaaaacccgctgattatgcttctactggcttccgccgtgatatctgtactgatgcatcaattcgatgatgccgtgagcattaccgtcgcgatcctgatcgttgtgacagtggcattcgtgcaggaatatcgtagcgagaaatctctagaggaactgtccaagttagttcctcccgaatgtcattgtgtgcgagagggaaagcttgaacatacgctggcaagagacctggtgcccggagacaccgtgtgtctgagcgtgggggatagggttcctgctgatctgaggctgtttgaggccgtggatctgagtatcgacgagagctccctcaccggcgagactaccccatgctctaaggtcaccgcccctcagccagccgcaaccaatggggacctcgcctcgcgatcaaacatcgcttttatgggtactctcgtgcgctgtggaaaggccaaaggcgtcgtcatcggaaccggggaaaatagcgaatttggggaggtttttaagatgatgcaggccgaggaggcgcctaaaacccctcttcagaagtctatggaccttctcggaaagcagctgtcattctattcttttggtatcataggaatcattatgttggtcggatggctgctgggcaaggatatactggaaatgttcaccatttcagtgtctctggcagtcgccgcaattcccgagggactccctattgtggtcaccgtgaccctggcgctgggagtgatgcggatggtgaagaagagggctatcgtaaaaaagctccctattgtggaaacacttggctgttgcaacgtgatttgctctgataagactgggaccctgaccaagaacgagatgactgtaacacacatcttcacctcagacgggctgcatgcagaggtcacaggcgtcggttacaaccagttcggggaagtcattgtggacggggatgtggtgcacggcttttacaacccagctgtaagccgcatcgtagaggcaggatgcgtctgtaatgatgcggtgatcaggaacaatactctgatgggaaaaccaactgagggcgcactgattgccctggctatgaagatgggccttgatggtctgcagcaggattacataaggaaggccgagtacccattctcatcagaacagaagtggatggcagttaagtgcgttcacagaacccagcaggatagaccagagatttgcttcatgaaaggggcatacgagcaggtaataaaatactgtactacctaccagagcaaagggcagacactgacactgacacagcaacagagggatgtgtaccaacaggagaaagccagaatggggagcgccggtttgagggttctcgccctggcctccgggcctgagctgggccagttaacttttctgggcctggtaggcatcatcgaccctcctagaaccggagtgaaagaagctgttacaactttaattgcctcgggggtgagtattaaaatgatcacaggagactctcaggaaaccgcagtcgcgatcgcttccaggctcggcctgtattcaaaaacctcccaatccgtgtccggcgaggaaatcgacgccatggatgtccagcaactgagtcagatcgttcccaaagtggccgttttctacagagcctcgccacgccataaaatgaagattatcaaatcactccagaagaacggtagcgtcgtggcaatgacgggcgatggcgtgaatgacgcagtggccttgaaggccgcagacatcggtgtggccatgggacagacagggacggatgtttgcaaggaggctgcggatatgatcctggtggatgacgactttcagactatcatgtcagcaatcgaagagggaaagggaatttacaataacatcaagaattttgtaaggtttcagctcagtacgtcaatcgcagccctgacactgattagtttggctaccctgatgaacttcccaaatcccctgaatgcgatgcagatcctgtggataaacatcatcatggatggtccgccagcccagagccttggagtcgagcccgtagacaaggatgttatccgaaaaccccctaggaattggaaagactcaatcctgactaagaatctgatcttgaagatcctggtgagttccattatcattgtatgtgggacattgttcgttttctggagagagttacgggataatgtgatcactccaagagacaccaccatgacctttacctgtttcgtgtttttcgatatgttcaacgctctgtcctctagatcacagaccaagtccgtctttgagattggcctgtgctccaataggatgttctgttatgctgttttggggagcataatgggccagcttctagtcatctacttcccccctctgcagaaggtcttccagactgaatccctgtccatcctggatctgctatttctactgggtctgaccagctcagtctgtattgtggcagagataatcaaaaaggttgaacgaagtagggagaagattcagaaacatgtatcttccacatcatcaagctttttggaagtgtag

SEQ ID NO: 18534 - DNA, 2760 bp, Artificial Sequence
  derived and/or modified sequence
atgaaggtagccaggttccagaaaattccaaatggcgagaacgaaacgatgattccggtattgacttcaaaaaaagcgtccgagttacccgtatcagaggttgctagtattctccaagccgatttacagaacgggctgaataaatgcgaagtgagtcatcggagagcatttcatggctggaacgagttcgacatttctgaggatgaaccattgtggaagaaatacatcagccaatttaagaatccactgatcatgctgttgctagcgtcagccgttatctcagtgctcatgcaccagtttgatgatgcggtgtctataacagtggctatactgattgttgtgaccgttgctttcgtccaagagtaccgctccgagaagagtcttgaagaactgagtaagctggtgcccccagagtgccattgtgtccgggaaggcaaactagagcacacccttgcacgtgatctggtcccaggggacacagtgtgtctgtccgtgggggaccgagtaccagcggatctgaggctctttgaggcggtcgacctgtctatagacgagagtagcctcaccggcgaaacaactccctgctccaaggttaccgcccctcagcctgctgccaccaatggcgacctggcgagcaggagtaatatcgcctttatgggcaccctcgtgagatgcggtaaggctaagggagtagtaatcggaacaggtgaaaactctgaattcggagaggtgtttaaaatgatgcaggcagaagaagctcctaagacccccctccagaagtccatggatctcctgggaaagcagttaagcttctactccttcgggatcattggaatcatcatgcttgttggttggctcctcggcaaagacatattggaaatgttcaccatatctgtctccctggctgtagctgctataccagagggcctcccaatcgtggtcacggtcaccttggccttgggtgtgatgcgaatggtgaagaaacgcgcaattgtcaaaaaactccctattgttgagactctcggctgctgcaacgtgatctgctcagacaaaaccggaacacttacaaaaaatgaaatgacagtgactcatatcttcacatctgacggcctgcacgcagaggtcactggagttgggtataatcaattcggagaagttatcgtggatggtgacgtcgttcatggtttttataatcccgctgtgtcgcggatagtggaagcgggatgtgtatgtaacgacgctgttattagaaataatacccttatgggcaaacctaccgagggggcactgattgccctagccatgaagatgggactcgatggcctacaacaggactacatccggaaggcggagtatccattctcctctgaacagaaatggatggcagtcaaatgtgttcaccgcactcagcaggaccgcccagagatttgcttcatgaaaggcgcttacgaacaggttattaagtattgtaccacctatcagagcaaaggacagacccttaccctgacgcagcagcagcgcgatgtctaccagcaggaaaaagctcgaatgggctcggctggactgagagtgctggcactggcatctgggcctgagctcggtcagctaaccttcttagggttggtcggaatcatcgacccaccaaggacgggcgtaaaggaggctgttaccaccctgatagccagcggagtgtctattaaaatgattactggcgacagtcaggagactgcagtcgccatcgcttctcgcttggggttgtatagcaaaactagtcagagcgtgtccggggaagaaatcgacgctatggacgtgcagcagctctctcagattgttcctaaggtcgctgtgttctaccgagcatcccccagacacaagatgaagataatcaaatccctacaaaagaacggctcggtagtggcaatgaccggggacggtgtgaacgatgctgtggcgctcaaagccgctgacatcggcgtcgctatgggccagacgggtacagatgtctgcaaggaggcagctgatatgatcctggtggacgatgattttcagaccataatgtccgccatcgaagagggtaaggggatctataacaacataaaaaattttgtccggtttcagttatctacatctatcgcagccctgaccttgatctccctcgccaccttaatgaactttccaaatcccttaaatgcaatgcagatcctgtggattaacatcatcatggatgggccaccagcacagtccctgggagttgagcctgtggataaagacgtgattcgtaaaccaccaagaaattggaaggactctatcctcacaaaaaacctcattctgaaaatcttggtatctagcataatcatcgtgtgtgggaccctgtttgtgttttggagagagctccgggataacgtaattacgcctagagacacaacaatgacttttacctgctttgtgttcttcgacatgtttaacgctctgtcaagcaggtctcaaacaaagtccgtctttgagattggcctctgttctaacagaatgttctgttacgcggtgttgggctccatcatgggacagctgctcgtgatatatttccccccactgcagaaggtgttccaaactgagtcactatcaatactggatctcctgtttctgctaggtttgacgtcaagcgtgtgtatcgtggcagagattataaagaaagtggagagatcccgggagaagattcagaaacacgtttcttcgacaagctcatcttttctcgaggtctag

SEQ ID NO: 18535 - DNA, 2760 bp, Artificial Sequence
  derived and/or modified sequence
atgaaggttgctagatttcaaaagatacccaacggtgagaacgagacaatgatccccgtccttaccagcaaaaaagcctctgaactgcccgtgtccgaggtggcatctatcctccaggcggatctgcagaacgggcttaataaatgcgaggtgagccatagaagagccttccatggctggaacgagttcgacatttcagaggacgaacccctctggaagaagtacatcagccagttcaagaacccactgattatgctgttacttgcatcagcggtcatttccgtgctgatgcaccagtttgatgacgctgttagtatcacggtggcgatcctgatcgtcgtgacagtcgcctttgttcaggaataccgttcagaaaagagcctcgaagagctatcaaagctcgtgccacccgaatgtcactgcgtgcgcgaagggaaattggagcacaccctggcccgagatcttgtccccggagatactgtctgtctgagcgtgggggatagggtgcctgccgatctgagactttttgaggctgtggacctcagcattgatgagtccagtctgacgggagagacaaccccctgctcaaaagttaccgcgcctcagccggcagccacaaacggcgacctggcatccaggtcaaacatcgcttttatggggactctcgttcggtgcgggaaagccaagggcgtcgtgatcggcactggagagaatagtgaatttggcgaagtgtttaagatgatgcaggcagaggaagcccctaaaacacctctgcagaaaagcatggatcttctcggtaagcagctctcgttttatagctttggaataatcggcataattatgctcgtcgggtggctcttgggaaaagacattctggaaatgttcactatttcagtgagcctcgcagtcgcggctattcccgagggcctccctatcgtggtcaccgtgaccctggccttgggcgtgatgcgcatggtcaaaaagcgagccatcgtgaagaagctgcccattgttgagactctgggctgctgtaacgtcatctgttctgacaagacgggcacccttactaagaatgagatgactgtgacacacattttcacgagcgatgggcttcatgctgaggtaacaggggtaggatataatcagttcggggaggtgattgtggatggagacgtggttcatggattctataatccagccgtgtctagaatcgtcgaagccggatgtgtgtgcaacgatgcagtgattagaaataacactttgatgggcaaaccaacggagggggcacttatcgctctcgctatgaaaatgggattagatggacttcagcaggattacatcaggaaagccgagtacccattctctagtgagcagaaatggatggctgttaagtgcgtgcacaggacacaacaggaccgacccgagatctgcttcatgaagggagcttacgaacaggtcatcaaatactgtacaacgtatcagagcaagggtcagacactaacgctcacacaacaacagcgggatgtctatcagcaggaaaaggctcgcatggggtctgccggactccgagtgctggctttagcctctggacccgaactcggccagttgacctttctgggactggtgggaattatagacccccctaggacaggcgtgaaggaggccgttactactcttattgcctcaggcgtttcaataaaaatgatcaccggggacagccaggagaccgccgtcgctatcgcctctcggctcggtctctatagtaagacgagccagtccgtgagcggcgaagagatagacgctatggacgtgcagcagctgtctcagatcgtgcctaaagtggctgtcttctaccgcgctagccccagacacaagatgaagattattaaaagccttcagaagaatggctcagtggttgctatgacaggggacggcgtgaacgatgcagtagccctcaaggcagccgacattggggtggccatgggacaaactgggacagacgtgtgtaaagaggcagcagacatgatactggtggacgacgacttccagaccataatgagtgccattgaagaaggtaagggtatttacaacaatattaagaactttgtgaggttccaactttctacttccatagccgctctgaccctgattagcttggcgacccttatgaactttccaaatcctctcaacgccatgcagattctctggattaatataatcatggatgggccacctgcccagtctctgggagtggaaccagtggacaaagatgtcatacgcaagcctcctagaaattggaaagacagtatcctgacgaagaatctgatcctcaagatcctggtatcaagcattatcatcgtatgtggcacgcttttcgtgttctggcgcgaactgcgtgacaacgtaatcactcctagagatacgactatgacgtttacctgcttcgtatttttcgacatgttcaacgcgttgtcttcccgcagccagacgaagtcggttttcgagatcggcctctgttctaatcgcatgttctgctacgctgttctcgggtcaattatgggacagctgcttgtgatatactttccacctctgcaaaaggtttttcaaacagaaagcctgagcattcttgatctgctctttctgctgggcctcaccagcagcgtgtgtatagtcgccgagatcattaagaaggtggagagatccagagagaagatccagaagcacgtaagttctacttcttctagtttcctcgaagtctag

SEQ ID NO: 18536 - DNA, 3339 bp, Artificial Sequence
  derived and/or modified sequence
aaagttgcacgttttcaaaaaatacctaatggtgaaaatgagacaatgattcctgtattgacatcaaaaaaagcaagtgaattaccagtcagtgaagttgcaagcattctccaagctgatcttcagaatggtctaaacaaatgtgaagttagtcataggcgagcctttcatggctggaatgagtttgatattagtgaagatgagccactgtggaagaagtatatttctcagtttaaaaatccccttattatgctgcttctggcttctgcagtcatcagtgttttaatgcatcagtttgatgatgccgtcagtatcactgtggcaatacttatcgttgttacagttgcctttgttcaggaatatcgttcagaaaaatctcttgaagaattgagtaaacttgtgccaccagaatgccattgtgtgcgtgaaggaaaattggagcatacacttgcccgagacttggttccaggtgatacagtttgcctttctgttggggatagagttcctgctgacttacgcttgtttgaggctgtggatctttccattgatgagtccagcttgacaggtgagacaacgccttgttctaaggtgacagctcctcagccagctgcaactaatggagatcttgcatcgagaagtaacattgcctttatgggaacactggtcagatgtggcaaagcaaagggtgttgtcattggaacaggagaaaattctgaatttggggaggtttttaaaatgatgcaagcagaagaggcaccaaaaacccctctgcagaagagcatggacctcttaggaaaacaactttccttttactcctttggtataataggaatcatcatgttggttggctggttactgggaaaagatatcctggaaatgtttactattagtgtaagtttggctgtagcagcaattcctgaaggtctccccattgtggtcacagtgacgctagctcttggtgttatgagaatggtgaagaaaagggccattgtgaaaaagctgcctattgttgaaactctgggctgctgtaatgtgatttgttcagataaaactggaacactgacgaagaatgaaatgactgttactcacatatttacttcagatggtctgcatgctgaggttactggagttggctataatcaatttggggaagtgattgttgatggtgatgttgttcatggattctataacccagctgttagcagaattgttgaggcgggctgtgtgtgcaatgatgctgtaattagaaacaatactctaatggggaagccaacagaaggggccttaattgctcttgcaatgaagatgggtcttgatggacttcaacaagactacatcagaaaagctgaatacccttttagctctgagcaaaagtggatggctgttaagtgtgtacaccgaacacagcaggacagaccagagatttgttttatgaaaggtgcttacgaacaagtaattaagtactgtactacataccagagcaaagggcagaccttgacacttactcagcagcagagagatgtgtaccaacaagagaaggcacgcatgggctcagcgggactcagagttcttgctttggcttctggtcctgaactgggacagctgacatttcttggcttggtgggaatcattgatccacctagaactggtgtgaaagaagctgttacaacactcattgcctcaggagtatcaataaaaatgattactggagattcacaggagactgcagttgcaatcgccagtcgtctgggattgtattccaaaacttcccagtcagtctcaggagaagaaatagatgcaatggatgttcagcagctttcacaaatagtaccaaaggttgcagtattttacagagctagcccaaggcacaagatgaaaattattaagtcgctacagaagaacggttcagttgtagccatgacaggagatggagtaaatgatgcagttgctctgaaggctgcagacattggagttgcgatgggccagactggtacagatgtttgcaaagaggcagcagacatgatcctagtggatgatgattttcaaaccataatgtctgcaatcgaagagggtaaagggatttataataacattaaaaatttcgttagattccagctgagcacgagtatagcagcattaactttaatctcattggctacattaatgaactttcctaatcctctcaatgccatgcagattttgtggatcaatattattatggatggacccccagctcagagccttggagtagaaccagtggataaagatgtcattcgtaaacctcctcgcaactggaaagacagcattttgactaaaaacttgatacttaaaatacttgtttcatcaataatcattgtttgtgggactttgtttgtcttctggcgtgagctacgagacaatgtgattacacctcgagacacaacaatgaccttcacatgctttgtgttttttgacatgttcaatgcactaagttccagatcccagaccaagtctgtgtttgagattggactctgcagtaatagaatgttttgctatgcagttcttggatccatcatgggacaattactagttatttactttcctccgcttcagaaggtttttcagactgagagcctaagcatactggatctgttgtttcttttgggtctcacctcatcagtgtgcatagtggcagaaattataaagaaggttgaaaggagcagggaaaagatccagaagcatgttagttcgacatcatcatcttttcttgaagtttccagctcttcaggtaactttgttgctgtctggctctgggagaggagtggacagcagctggttgagatacatccccatctggagacaggactgccactgacagaagatgtgagctgtgtctaagtccagtcttgtgcccagccgtgtctgcgccttcactctttggaactctgcatacaacatcttagcaccatcttcctgcagctcttccttacctaaataaagaaacagcccaagggcagtatttctaaaagcactgtaacagcttttcattttctccacatatactacaaattctataaagaaagaaattaatttaaaaaaactaagatgtttttctcttctggcttcataaatgccttgctgtataaattgaaatattgatactgaactgtctttttaatgatgacctaactttattcaacccatcggaatttactttttccctgaaataagatcttttccactggtctactacctgaccataaacatgtctgcatttgaattctctaaaccctaaatctgtgtctatgaaaaatacaaatgactattaaatattattctctttactgttctctttcaccg

SEQ ID NO: 18537 - DNA, 3401 bp, Artificial Sequence
  derived and/or modified sequence
gggggtgacagcctgggattccgggggcttctcttccttgtcctcctcctctcctctctattcccagtgtggccgtggctgacactaaagactttgtagccatcaacccgagtgcagtttcgatggaaaatgaaggttgcacgttttcaaaaaatacctaatggtgaaaatgagacaatgattcctgtattgacatcaaaaaaagcaagtgaattaccagtcagtgaagttgcaagcattctccaagctgatcttcagaatggtctaaacaaatgtgaagttagtcataggcgagcctttcatggctggaatgagtttgatattagtgaagatgagccactgtggaagaagtatatttctcagtttaaaaatccccttattatgctgcttctggcttctgcagtcatcagtgttttaatgcatcagtttgatgatgccgtcagtatcactgtggcaatacttatcgttgttacagttgcctttgttcaggaatatcgttcagaaaaatctcttgaagaattgagtaaacttgtgccaccagaatgccattgtgtgcgtgaaggaaaattggagcatacacttgcccgagacttggttccaggtgatacagtttgcctttctgttggggatagagttcctgctgacttacgcttgtttgaggctgtggatctttccattgatgagtccagcttgacaggtgagacaacgccttgttctaaggtgacagctcctcagccagctgcaactaatggagatcttgcatcgagaagtaacattgcctttatgggaacactggtcagatgtggcaaagcaaagggtgttgtcattggaacaggagaaaattctgaatttggggaggtttttaaaatgatgcaagcagaagaggcaccaaaaacccctctgcagaagagcatggacctcttaggaaaacaactttccttttactcctttggtataataggaatcatcatgttggttggctggttactgggaaaagatatcctggaaatgtttactattagtgtaagtttggctgtagcagcaattcctgaaggtctccccattgtggtcacagtgacgctagctcttggtgttatgagaatggtgaagaaaagggccattgtgaaaaagctgcctattgttgaaactctgggctgctgtaatgtgatttgttcagataaaactggaacactgacgaagaatgaaatgactgttactcacatatttacttcagatggtctgcatgctgaggttactggagttggctataatcaatttggggaagtgattgttgatggtgatgttgttcatggattctataacccagctgttagcagaattgttgaggcgggctgtgtgtgcaatgatgctgtaattagaaacaatactctaatggggaagccaacagaaggggccttaattgctcttgcaatgaagatgggtcttgatggacttcaacaagactacatcagaaaagctgaatacccttttagctctgagcaaaagtggatggctgttaagtgtgtacaccgaacacagcaggacagaccagagatttgttttatgaaaggtgcttacgaacaagtaattaagtactgtactacataccagagcaaagggcagaccttgacacttactcagcagcagagagatgtgtaccaacaagagaaggcacgcatgggctcagcgggactcagagttcttgctttggcttctggtcctgaactgggacagctgacatttcttggcttggtgggaatcattgatccacctagaactggtgtgaaagaagctgttacaacactcattgcctcaggagtatcaataaaaatgattactggagattcacaggagactgcagttgcaatcgccagtcgtctgggattgtattccaaaacttcccagtcagtctcaggagaagaaatagatgcaatggatgttcagcagctttcacaaatagtaccaaaggttgcagtattttacagagctagcccaaggcacaagatgaaaattattaagtcgctacagaagaacggttcagttgtagccatgacaggagatggagtaaatgatgcagttgctctgaaggctgcagacattggagttgcgatgggccagactggtacagatgtttgcaaagaggcagcagacatgatcctagtggatgatgattttcaaaccataatgtctgcaatcgaagagggtaaagggatttataataacattaaaaatttcgttagattccagctgagcacgagtatagcagcattaactttaatctcattggctacattaatgaactttcctaatcctctcaatgccatgcagattttgtggatcaatattattatggatggacccccagctcagagccttggagtagaaccagtggataaagatgtcattcgtaaacctcctcgcaactggaaagacagcattttgactaaaaacttgatacttaaaatacttgtttcatcaataatcattgtttgtgggactttgtttgtcttctggcgtgagctacgagacaatgtgattacacctcgagacacaacaatgaccttcacatgctttgtgttttttgacatgttcaatgcactaagttccagatcccagaccaagtctgtgtttgagattggactctgcagtaatagaatgttttgctatgcagttcttggatccatcatgggacaattactagttatttactttcctccgcttcagaaggtttttcagactgagagcctaagcatactggatctgttgtttcttttgggtctcacctcatcagtgtgcatagtggcagaaattataaagaaggttgaaaggagcagggaaaagatccagaagcatgttagttcgacatcatcatcttttcttgaagtctggctctgggagaggagtggacagcagctggttgagatacatccccatctggagacaggactgccactgacagaagatgtgagctgtgtctaagtccagtcttgtgcccagccgtgtctgcgccttcactctttggaactctgcatacaacatcttagcaccatcttcctgcagctcttccttacctaaataaagaaacagcccaagggcagtatttctaaaagcactgtaacagcttttcattttctccacatatactacaaattctataaagaaagaaattaatttaaaaaaactaagatgtttttctcttctggcttcataaatgccttgctgtataaattgaaatattgatactgaactgtctttttaatgatgacctaactttattcaacccatcggaatttactttttccctgaaataagatcttttccactggtctactacctgaccataaacatgtctgcatttgaattctctaaaccctaaatctgtgtctatgaaaaatacaaat

SEQ ID NO: 18538 - DNA, 4795 bp, Artificial Sequence
  derived and/or modified sequence
gggaactccttcctcagcctctcgtcagcgccgcttctcctggtttctcttgcagatgctgctgctaggggtggtgggagcagccgtgggacgcgtggccgggagcgggggtgacagcctgggattccgggggcttctcttccttgtcctcctcctctcctctctattcccagtgtggccgtggctgacactaaagactttgtagccatcaacccgagtgcagtttcgatggaaaatgaaggttgcacgttttcaaaaaatacctaatggtgaaaatgagacaatgattcctgtattgacatcaaaaaaagcaagtgaattaccagtcagtgaagttgcaagcattctccaagctgatcttcagaatggtctaaacaaatgtgaagttagtcataggcgagcctttcatggctggaatgagtttgatattagtgaagatgagccactgtggaagaagtatatttctcagtttaaaaatccccttattatgctgcttctggcttctgcagtcatcagtgttttaatgcatcagtttgatgatgccgtcagtatcactgtggcaatacttatcgttgttacagttgcctttgttcaggaatatcgttcagaaaaatctcttgaagaattgagtaaacttgtgccaccagaatgccattgtgtgcgtgaaggaaaattggagcatacacttgcccgagacttggttccaggtgatacagtttgcctttctgttggggatagagttcctgctgacttacgcttgtttgaggctgtggatctttccattgatgagtccagcttgacaggtgagacaacgccttgttctaaggtgacagctcctcagccagctgcaactaatggagatcttgcatcgagaagtaacattgcctttatgggaacactggtcagatgtggcaaagcaaagggtgttgtcattggaacaggagaaaattctgaatttggggaggtttttaaaatgatgcaagcagaagaggcaccaaaaacccctctgcagaagagcatggacctcttaggaaaacaactttccttttactcctttggtataataggaatcatcatgttggttggctggttactgggaaaagatatcctggaaatgtttactattagtgtaagtttggctgtagcagcaattcctgaaggtctccccattgtggtcacagtgacgctagctcttggtgttatgagaatggtgaagaaaagggccattgtgaaaaagctgcctattgttgaaactctgggctgctgtaatgtgatttgttcagataaaactggaacactgacgaagaatgaaatgactgttactcacatatttacttcagatggtctgcatgctgaggttactggagttggctataatcaatttggggaagtgattgttgatggtgatgttgttcatggattctataacccagctgttagcagaattgttgaggcgggctgtgtgtgcaatgatgctgtaattagaaacaatactctaatggggaagccaacagaaggggccttaattgctcttgcaatgaagatgggtcttgatggacttcaacaagactacatcagaaaagctgaatacccttttagctctgagcaaaagtggatggctgttaagtgtgtacaccgaacacagcaggacagaccagagatttgttttatgaaaggtgcttacgaacaagtaattaagtactgtactacataccagagcaaagggcagaccttgacacttactcagcagcagagagatgtgtaccaacaagagaaggcacgcatgggctcagcgggactcagagttcttgctttggcttctggtcctgaactgggacagctgacatttcttggcttggtgggaatcattgatccacctagaactggtgtgaaagaagctgttacaacactcattgcctcaggagtatcaataaaaatgattactggagattcacaggagactgcagttgcaatcgccagtcgtctgggattgtattccaaaacttcccagtcagtctcaggagaagaaatagatgcaatggatgttcagcagctttcacaaatagtaccaaaggttgcagtattttacagagctagcccaaggcacaagatgaaaattattaagtcgctacagaagaacggttcagttgtagccatgacaggagatggagtaaatgatgcagttgctctgaaggctgcagacattggagttgcgatgggccagactggtacagatgtttgcaaagaggcagcagacatgatcctagtggatgatgattttcaaaccataatgtctgcaatcgaagagggtaaagggatttataataacattaaaaatttcgttagattccagctgagcacgagtatagcagcattaactttaatctcattggctacattaatgaactttcctaatcctctcaatgccatgcagattttgtggatcaatattattatggatggacccccagctcagagccttggagtagaaccagtggataaagatgtcattcgtaaacctcctcgcaactggaaagacagcattttgactaaaaacttgatacttaaaatacttgtttcatcaataatcattgtttgtgggactttgtttgtcttctggcgtgagctacgagacaatgtgattacacctcgagacacaacaatgaccttcacatgctttgtgttttttgacatgttcaatgcactaagttccagatcccagaccaagtctgtgtttgagattggactctgcagtaatagaatgttttgctatgcagttcttggatccatcatgggacaattactagttatttactttcctccgcttcagaaggtttttcagactgagagcctaagcatactggatctgttgtttcttttgggtctcacctcatcagtgtgcatagtggcagaaattataaagaaggttgaaaggagcagggaaaagatccagaagcatgttagttcgacatcatcatcttttcttgaagtatgatgcatattgcattattttatttgcaaactaggaattgcagtctgaggatcatttagaagggcaagttcaagaggatatgaagatttgagaactttttaactattcattgactaaaaatgaacattaatgttaaagacttaagactttaacctgctggcagtcccaaatgaaattatgcaactttgatatcatattccttgatttaaattggcttttgtgattgagtgaaactttataaagcatatggtcagttatttaattaaaaaggcaaaacctgaaccaccttctgcacttaaagaagtctaacagtacaaatacactatctatcttagatagatatatttttttttatttttaaatattgtactatttatggtggtggggctttcttactaatacacaaataaatttaatcatttcaaaggcattctatttggtttagaagttgattcccaggagtgccatatttcagctactgtatttcctttttcttgtaatgtaagcagctcagataccatgtgctatcatttttgtatcaagttttttgcacaggatgtgaccactgtcagatcactgttcttttctttctttttgtgattgaaaagcctatactacaatttgaagtaaatttttgtttttcttagtaagtgtaaatggttgctttatttttattttaaaaaggtatgtctttggtttggcagaattcatgcagggctatcaagtggtgttctagggtaacagtgtccataattaacgcttagtcatagagtcaaaaacatttaagactgattgggttgaagtttataataaattatattaacatgtcttcctttttgaggtaaagatatatactttgtcaaatatcattttgtcatcctctaaatataaatccaaatacctcagctaagtaattctattttattatttttactgttatgtatgtttttaatcatatttcttaggaagtataggctactggacttagaataaaaagtccccaaacccaaacaaatggtttatgaaccagagtatatgtggaagattctttgctggtcttgctctgtgtgcatctgaagcttctttggcctagattttagcacaaacctgagtatatctcttctactttcatcatgtgttctgtaccttctttttgtttcattgggcatgctagggaaataggtggattttgtgtgtaatgccatcagtttttatgaaagcttgatgaggtataggtcatttgttttgagtatgtgggccagaaatttaaaattagaaatttgtttttctgttgagtatataaacaaaaattggtcccaattctaacaggtttaatccttcttgaagccaataagttttatcttttataatctgtcaggatgaaccactccttagcttttatccaatattaaactgcaagtgttagcactgaaatattgtcattgatagggaaaatatctattctttgagtcattgttactgaggcagttgagtgtaaggagctggctgcagtttattctacttaaccctttaaggctgaattgtcaaatgtacattgttccatgtcgttagatggaacatggaagccattgtctaatcaactctatcattagtgacttgatgtctcataccttaattttgtaatgatttttattctctgttacaaagacttgaaatacgtattaaatgcacgttaatgttttgctttgcattttaggttcagattatgacttgattgaaataaatgtgcctatacattcatttgctttgtactataaaaataaaaatgatttcttaagttaa

SEQ ID NO: 18539 - DNA, 4714 bp, Artificial Sequence
  derived and/or modified sequence
cttcctccctcccgctcgcttcttctcacgccgggagcaggctcccgcctcgcaccgctgccccgcgagcagctcctcttctcccgaggcgcgcggggcgcccccgcgagccccgcggctgagaccccgcagcctggaggagggctgtccggggctttgggttgcacgttttcaaaaaatacctaatggtgaaaatgagacaatgattcctgtattgacatcaaaaaaagcaagtgaattaccagtcagtgaagttgcaagcattctccaagctgatcttcagaatggtctaaacaaatgtgaagttagtcataggcgagcctttcatggctggaatgagtttgatattagtgaagatgagccactgtggaagaagtatatttctcagtttaaaaatccccttattatgctgcttctggcttctgcagtcatcagtgttttaatgcatcagtttgatgatgccgtcagtatcactgtggcaatacttatcgttgttacagttgcctttgttcaggaatatcgttcagaaaaatctcttgaagaattgagtaaacttgtgccaccagaatgccattgtgtgcgtgaaggaaaattggagcatacacttgcccgagacttggttccaggtgatacagtttgcctttctgttggggatagagttcctgctgacttacgcttgtttgaggctgtggatctttccattgatgagtccagcttgacaggtgagacaacgccttgttctaaggtgacagctcctcagccagctgcaactaatggagatcttgcatcgagaagtaacattgcctttatgggaacactggtcagatgtggcaaagcaaagggtgttgtcattggaacaggagaaaattctgaatttggggaggtttttaaaatgatgcaagcagaagaggcaccaaaaacccctctgcagaagagcatggacctcttaggaaaacaactttccttttactcctttggtataataggaatcatcatgttggttggctggttactgggaaaagatatcctggaaatgtttactattagtgtaagtttggctgtagcagcaattcctgaaggtctccccattgtggtcacagtgacgctagctcttggtgttatgagaatggtgaagaaaagggccattgtgaaaaagctgcctattgttgaaactctgggctgctgtaatgtgatttgttcagataaaactggaacactgacgaagaatgaaatgactgttactcacatatttacttcagatggtctgcatgctgaggttactggagttggctataatcaatttggggaagtgattgttgatggtgatgttgttcatggattctataacccagctgttagcagaattgttgaggcgggctgtgtgtgcaatgatgctgtaattagaaacaatactctaatggggaagccaacagaaggggccttaattgctcttgcaatgaagatgggtcttgatggacttcaacaagactacatcagaaaagctgaatacccttttagctctgagcaaaagtggatggctgttaagtgtgtacaccgaacacagcaggacagaccagagatttgttttatgaaaggtgcttacgaacaagtaattaagtactgtactacataccagagcaaagggcagaccttgacacttactcagcagcagagagatgtgtaccaacaagagaaggcacgcatgggctcagcgggactcagagttcttgctttggcttctggtcctgaactgggacagctgacatttcttggcttggtgggaatcattgatccacctagaactggtgtgaaagaagctgttacaacactcattgcctcaggagtatcaataaaaatgattactggagattcacaggagactgcagttgcaatcgccagtcgtctgggattgtattccaaaacttcccagtcagtctcaggagaagaaatagatgcaatggatgttcagcagctttcacaaatagtaccaaaggttgcagtattttacagagctagcccaaggcacaagatgaaaattattaagtcgctacagaagaacggttcagttgtagccatgacaggagatggagtaaatgatgcagttgctctgaaggctgcagacattggagttgcgatgggccagactggtacagatgtttgcaaagaggcagcagacatgatcctagtggatgatgattttcaaaccataatgtctgcaatcgaagagggtaaagggatttataataacattaaaaatttcgttagattccagctgagcacgagtatagcagcattaactttaatctcattggctacattaatgaactttcctaatcctctcaatgccatgcagattttgtggatcaatattattatggatggacccccagctcagagccttggagtagaaccagtggataaagatgtcattcgtaaacctcctcgcaactggaaagacagcattttgactaaaaacttgatacttaaaatacttgtttcatcaataatcattgtttgtgggactttgtttgtcttctggcgtgagctacgagacaatgtgattacacctcgagacacaacaatgaccttcacatgctttgtgttttttgacatgttcaatgcactaagttccagatcccagaccaagtctgtgtttgagattggactctgcagtaatagaatgttttgctatgcagttcttggatccatcatgggacaattactagttatttactttcctccgcttcagaaggtttttcagactgagagcctaagcatactggatctgttgtttcttttgggtctcacctcatcagtgtgcatagtggcagaaattataaagaaggttgaaaggagcagggaaaagatccagaagcatgttagttcgacatcatcatcttttcttgaagtatgatgcatattgcattattttatttgcaaactaggaattgcagtctgaggatcatttagaagggcaagttcaagaggatatgaagatttgagaactttttaactattcattgactaaaaatgaacattaatgttaaagacttaagactttaacctgctggcagtcccaaatgaaattatgcaactttgatatcatattccttgatttaaattggcttttgtgattgagtgaaactttataaagcatatggtcagttatttaattaaaaaggcaaaacctgaaccaccttctgcacttaaagaagtctaacagtacaaatacactatctatcttagatagatatatttttttttatttttaaatattgtactatttatggtggtggggctttcttactaatacacaaataaatttaatcatttcaaaggcattctatttggtttagaagttgattcccaggagtgccatatttcagctactgtatttcctttttcttgtaatgtaagcagctcagataccatgtgctatcatttttgtatcaagttttttgcacaggatgtgaccactgtcagatcactgttcttttctttctttttgtgattgaaaagcctatactacaatttgaagtaaatttttgtttttcttagtaagtgtaaatggttgctttatttttattttaaaaaggtatgtctttggtttggcagaattcatgcagggctatcaagtggtgttctagggtaacagtgtccataattaacgcttagtcatagagtcaaaaacatttaagactgattgggttgaagtttataataaattatattaacatgtcttcctttttgaggtaaagatatatactttgtcaaatatcattttgtcatcctctaaatataaatccaaatacctcagctaagtaattctattttattatttttactgttatgtatgtttttaatcatatttcttaggaagtataggctactggacttagaataaaaagtccccaaacccaaacaaatggtttatgaaccagagtatatgtggaagattctttgctggtcttgctctgtgtgcatctgaagcttctttggcctagattttagcacaaacctgagtatatctcttctactttcatcatgtgttctgtaccttctttttgtttcattgggcatgctagggaaataggtggattttgtgtgtaatgccatcagtttttatgaaagcttgatgaggtataggtcatttgttttgagtatgtgggccagaaatttaaaattagaaatttgtttttctgttgagtatataaacaaaaattggtcccaattctaacaggtttaatccttcttgaagccaataagttttatcttttataatctgtcaggatgaaccactccttagcttttatccaatattaaactgcaagtgttagcactgaaatattgtcattgatagggaaaatatctattctttgagtcattgttactgaggcagttgagtgtaaggagctggctgcagtttattctacttaaccctttaaggctgaattgtcaaatgtacattgttccatgtcgttagatggaacatggaagccattgtctaatcaactctatcattagtgacttgatgtctcataccttaattttgtaatgatttttattctctgttacaaagacttgaaatacgtattaaatgcacgttaatgttttgctttgcattttaggttcagattatgacttgattgaaataaatgtgcctatacattcatttgctttgtactataaaaataaaaatgatttcttaagttaa

SEQ ID NO: 18540 - DNA, 4969 bp, Artificial Sequence
  derived and/or modified sequence
caaagctgggttcgcggctggcccaggagtgcggggcgcgactgggcggccggcggcggggaggggcggagcgcaggagtcggaggcgggagcagaccagcacggcctcgcggagccggcccggcggaccgtgacgggtcccctcacctcctcttctctcccctccccgcccgccctctctccctcccttcctccctcccgctcgcttcttctcacgccgggagcaggctcccgcctcgcaccgctgccccgcgagcagctcctcttctcccgaggcgcgcggggcgcccccgcgagccccgcggctgagaccccgcagcctggaggagggctgtccggggctttggtgtggccgtggctgacactaaagactttgtagccatcaacccgagtgcagtttcgatggaaaatgaaggttgcacgttttcaaaaaatacctaatggtgaaaatgagacaatgattcctgtattgacatcaaaaaaagcaagtgaattaccagtcagtgaagttgcaagcattctccaagctgatcttcagaatggtctaaacaaatgtgaagttagtcataggcgagcctttcatggctggaatgagtttgatattagtgaagatgagccactgtggaagaagtatatttctcagtttaaaaatccccttattatgctgcttctggcttctgcagtcatcagtgttttaatgcatcagtttgatgatgccgtcagtatcactgtggcaatacttatcgttgttacagttgcctttgttcaggaatatcgttcagaaaaatctcttgaagaattgagtaaacttgtgccaccagaatgccattgtgtgcgtgaaggaaaattggagcatacacttgcccgagacttggttccaggtgatacagtttgcctttctgttggggatagagttcctgctgacttacgcttgtttgaggctgtggatctttccattgatgagtccagcttgacaggtgagacaacgccttgttctaaggtgacagctcctcagccagctgcaactaatggagatcttgcatcgagaagtaacattgcctttatgggaacactggtcagatgtggcaaagcaaagggtgttgtcattggaacaggagaaaattctgaatttggggaggtttttaaaatgatgcaagcagaagaggcaccaaaaacccctctgcagaagagcatggacctcttaggaaaacaactttccttttactcctttggtataataggaatcatcatgttggttggctggttactgggaaaagatatcctggaaatgtttactattagtgtaagtttggctgtagcagcaattcctgaaggtctccccattgtggtcacagtgacgctagctcttggtgttatgagaatggtgaagaaaagggccattgtgaaaaagctgcctattgttgaaactctgggctgctgtaatgtgatttgttcagataaaactggaacactgacgaagaatgaaatgactgttactcacatatttacttcagatggtctgcatgctgaggttactggagttggctataatcaatttggggaagtgattgttgatggtgatgttgttcatggattctataacccagctgttagcagaattgttgaggcgggctgtgtgtgcaatgatgctgtaattagaaacaatactctaatggggaagccaacagaaggggccttaattgctcttgcaatgaagatgggtcttgatggacttcaacaagactacatcagaaaagctgaatacccttttagctctgagcaaaagtggatggctgttaagtgtgtacaccgaacacagcaggacagaccagagatttgttttatgaaaggtgcttacgaacaagtaattaagtactgtactacataccagagcaaagggcagaccttgacacttactcagcagcagagagatgtgtaccaacaagagaaggcacgcatgggctcagcgggactcagagttcttgctttggcttctggtcctgaactgggacagctgacatttcttggcttggtgggaatcattgatccacctagaactggtgtgaaagaagctgttacaacactcattgcctcaggagtatcaataaaaatgattactggagattcacaggagactgcagttgcaatcgccagtcgtctgggattgtattccaaaacttcccagtcagtctcaggagaagaaatagatgcaatggatgttcagcagctttcacaaatagtaccaaaggttgcagtattttacagagctagcccaaggcacaagatgaaaattattaagtcgctacagaagaacggttcagttgtagccatgacaggagatggagtaaatgatgcagttgctctgaaggctgcagacattggagttgcgatgggccagactggtacagatgtttgcaaagaggcagcagacatgatcctagtggatgatgattttcaaaccataatgtctgcaatcgaagagggtaaagggatttataataacattaaaaatttcgttagattccagctgagcacgagtatagcagcattaactttaatctcattggctacattaatgaactttcctaatcctctcaatgccatgcagattttgtggatcaatattattatggatggacccccagctcagagccttggagtagaaccagtggataaagatgtcattcgtaaacctcctcgcaactggaaagacagcattttgactaaaaacttgatacttaaaatacttgtttcatcaataatcattgtttgtgggactttgtttgtcttctggcgtgagctacgagacaatgtgattacacctcgagacacaacaatgaccttcacatgctttgtgttttttgacatgttcaatgcactaagttccagatcccagaccaagtctgtgtttgagattggactctgcagtaatagaatgttttgctatgcagttcttggatccatcatgggacaattactagttatttactttcctccgcttcagaaggtttttcagactgagagcctaagcatactggatctgttgtttcttttgggtctcacctcatcagtgtgcatagtggcagaaattataaagaaggttgaaaggagcagggaaaagatccagaagcatgttagttcgacatcatcatcttttcttgaagtatgatgcatattgcattattttatttgcaaactaggaattgcagtctgaggatcatttagaagggcaagttcaagaggatatgaagatttgagaactttttaactattcattgactaaaaatgaacattaatgttaaagacttaagactttaacctgctggcagtcccaaatgaaattatgcaactttgatatcatattccttgatttaaattggcttttgtgattgagtgaaactttataaagcatatggtcagttatttaattaaaaaggcaaaacctgaaccaccttctgcacttaaagaagtctaacagtacaaatacactatctatcttagatagatatatttttttttatttttaaatattgtactatttatggtggtggggctttcttactaatacacaaataaatttaatcatttcaaaggcattctatttggtttagaagttgattcccaggagtgccatatttcagctactgtatttcctttttcttgtaatgtaagcagctcagataccatgtgctatcatttttgtatcaagttttttgcacaggatgtgaccactgtcagatcactgttcttttctttctttttgtgattgaaaagcctatactacaatttgaagtaaatttttgtttttcttagtaagtgtaaatggttgctttatttttattttaaaaaggtatgtctttggtttggcagaattcatgcagggctatcaagtggtgttctagggtaacagtgtccataattaacgcttagtcatagagtcaaaaacatttaagactgattgggttgaagtttataataaattatattaacatgtcttcctttttgaggtaaagatatatactttgtcaaatatcattttgtcatcctctaaatataaatccaaatacctcagctaagtaattctattttattatttttactgttatgtatgtttttaatcatatttcttaggaagtataggctactggacttagaataaaaagtccccaaacccaaacaaatggtttatgaaccagagtatatgtggaagattctttgctggtcttgctctgtgtgcatctgaagcttctttggcctagattttagcacaaacctgagtatatctcttctactttcatcatgtgttctgtaccttctttttgtttcattgggcatgctagggaaataggtggattttgtgtgtaatgccatcagtttttatgaaagcttgatgaggtataggtcatttgttttgagtatgtgggccagaaatttaaaattagaaatttgtttttctgttgagtatataaacaaaaattggtcccaattctaacaggtttaatccttcttgaagccaataagttttatcttttataatctgtcaggatgaaccactccttagcttttatccaatattaaactgcaagtgttagcactgaaatattgtcattgatagggaaaatatctattctttgagtcattgttactgaggcagttgagtgtaaggagctggctgcagtttattctacttaaccctttaaggctgaattgtcaaatgtacattgttccatgtcgttagatggaacatggaagccattgtctaatcaactctatcattagtgacttgatgtctcataccttaattttgtaatgatttttattctctgttacaaagacttgaaatacgtattaaatgcacgttaatgttttgctttgcattttaggttcagattatgacttgattgaaataaatgtgcctatacattcatttgctttgtactataaaaataaaaatgatttcttaagttaa

SEQ ID NO: 18541 - DNA, 5067 bp, Artificial Sequence
  derived and/or modified sequence
tctctcagcggaagtaatagtgacaaagctgggttcgcggctggcccaggagtgcggggcgcgactgggcggccggcggcggggaggggcggagcgcaggagtcggaggcgggagcagaccagcacggcctcgcggagccggcccggcggaccgtgacgggtcccctcacctcctcttctctcccctccccgcccgccctctctccctcccttcctccctcccgctcgcttcttctcacgccgggagcaggctcccgcctcgcaccgctgccccgcgagcagctcctcttctcccgaggcgcgcggggcgcccccgcgagccccgcggctgagaccccgcagcctggaggagggctgtccggggctttggatgctgctgctaggggtggtgggagcagccgtgggacgcgtggccgggagcgggggtgacagcctgggattccgggggcttctcttccttgtcctcctcctctcctctctattcccagtgtggccgtggctgacactaaagactttgtagccatcaacccgagtgcagtttcgatggaaaatgaaggttgcacgttttcaaaaaatacctaatggtgaaaatgagacaatgattcctgtattgacatcaaaaaaagcaagtgaattaccagtcagtgaagttgcaagcattctccaagctgatcttcagaatggtctaaacaaatgtgaagttagtcataggcgagcctttcatggctggaatgagtttgatattagtgaagatgagccactgtggaagaagtatatttctcagtttaaaaatccccttattatgctgcttctggcttctgcagtcatcagtgttttaatgcatcagtttgatgatgccgtcagtatcactgtggcaatacttatcgttgttacagttgcctttgttcaggaatatcgttcagaaaaatctcttgaagaattgagtaaacttgtgccaccagaatgccattgtgtgcgtgaaggaaaattggagcatacacttgcccgagacttggttccaggtgatacagtttgcctttctgttggggatagagttcctgctgacttacgcttgtttgaggctgtggatctttccattgatgagtccagcttgacaggtgagacaacgccttgttctaaggtgacagctcctcagccagctgcaactaatggagatcttgcatcgagaagtaacattgcctttatgggaacactggtcagatgtggcaaagcaaagggtgttgtcattggaacaggagaaaattctgaatttggggaggtttttaaaatgatgcaagcagaagaggcaccaaaaacccctctgcagaagagcatggacctcttaggaaaacaactttccttttactcctttggtataataggaatcatcatgttggttggctggttactgggaaaagatatcctggaaatgtttactattagtgtaagtttggctgtagcagcaattcctgaaggtctccccattgtggtcacagtgacgctagctcttggtgttatgagaatggtgaagaaaagggccattgtgaaaaagctgcctattgttgaaactctgggctgctgtaatgtgatttgttcagataaaactggaacactgacgaagaatgaaatgactgttactcacatatttacttcagatggtctgcatgctgaggttactggagttggctataatcaatttggggaagtgattgttgatggtgatgttgttcatggattctataacccagctgttagcagaattgttgaggcgggctgtgtgtgcaatgatgctgtaattagaaacaatactctaatggggaagccaacagaaggggccttaattgctcttgcaatgaagatgggtcttgatggacttcaacaagactacatcagaaaagctgaatacccttttagctctgagcaaaagtggatggctgttaagtgtgtacaccgaacacagcaggacagaccagagatttgttttatgaaaggtgcttacgaacaagtaattaagtactgtactacataccagagcaaagggcagaccttgacacttactcagcagcagagagatgtgtaccaacaagagaaggcacgcatgggctcagcgggactcagagttcttgctttggcttctggtcctgaactgggacagctgacatttcttggcttggtgggaatcattgatccacctagaactggtgtgaaagaagctgttacaacactcattgcctcaggagtatcaataaaaatgattactggagattcacaggagactgcagttgcaatcgccagtcgtctgggattgtattccaaaacttcccagtcagtctcaggagaagaaatagatgcaatggatgttcagcagctttcacaaatagtaccaaaggttgcagtattttacagagctagcccaaggcacaagatgaaaattattaagtcgctacagaagaacggttcagttgtagccatgacaggagatggagtaaatgatgcagttgctctgaaggctgcagacattggagttgcgatgggccagactggtacagatgtttgcaaagaggcagcagacatgatcctagtggatgatgattttcaaaccataatgtctgcaatcgaagagggtaaagggatttataataacattaaaaatttcgttagattccagctgagcacgagtatagcagcattaactttaatctcattggctacattaatgaactttcctaatcctctcaatgccatgcagattttgtggatcaatattattatggatggacccccagctcagagccttggagtagaaccagtggataaagatgtcattcgtaaacctcctcgcaactggaaagacagcattttgactaaaaacttgatacttaaaatacttgtttcatcaataatcattgtttgtgggactttgtttgtcttctggcgtgagctacgagacaatgtgattacacctcgagacacaacaatgaccttcacatgctttgtgttttttgacatgttcaatgcactaagttccagatcccagaccaagtctgtgtttgagattggactctgcagtaatagaatgttttgctatgcagttcttggatccatcatgggacaattactagttatttactttcctccgcttcagaaggtttttcagactgagagcctaagcatactggatctgttgtttcttttgggtctcacctcatcagtgtgcatagtggcagaaattataaagaaggttgaaaggagcagggaaaagatccagaagcatgttagttcgacatcatcatcttttcttgaagtatgatgcatattgcattattttatttgcaaactaggaattgcagtctgaggatcatttagaagggcaagttcaagaggatatgaagatttgagaactttttaactattcattgactaaaaatgaacattaatgttaaagacttaagactttaacctgctggcagtcccaaatgaaattatgcaactttgatatcatattccttgatttaaattggcttttgtgattgagtgaaactttataaagcatatggtcagttatttaattaaaaaggcaaaacctgaaccaccttctgcacttaaagaagtctaacagtacaaatacactatctatcttagatagatatatttttttttatttttaaatattgtactatttatggtggtggggctttcttactaatacacaaataaatttaatcatttcaaaggcattctatttggtttagaagttgattcccaggagtgccatatttcagctactgtatttcctttttcttgtaatgtaagcagctcagataccatgtgctatcatttttgtatcaagttttttgcacaggatgtgaccactgtcagatcactgttcttttctttctttttgtgattgaaaagcctatactacaatttgaagtaaatttttgtttttcttagtaagtgtaaatggttgctttatttttattttaaaaaggtatgtctttggtttggcagaattcatgcagggctatcaagtggtgttctagggtaacagtgtccataattaacgcttagtcatagagtcaaaaacatttaagactgattgggttgaagtttataataaattatattaacatgtcttcctttttgaggtaaagatatatactttgtcaaatatcattttgtcatcctctaaatataaatccaaatacctcagctaagtaattctattttattatttttactgttatgtatgtttttaatcatatttcttaggaagtataggctactggacttagaataaaaagtccccaaacccaaacaaatggtttatgaaccagagtatatgtggaagattctttgctggtcttgctctgtgtgcatctgaagcttctttggcctagattttagcacaaacctgagtatatctcttctactttcatcatgtgttctgtaccttctttttgtttcattgggcatgctagggaaataggtggattttgtgtgtaatgccatcagtttttatgaaagcttgatgaggtataggtcatttgttttgagtatgtgggccagaaatttaaaattagaaatttgtttttctgttgagtatataaacaaaaattggtcccaattctaacaggtttaatccttcttgaagccaataagttttatcttttataatctgtcaggatgaaccactccttagcttttatccaatattaaactgcaagtgttagcactgaaatattgtcattgatagggaaaatatctattctttgagtcattgttactgaggcagttgagtgtaaggagctggctgcagtttattctacttaaccctttaaggctgaattgtcaaatgtacattgttccatgtcgttagatggaacatggaagccattgtctaatcaactctatcattagtgacttgatgtctcataccttaattttgtaatgatttttattctctgttacaaagacttgaaatacgtattaaatgcacgttaatgttttgctttgcattttaggttcagattatgacttgattgaaataaatgtgcctatacattc

SEQ ID NO: 18542 - DNA, 2877 bp, Artificial Sequence
  derived and/or modified sequence
aaggtggccagattccagaagatccccaacggcgagaacgagaccatgatccccgtgctgaccagcaagaaggccagcgagctgcccgtgagcgaggtggccagcatcctgcaggccgacctgcagaacggcctgaacaagtgcgaggtgagccacagaagagccttccacggctggaacgagttcgacatcagcgaggacgagcccctgtggaagaagtacatcagccagttcaagaaccccctgatcatgctgctgctggccagcgccgtgatcagcgtgctgatgcaccagttcgacgacgccgtgagcatcaccgtggccatcctgatcgtggtgaccgtggccttcgtgcaggagtacagaagcgagaagagcctggaggagctgagcaagctggtgccccccgagtgccactgcgtgagagagggcaagctggagcacaccctggccagagacctggtgcccggcgacaccgtgtgcctgagcgtgggcgacagagtgcccgccgacctgagactgttcgaggccgtggacctgagcatcgacgagagcagcctgaccggcgagaccaccccctgcagcaaggtgaccgccccccagcccgccgccaccaacggcgacctggccagcagaagcaacatcgccttcatgggcaccctggtgagatgcggcaaggccaagggcgtggtgatcggcaccggcgagaacagcgagttcggcgaggtgttcaagatgatgcaggccgaggaggcccccaagacccccctgcagaagagcatggacctgctgggcaagcagctgagcttctacagcttcggcatcatcggcatcatcatgctggtgggctggctgctgggcaaggacatcctggagatgttcaccatcagcgtgagcctggccgtggccgccatccccgagggcctgcccatcgtggtgaccgtgaccctggccctgggcgtgatgagaatggtgaagaagagagccatcgtgaagaagctgcccatcgtggagaccctgggctgctgcaacgtgatctgcagcgacaagaccggcaccctgaccaagaacgagatgaccgtgacccacatcttcaccagcgacggcctgcacgccgaggtgaccggcgtgggctacaaccagttcggcgaggtgatcgtggacggcgacgtggtgcacggcttctacaaccccgccgtgagcagaatcgtggaggccggctgcgtgtgcaacgacgccgtgatcagaaacaacaccctgatgggcaagcccaccgagggcgccctgatcgccctggccatgaagatgggcctggacggcctgcagcaggactacatcagaaaggccgagtaccccttcagcagcgagcagaagtggatggccgtgaagtgcgtgcacagaacccagcaggacagacccgagatctgcttcatgaagggcgcctacgagcaggtgatcaagtactgcaccacctaccagagcaagggccagaccctgaccctgacccagcagcagagagacgtgtaccagcaggagaaggccagaatgggcagcgccggcctgagagtgctggccctggccagcggccccgagctgggccagctgaccttcctgggcctggtgggcatcatcgacccccccagaaccggcgtgaaggaggccgtgaccaccctgatcgccagcggcgtgagcatcaagatgatcaccggcgacagccaggagaccgccgtggccatcgccagcagactgggcctgtacagcaagaccagccagagcgtgagcggcgaggagatcgacgccatggacgtgcagcagctgagccagatcgtgcccaaggtggccgtgttctacagagccagccccagacacaagatgaagatcatcaagagcctgcagaagaacggcagcgtggtggccatgaccggcgacggcgtgaacgacgccgtggccctgaaggccgccgacatcggcgtggccatgggccagaccggcaccgacgtgtgcaaggaggccgccgacatgatcctggtggacgacgacttccagaccatcatgagcgccatcgaggagggcaagggcatctacaacaacatcaagaacttcgtgagattccagctgagcaccagcatcgccgccctgaccctgatcagcctggccaccctgatgaacttccccaaccccctgaacgccatgcagatcctgtggatcaacatcatcatggacggcccccccgcccagagcctgggcgtggagcccgtggacaaggacgtgatcagaaagccccccagaaactggaaggacagcatcctgaccaagaacctgatcctgaagatcctggtgagcagcatcatcatcgtgtgcggcaccctgttcgtgttctggagagagctgagagacaacgtgatcacccccagagacaccaccatgaccttcacctgcttcgtgttcttcgacatgttcaacgccctgagcagcagaagccagaccaagagcgtgttcgagatcggcctgtgcagcaacagaatgttctgctacgccgtgctgggcagcatcatgggccagctgctggtgatctacttcccccccctgcagaaggtgttccagaccgagagcctgagcatcctggacctgctgttcctgctgggcctgaccagcagcgtgtgcatcgtggccgagatcatcaagaaggtggagagaagcagagagaagatccagaagcacgtgagcagcaccagcagcagcttcctggaggtgagcagcagcagcggcaacttcgtggccgtgtggctgtgggagagaagcggccagcagctggtggagatccacccccacctggagaccggcctgcccctgaccgaggacgtgagctgcgtgtag

SEQ ID NO: 18543 - DNA, 2850 bp, Artificial Sequence
  derived and/or modified sequence
atgaaggtggccagattccagaagatccccaacggcgagaacgagaccatgatccccgtgctgaccagcaagaaggccagcgagctgcccgtgagcgaggtggccagcatcctgcaggccgacctgcagaacggcctgaacaagtgcgaggtgagccacagaagagccttccacggctggaacgagttcgacatcagcgaggacgagcccctgtggaagaagtacatcagccagttcaagaaccccctgatcatgctgctgctggccagcgccgtgatcagcgtgctgatgcaccagttcgacgacgccgtgagcatcaccgtggccatcctgatcgtggtgaccgtggccttcgtgcaggagtacagaagcgagaagagcctggaggagctgagcaagctggtgccccccgagtgccactgcgtgagagagggcaagctggagcacaccctggccagagacctggtgcccggcgacaccgtgtgcctgagcgtgggcgacagagtgcccgccgacctgagactgttcgaggccgtggacctgagcatcgacgagagcagcctgaccggcgagaccaccccctgcagcaaggtgaccgccccccagcccgccgccaccaacggcgacctggccagcagaagcaacatcgccttcatgggcaccctggtgagatgcggcaaggccaagggcgtggtgatcggcaccggcgagaacagcgagttcggcgaggtgttcaagatgatgcaggccgaggaggcccccaagacccccctgcagaagagcatggacctgctgggcaagcagctgagcttctacagcttcggcatcatcggcatcatcatgctggtgggctggctgctgggcaaggacatcctggagatgttcaccatcagcgtgagcctggccgtggccgccatccccgagggcctgcccatcgtggtgaccgtgaccctggccctgggcgtgatgagaatggtgaagaagagagccatcgtgaagaagctgcccatcgtggagaccctgggctgctgcaacgtgatctgcagcgacaagaccggcaccctgaccaagaacgagatgaccgtgacccacatcttcaccagcgacggcctgcacgccgaggtgaccggcgtgggctacaaccagttcggcgaggtgatcgtggacggcgacgtggtgcacggcttctacaaccccgccgtgagcagaatcgtggaggccggctgcgtgtgcaacgacgccgtgatcagaaacaacaccctgatgggcaagcccaccgagggcgccctgatcgccctggccatgaagatgggcctggacggcctgcagcaggactacatcagaaaggccgagtaccccttcagcagcgagcagaagtggatggccgtgaagtgcgtgcacagaacccagcaggacagacccgagatctgcttcatgaagggcgcctacgagcaggtgatcaagtactgcaccacctaccagagcaagggccagaccctgaccctgacccagcagcagagagacgtgtaccagcaggagaaggccagaatgggcagcgccggcctgagagtgctggccctggccagcggccccgagctgggccagctgaccttcctgggcctggtgggcatcatcgacccccccagaaccggcgtgaaggaggccgtgaccaccctgatcgccagcggcgtgagcatcaagatgatcaccggcgacagccaggagaccgccgtggccatcgccagcagactgggcctgtacagcaagaccagccagagcgtgagcggcgaggagatcgacgccatggacgtgcagcagctgagccagatcgtgcccaaggtggccgtgttctacagagccagccccagacacaagatgaagatcatcaagagcctgcagaagaacggcagcgtggtggccatgaccggcgacggcgtgaacgacgccgtggccctgaaggccgccgacatcggcgtggccatgggccagaccggcaccgacgtgtgcaaggaggccgccgacatgatcctggtggacgacgacttccagaccatcatgagcgccatcgaggagggcaagggcatctacaacaacatcaagaacttcgtgagattccagctgagcaccagcatcgccgccctgaccctgatcagcctggccaccctgatgaacttccccaaccccctgaacgccatgcagatcctgtggatcaacatcatcatggacggcccccccgcccagagcctgggcgtggagcccgtggacaaggacgtgatcagaaagccccccagaaactggaaggacagcatcctgaccaagaacctgatcctgaagatcctggtgagcagcatcatcatcgtgtgcggcaccctgttcgtgttctggagagagctgagagacaacgtgatcacccccagagacaccaccatgaccttcacctgcttcgtgttcttcgacatgttcaacgccctgagcagcagaagccagaccaagagcgtgttcgagatcggcctgtgcagcaacagaatgttctgctacgccgtgctgggcagcatcatgggccagctgctggtgatctacttcccccccctgcagaaggtgttccagaccgagagcctgagcatcctggacctgctgttcctgctgggcctgaccagcagcgtgtgcatcgtggccgagatcatcaagaaggtggagagaagcagagagaagatccagaagcacgtgagcagcaccagcagcagcttcctggaggtgtggctgtgggagagaagcggccagcagctggtggagatccacccccacctggagaccggcctgcccctgaccgaggacgtgagctgcgtgtag

SEQ ID NO: 18544 - DNA, 2760 bp, Artificial Sequence
  derived and/or modified sequence
atgaaggtggccagattccagaagatccccaacggcgagaacgagaccatgatccccgtgctgaccagcaagaaggccagcgagctgcccgtgagcgaggtggccagcatcctgcaggccgacctgcagaacggcctgaacaagtgcgaggtgagccacagaagagccttccacggctggaacgagttcgacatcagcgaggacgagcccctgtggaagaagtacatcagccagttcaagaaccccctgatcatgctgctgctggccagcgccgtgatcagcgtgctgatgcaccagttcgacgacgccgtgagcatcaccgtggccatcctgatcgtggtgaccgtggccttcgtgcaggagtacagaagcgagaagagcctggaggagctgagcaagctggtgccccccgagtgccactgcgtgagagagggcaagctggagcacaccctggccagagacctggtgcccggcgacaccgtgtgcctgagcgtgggcgacagagtgcccgccgacctgagactgttcgaggccgtggacctgagcatcgacgagagcagcctgaccggcgagaccaccccctgcagcaaggtgaccgccccccagcccgccgccaccaacggcgacctggccagcagaagcaacatcgccttcatgggcaccctggtgagatgcggcaaggccaagggcgtggtgatcggcaccggcgagaacagcgagttcggcgaggtgttcaagatgatgcaggccgaggaggcccccaagacccccctgcagaagagcatggacctgctgggcaagcagctgagcttctacagcttcggcatcatcggcatcatcatgctggtgggctggctgctgggcaaggacatcctggagatgttcaccatcagcgtgagcctggccgtggccgccatccccgagggcctgcccatcgtggtgaccgtgaccctggccctgggcgtgatgagaatggtgaagaagagagccatcgtgaagaagctgcccatcgtggagaccctgggctgctgcaacgtgatctgcagcgacaagaccggcaccctgaccaagaacgagatgaccgtgacccacatcttcaccagcgacggcctgcacgccgaggtgaccggcgtgggctacaaccagttcggcgaggtgatcgtggacggcgacgtggtgcacggcttctacaaccccgccgtgagcagaatcgtggaggccggctgcgtgtgcaacgacgccgtgatcagaaacaacaccctgatgggcaagcccaccgagggcgccctgatcgccctggccatgaagatgggcctggacggcctgcagcaggactacatcagaaaggccgagtaccccttcagcagcgagcagaagtggatggccgtgaagtgcgtgcacagaacccagcaggacagacccgagatctgcttcatgaagggcgcctacgagcaggtgatcaagtactgcaccacctaccagagcaagggccagaccctgaccctgacccagcagcagagagacgtgtaccagcaggagaaggccagaatgggcagcgccggcctgagagtgctggccctggccagcggccccgagctgggccagctgaccttcctgggcctggtgggcatcatcgacccccccagaaccggcgtgaaggaggccgtgaccaccctgatcgccagcggcgtgagcatcaagatgatcaccggcgacagccaggagaccgccgtggccatcgccagcagactgggcctgtacagcaagaccagccagagcgtgagcggcgaggagatcgacgccatggacgtgcagcagctgagccagatcgtgcccaaggtggccgtgttctacagagccagccccagacacaagatgaagatcatcaagagcctgcagaagaacggcagcgtggtggccatgaccggcgacggcgtgaacgacgccgtggccctgaaggccgccgacatcggcgtggccatgggccagaccggcaccgacgtgtgcaaggaggccgccgacatgatcctggtggacgacgacttccagaccatcatgagcgccatcgaggagggcaagggcatctacaacaacatcaagaacttcgtgagattccagctgagcaccagcatcgccgccctgaccctgatcagcctggccaccctgatgaacttccccaaccccctgaacgccatgcagatcctgtggatcaacatcatcatggacggcccccccgcccagagcctgggcgtggagcccgtggacaaggacgtgatcagaaagccccccagaaactggaaggacagcatcctgaccaagaacctgatcctgaagatcctggtgagcagcatcatcatcgtgtgcggcaccctgttcgtgttctggagagagctgagagacaacgtgatcacccccagagacaccaccatgaccttcacctgcttcgtgttcttcgacatgttcaacgccctgagcagcagaagccagaccaagagcgtgttcgagatcggcctgtgcagcaacagaatgttctgctacgccgtgctgggcagcatcatgggccagctgctggtgatctacttcccccccctgcagaaggtgttccagaccgagagcctgagcatcctggacctgctgttcctgctgggcctgaccagcagcgtgtgcatcgtggccgagatcatcaagaaggtggagagaagcagagagaagatccagaagcacgtgagcagcaccagcagcagcttcctggaggtgtag

SEQ ID NO: 18545 - DNA, 2712 bp, Artificial Sequence
  derived and/or modified sequence
atgatccccgtgctgaccagcaagaaggccagcgagctgcccgtgagcgaggtggccagcatcctgcaggccgacctgcagaacggcctgaacaagtgcgaggtgagccacagaagagccttccacggctggaacgagttcgacatcagcgaggacgagcccctgtggaagaagtacatcagccagttcaagaaccccctgatcatgctgctgctggccagcgccgtgatcagcgtgctgatgcaccagttcgacgacgccgtgagcatcaccgtggccatcctgatcgtggtgaccgtggccttcgtgcaggagtacagaagcgagaagagcctggaggagctgagcaagctggtgccccccgagtgccactgcgtgagagagggcaagctggagcacaccctggccagagacctggtgcccggcgacaccgtgtgcctgagcgtgggcgacagagtgcccgccgacctgagactgttcgaggccgtggacctgagcatcgacgagagcagcctgaccggcgagaccaccccctgcagcaaggtgaccgccccccagcccgccgccaccaacggcgacctggccagcagaagcaacatcgccttcatgggcaccctggtgagatgcggcaaggccaagggcgtggtgatcggcaccggcgagaacagcgagttcggcgaggtgttcaagatgatgcaggccgaggaggcccccaagacccccctgcagaagagcatggacctgctgggcaagcagctgagcttctacagcttcggcatcatcggcatcatcatgctggtgggctggctgctgggcaaggacatcctggagatgttcaccatcagcgtgagcctggccgtggccgccatccccgagggcctgcccatcgtggtgaccgtgaccctggccctgggcgtgatgagaatggtgaagaagagagccatcgtgaagaagctgcccatcgtggagaccctgggctgctgcaacgtgatctgcagcgacaagaccggcaccctgaccaagaacgagatgaccgtgacccacatcttcaccagcgacggcctgcacgccgaggtgaccggcgtgggctacaaccagttcggcgaggtgatcgtggacggcgacgtggtgcacggcttctacaaccccgccgtgagcagaatcgtggaggccggctgcgtgtgcaacgacgccgtgatcagaaacaacaccctgatgggcaagcccaccgagggcgccctgatcgccctggccatgaagatgggcctggacggcctgcagcaggactacatcagaaaggccgagtaccccttcagcagcgagcagaagtggatggccgtgaagtgcgtgcacagaacccagcaggacagacccgagatctgcttcatgaagggcgcctacgagcaggtgatcaagtactgcaccacctaccagagcaagggccagaccctgaccctgacccagcagcagagagacgtgtaccagcaggagaaggccagaatgggcagcgccggcctgagagtgctggccctggccagcggccccgagctgggccagctgaccttcctgggcctggtgggcatcatcgacccccccagaaccggcgtgaaggaggccgtgaccaccctgatcgccagcggcgtgagcatcaagatgatcaccggcgacagccaggagaccgccgtggccatcgccagcagactgggcctgtacagcaagaccagccagagcgtgagcggcgaggagatcgacgccatggacgtgcagcagctgagccagatcgtgcccaaggtggccgtgttctacagagccagccccagacacaagatgaagatcatcaagagcctgcagaagaacggcagcgtggtggccatgaccggcgacggcgtgaacgacgccgtggccctgaaggccgccgacatcggcgtggccatgggccagaccggcaccgacgtgtgcaaggaggccgccgacatgatcctggtggacgacgacttccagaccatcatgagcgccatcgaggagggcaagggcatctacaacaacatcaagaacttcgtgagattccagctgagcaccagcatcgccgccctgaccctgatcagcctggccaccctgatgaacttccccaaccccctgaacgccatgcagatcctgtggatcaacatcatcatggacggcccccccgcccagagcctgggcgtggagcccgtggacaaggacgtgatcagaaagccccccagaaactggaaggacagcatcctgaccaagaacctgatcctgaagatcctggtgagcagcatcatcatcgtgtgcggcaccctgttcgtgttctggagagagctgagagacaacgtgatcacccccagagacaccaccatgaccttcacctgcttcgtgttcttcgacatgttcaacgccctgagcagcagaagccagaccaagagcgtgttcgagatcggcctgtgcagcaacagaatgttctgctacgccgtgctgggcagcatcatgggccagctgctggtgatctacttcccccccctgcagaaggtgttccagaccgagagcctgagcatcctggacctgctgttcctgctgggcctgaccagcagcgtgtgcatcgtggccgagatcatcaagaaggtggagagaagcagagagaagatccagaagcacgtgagcagcaccagcagcagcttcctggaggtgtag

SEQ ID NO: 18546 - protein, 939 aa, Artificial Sequence
  derived and/or modified sequence
MKVARFQKIPNGENETMIPVLTSKKASELPVSEVASILQADLQNGLNKCEVSHRRAFHGWNEFDISEDEPLWKKYISQFKNPLIMLLLASAVISVLMHQFDDAVSITVAILIVVTVAFVQEYRSEKSLEELSKLVPPECHCVREGKLEHTLARDLVPGDTVCLSVGDRVPADLRLFEAVDLSIDESSLTGETTPCSKVTAPQPAATNGDLASRSNIAFMGTLVRCGKAKGVVIGTGENSEFGEVFKMMQAEEAPKTPLQKSMDLLGKQLSFYSFGIIGIIMLVGWLLGKDILEMFTISVSLAVAAIPEGLPIVVTVTLALGVMRMVKKRAIVKKLPIVETLGCCNVICSDKTGTLTKNEMTVTHIFTSDGLHAEVTGVGYNQFGEVIVDGDVVHGFYNPAVSRIVEAGCVCNDAVIRNNTLMGKPTEGALIALAMKMGLDGLQQDYIRKAEYPFSSEQKWMAVKCVHRTQQDRPEICFMKGAYEQVIKYCTTYQSKGQTLTLTQQQRDVYQQEKARMGSAGLRVLALASGPELGQLTFLGLVGIIDPPRTGVKEAVTTLIASGVSIKMITGDSQETAVAIASRLGLYSKTSQSVSGEEIDAMDVQQLSQIVPKVAVFYRASPRHKMKIIKSLQKNGSVVAMTGDGVNDAVALKAADIGVAMGQTGTDVCKEAADMILVDDDFQTIMSAIEEGKGIYNNIKNFVRFQLSTSIAALTLISLATLMNFPNPLNAMQILWINIIMDGPPAQSLGVEPVDKDVIRKPPRNWKDSILTKNLILKILVSSIIIVCGTLFVFWRELRDNVITPRDTTMTFTCFVFFDMFNALSSRSQTKSVFEIGLCSNRMFCYAVLGSIMGQLLVIYFPPLQKVFQTESLSILDLLFLLGLTSSVCIVAEIIKKVERSREKIQKHVWLWERSGQQLVEIHPHLETGLPLTEDVSCV

SEQ ID NO: 18547 - DNA, 2820 bp, Artificial Sequence
  derived and/or modified sequence
atgaaggtggcaagattccagaaaattcctaatggtgaaaatgagaccatgatccctgttctgacctctaagaaggctagtgagctgccagtaagtgaggtggccagtattctccaggctgatttacaaaacggactgaataagtgcgaagtcagccaccgacgggcctttcatggctggaatgaattcgatatcagcgaagatgaaccgctgtggaagaagtatatcagccagttcaagaatccgctgattatgctgttactggcatctgccgtgattagcgtactcatgcatcagtttgatgatgccgtttcaatcacggttgccatcctcattgtggtgaccgtcgccttcgtgcaggagtatcgtagtgaaaaaagcctggaagagctgtctaagctggtcccacctgaatgccactgcgtgcgggagggaaagctggagcatactcttgctagagacctggtcccgggcgacaccgtgtgcttgagtgtaggtgaccgggtgccagctgaccttcggctattcgaagccgtagacttatccattgacgagtcttctttgaccggcgaaaccacgccttgtagcaaagtcacagctccccagccagccgctaccaatggagacctggctagcaggagtaatatagccttcatgggtaccttggtgcggtgcggtaaagcaaagggagtggtaataggaacaggagagaattccgagtttggggaggtctttaaaatgatgcaggccgaagaagcacctaagaccccactacagaagagtatggatctccttggcaaacagctgtcgttttattcatttggcattatcggaattattatgctcgtcgggtggttacttgggaaagatattctggagatgtttacaatatcagtctcactcgccgtcgctgccattcctgaggggctccctatcgtggtaacagtcacacttgcgctgggagtgatgcggatggtgaaaaagcgcgctattgtcaaaaagctgcccattgttgaaacactgggttgttgcaacgtgatttgctccgataagactggaacactgacaaagaatgaaatgacggttacacacatattcacatcggatggtctgcatgctgaagtgacaggagtggggtataatcagttcggcgaggtgatagttgacggtgacgtcgtgcacggattctacaatccagctgtatccaggatcgtcgaggccgggtgcgtctgcaacgatgccgtcatcagaaacaacacactcatggggaagccaactgagggggcgctgattgctctggctatgaaaatggggttggacgggcttcagcaggattatatcaggaaggccgagtatcccttcagctctgagcagaaatggatggccgtcaaatgcgtgcatcgcactcagcaagaccgcccggagatttgctttatgaaaggcgcctatgagcaagtgatcaaatattgcacaacatatcaatcaaaggggcagaccctcaccttaacgcagcagcaaagggatgtatatcaacaggagaaggctcgtatgggttcagctggtcttcgggtgttggccctcgctagcggccctgaactgggtcagttgaccttcctgggactcgttggaatcattgatccaccgcgcaccggagtgaaggaggcagtgactacactcattgcatctggggtgtccatcaaaatgatcaccggggacagccaggagacagctgtggccatcgcttcacggctcggactctacagtaaaacttcgcagagtgtgagtggggaggagattgacgctatggatgtacagcagctgtctcagatagttcctaaagtagcagttttctaccgggcaagccctagacataagatgaagattatcaaatctttgcaaaaaaacggcagtgtggtagcgatgacgggcgatggggtcaacgatgccgtcgcacttaaggccgcggatatcggcgttgccatgggccagacaggcacagacgtatgtaaggaggccgctgatatgatcctcgtagacgatgattttcaaacgatcatgagcgccatcgaggaagggaaagggatttacaacaatattaaaaattttgtacgattccagcttagtacgtccattgcagctcttacactgataagtctggcgacgctgatgaattttcctaaccctttaaatgccatgcaaattctttggatcaatatcatcatggatggaccgcctgcccagtcactgggtgttgagccagtcgataaggacgtcattcgcaaacctccacgtaactggaaagattccatccttaccaagaacttgatcctgaaaatcctggtgtcaagtatcatcattgtgtgtggaacactctttgttttctggcgtgagctgcgtgacaacgtgataacaccacgggatacaaccatgacattcacatgcttcgtgttctttgatatgtttaacgctctatcctcaaggtcccagactaagagtgtttttgaaatcggactgtgctcaaataggatgttttgttacgcagtcctgggctccataatgggccaattgcttgtcatatacttcccaccactccagaaggttttccaaacagagtccctgagcatccttgatcttctgtttttgctggggctcacatcatcagtgtgcatagtggccgaaataatcaagaaagtggagaggtcacgagagaaaattcagaagcacgtctggttgtgggagagaagcggccagcagttagtcgaaattcatccccaccttgaaactgggctgccactgaccgaagatgtgtcatgcgtgtag

SEQ ID NO: 18548 - DNA, 2820 bp, Artificial Sequence
  derived and/or modified sequence
atgaaggtggcccgcttccagaagatccccaatggagaaaatgagaccatgatccctgtgctgaccagcaagaaggccagcgagctgcctgtgtctgaggtggccagcatcctgcaggccgacctgcagaatggcctgaacaagtgtgaggtgagccaccggcgggccttccacggctggaatgaatttgacatcagtgaagatgagcccctgtggaagaagtacatcagccagttcaagaaccccctcatcatgctgctgctggccagcgctgtgatctctgtgctgatgcaccagtttgatgatgctgtgtccatcaccgtggccatcctgattgtggtgacagtggcctttgtgcaggagtacagaagtgagaagagcctggaggagctgagcaagctggtgcccccagagtgccactgtgtgcgggagggcaagctggagcacaccctggcccgggacctggtgcctggggacacagtgtgcctgtctgtgggggacagagtgcctgctgacctgcggctgtttgaggccgtggacctgagcattgatgagagcagcctgactggagagaccaccccctgcagcaaggtgacagccccccagcctgctgccaccaatggagacctggccagccgcagcaacatcgccttcatgggcaccctggtgcgctgtgggaaggccaagggcgtggtgattggaactggagaaaattctgaatttggagaggtgttcaagatgatgcaggccgaggaggcccccaagacccccctgcagaagtccatggacctgctgggcaagcagctgtccttctacagctttggcatcatcggcatcatcatgctggtgggctggctgctgggcaaggacatcctggagatgttcaccatctctgtgtccctggccgtggccgccatccctgagggcctgcccatcgtggtgacagtgaccctggccctgggcgtgatgaggatggtgaagaagagggccatcgtgaagaagctgcccatcgtggagaccctgggctgctgcaacgtcatctgcagcgacaagacaggcaccctgaccaagaatgagatgacagtgacccacatcttcaccagtgatggcctgcatgctgaggtgactggagtgggctacaaccagtttggagaggtgattgtggatggagatgtggtgcacggcttctacaacccagctgtgagccgcatcgtggaggccggctgtgtgtgcaatgatgctgtgatccggaacaacaccctgatgggcaagcccacagagggcgccctgattgccctggccatgaagatgggcctggatggcctgcagcaggactacatcaggaaggccgagtaccccttcagcagcgagcagaagtggatggctgtgaagtgtgtgcacaggacccagcaggacaggcctgagatctgcttcatgaagggggcctatgagcaggtgatcaagtactgcaccacctaccagagcaagggccagaccctgaccctgacccagcagcagagagatgtgtaccagcaggagaaggccaggatgggcagcgctggcctgcgggtgctggccctggccagcggccctgagctgggccagctgaccttcctgggcctggtgggcatcattgatcctcccaggactggagtgaaggaggccgtgaccaccctcatcgccagcggcgtgtccatcaagatgatcaccggggacagccaggagacagctgtggccatcgccagccggctgggcctgtacagcaagaccagccagagcgtgtctggagaggagattgatgccatggatgtgcagcagctgagccagatcgtgcccaaggtggccgtgttctaccgggccagccccaggcacaagatgaagatcatcaagagcctgcagaagaatggatctgtggtggccatgactggagatggagtgaatgatgctgtggccctgaaggctgctgacattggagtggccatgggccagacaggaacagatgtgtgcaaggaggccgctgacatgatcctggtggatgatgacttccagaccatcatgtctgccatcgaggagggcaagggcatctacaacaacatcaagaactttgtgcgcttccagctgagcaccagcattgctgccctgaccctcatcagcctggccaccctgatgaacttccccaaccccctgaatgccatgcagatcctgtggatcaacatcatcatggatggccccccagcccagagcctgggcgtggagcctgtggacaaggatgtgatcaggaagccacccaggaactggaaggacagcatcctgaccaagaacctgatcctgaagatcctggtgagcagcatcatcatcgtgtgtggcaccctgtttgtgttctggagggagctgcgggacaacgtcatcaccccccgggacaccaccatgaccttcacctgctttgtgttctttgacatgtttaatgccctgagcagccgcagccagaccaagtctgtgtttgagatcggcctgtgcagcaacaggatgttctgctatgctgtgctgggcagcatcatgggccagctgctggtgatctacttcccccccctgcagaaggtgttccagacagagagcctgagcatcctggacctgctcttcctgctgggcctgaccagctctgtgtgcatcgtggccgagatcatcaagaaggtggagaggagccgggagaagatccagaagcacgtgtggctgtgggagaggagcggccagcagctggtggagatccacccccacctggagaccggcctgcccctgacagaagatgtgtcctgtgtgtag

SEQ ID NO: 18549 - DNA, 2820 bp, Artificial Sequence
  derived and/or modified sequence
atgaaggtggcccggttccagaagatccccaacggcgagaacgagaccatgatacccgtgctgacgtccaaaaaagctagcgagctccccgttagtgaagtcgccagcatcctgcaggccgacctgcagaacggacttaataagtgcgaagtgagtcacaggcgtgctttccatggctggaatgagtttgacatctctgaggatgaaccactgtggaaaaagtacatcagtcaattcaaaaatccgctgatcatgctgctactagcttccgcggtaattagcgtgctgatgcaccagttcgatgacgcagtatcgatcaccgtagccatattgatcgtggtgaccgtggccttcgtgcaagaatatcgcagcgagaaatccctggaagagcttagcaaactcgtccctcctgaatgccactgcgtacgggagggtaagctggagcatactctcgccagagacctggttcctggcgacacagtctgtctctcagtgggggacagagttcccgccgacctccggctgtttgaggcggttgatctcagtatcgatgagagttcactaacaggagaaactactccgtgctcaaaagtgactgcaccacagccagcggctactaacggagacttggcctcacgttcaaacattgcttttatggggaccctggtaaggtgtgggaaagcaaaaggcgtggtcataggtactggagagaacagcgagtttggagaagtcttcaagatgatgcaggcagaggaggcacctaagactcccttgcagaaatctatggacctgctggggaagcagctcagcttttattcattcggaattatcgggatcatcatgctggtgggttggctgctgggtaaggatatacttgaaatgtttaccatcagcgtgagcctcgccgtagcagccattcctgaagggctgcccattgtggtgactgtcaccctggcactgggtgtgatgcgcatggtgaagaaaagggccatagtgaagaaactacctatcgtggaaacattgggatgctgtaatgtgatttgtagcgacaaaaccggaacgctgactaagaatgaaatgacagtaacccacatattcaccagcgatggtctgcacgcagaggtcaccggggtggggtacaatcaattcggcgaagtgatcgtggatggtgatgtggtgcatggcttttacaaccccgctgtctctcgaattgttgaagccggctgcgtttgcaacgacgcggtgatccgcaataacactcttatggggaaacccacggagggtgctctcatcgcactggcgatgaaaatgggcctggacgggttgcaacaagattacattcggaaagctgagtaccctttttccagtgagcagaagtggatggccgttaaatgcgtgcatagaacccagcaggacagaccggagatctgcttcatgaagggggcctacgagcaggttatcaaatactgtacgacataccagtctaaggggcagacgctgaccctgacccagcagcagcgcgacgtttatcagcaggaaaaggcccgtatggggagtgcgggcctgagggtgctggccctggctagtggtcctgagctgggtcagctaacatttctcggcctcgtgggcattatcgatccacccaggactggcgtcaaggaagccgtaacaactctcattgcctctggagtgagtatcaagatgataacgggagattcacaagagaccgcagtggctatcgccagccggctgggcctctatagtaagacaagccaatcagtaagcggcgaggagattgatgcaatggatgtccagcagttatcccagattgtaccgaaagtcgcggtgttctaccgagcgtcaccaaggcataaaatgaagatcattaaatccctccagaagaatggtagtgtagtagctatgaccggcgacggtgtgaacgatgccgtggccctgaaggctgcagatatcggggtggctatggggcaaacgggaacagatgtgtgtaaagaggccgctgatatgattctagttgacgacgattttcagaccataatgagtgctatcgaggagggaaaaggcatttacaacaacattaagaactttgtgagatttcagctcagcaccagcattgccgccctcaccctcatcagcctggcaacgctaatgaactttcccaatcccctgaacgctatgcagattctgtggatcaacatcataatggacggccctccagcacagagccttggcgtggagccggttgataaggatgtgatccggaagcccccaaggaattggaaagactctatcctcacgaagaatcttattcttaagattcttgtgagctcaatcatcatcgtttgcggtaccctgtttgtgttctggcgtgagcttcgtgataacgtcatcacgccccgagacacgacaatgacatttacctgtttcgtcttttttgacatgtttaatgcattgagctcacgcagccaaaccaagtctgtgtttgagattgggctgtgcagcaaccgcatgttttgttatgccgtcctcggcagcattatggggcagcttcttgtgatttatttcccacctttacagaaggttttccagacggagagcttgtccatcctcgacctcctctttcttttgggtttgacgtccagcgtgtgtatcgtggcagagattatcaagaaggtagagaggtcacgtgagaagatccagaaacacgtgtggctgtgggaacgctcaggccagcagcttgtagaaatccacccccacctcgagactggccttcccctcacggaagacgttagctgcgtgtag

SEQ ID NO: 18550 - DNA, 2820 bp, Artificial Sequence
  derived and/or modified sequence
atgaaggtggcccgtttccagaaaatccccaacggggagaacgagacaatgatacccgtgctgacctccaagaaggcctctgagctccctgtctccgaagttgcatccattctgcaggcagatctgcagaatgggctaaacaagtgtgaggtgtcacacaggcgggcatttcatggatggaacgaattcgacatctccgaagatgaaccgttgtggaaaaagtatatctctcagttcaaaaatcccctcattatgttactcttggcttcggccgtgatcagcgtgctcatgcatcaatttgacgatgccgtgtctatcacggtggctatcttgattgtcgtgacagtggcattcgtgcaggagtaccggtcagaaaagagccttgaggaattaagcaagctcgtcccgccagagtgccactgcgtcagagagggaaagttggagcatactctggcacgcgacttggtccccggtgatactgtgtgcctgtctgtcggagatagggttccggcagatctgagactctttgaagcagttgatctgagcatcgacgagagttccctgacaggagagaccactccctgctccaaagttacagctccgcagcccgctgccacaaatggcgacctggctagtaggagtaatatcgcctttatgggtaccctagtgcgctgcggaaaagcgaaaggcgtcgtaattggcactggtgagaactccgagtttggagaggtttttaaaatgatgcaagctgaggaggcacccaaaacacccttgcagaagtccatggacctgcttggtaagcaactgagcttctacagcttcggcatcatcggaatcattatgctggtgggatggttattgggcaaggacatcctagagatgtttaccattagcgtctccctggcagtggccgctatccccgagggactcccaatcgttgtgactgttactctggccctcggcgttatgaggatggtgaaaaagagggcaattgtgaaaaaactcccgattgtcgagactctgggctgttgcaatgtgatctgttcggacaagaccggtacgctcacgaagaatgagatgactgtgacccatattttcaccagcgacggactccacgcagaggtgacgggggttggatacaaccagtttggcgaggtaattgtggacggggacgttgttcatggtttttataacccagcagttagccgcattgtggaagccggttgcgtttgcaatgacgcagttatccgaaacaacaccctgatgggcaaacccacggaaggggctcttattgcactggccatgaagatgggtctcgatgggttgcagcaagactacatccgtaaggctgagtaccctttcagctctgaacaaaagtggatggccgtgaagtgcgtgcaccgcacccagcaggatagacctgaaatctgctttatgaaaggggcatatgagcaggtgataaagtactgcacaacataccagtccaaaggccagactctgaccctaacccagcagcagcgagatgtgtatcagcaggaaaaagcacgaatgggctcagctggccttcgagtgttggccttggctagcggacctgaacttggccagttgaccttccttgggcttgtgggcattattgatcctccgcgtacaggagtaaaagaggctgttaccaccctgatcgccagcggcgtctcaatcaagatgattacaggggatagtcaagagacagccgtggctatcgctagccgcttaggcctttattctaaaacctcccagagcgtgtccggcgaggagatcgacgctatggatgtgcagcagttgtctcaaattgtgcccaaagttgcagtcttctatagggcatctcccagacataaaatgaaaatcataaaatctctccaaaagaacggtagtgttgtcgccatgacaggagatggcgtgaatgatgccgtcgcactgaaggctgctgatatcggtgtggccatggggcagaccgggacagacgtgtgcaaagaggcagctgatatgatccttgtggatgatgactttcagaccattatgagcgcaattgaagaaggcaagggcatttacaacaatattaaaaatttcgtgcgttttcagctgagcacctctattgctgcacttacgctcatctccctggcgaccctgatgaactttccaaatccattgaacgctatgcagatcctctggatcaacatcattatggacggtcctcctgcccagtccctgggcgtcgagcctgtggataaagacgttattagaaaacccccacgcaactggaaggactctatcctgacgaaaaatcttatactcaagatactggtaagtagtatcataatcgtgtgcggaacgctatttgttttctggagagagttgcgggataacgtgatcaccccccgagacaccaccatgacctttacatgcttcgtctttttcgacatgtttaacgcccttagctcccggagtcagactaagtctgtctttgaaattggtctgtgctctaacaggatgttttgttatgcggttctggggtctatcatggggcagttgctcgtgatctacttcccccctcttcagaaggttttccagactgagtccctgagtatcctagatctcctctttctgctggggctgacatcatcggtctgtatcgtggccgagattatcaaaaaagtggaacggtctagagagaagattcagaaacatgtctggctctgggagcgttccgggcagcaacttgttgaaattcaccctcatctggagacaggtttacccctgacggaggatgtgtcatgcgtgtag

SEQ ID NO: 18551 - DNA, 3386 bp, Artificial Sequence
  derived and/or modified sequence
gggggtgacagcctgggattccgggggcttctcttccttgtcctcctcctctcctctctattcccagtgtggccgtggctgacactaaagactttgtagccatcaacccgagtgcagtttcgatggaaaatgaaggttgcacgttttcaaaaaatacctaatggtgaaaatgagacaatgattcctgtattgacatcaaaaaaagcaagtgaattaccagtcagtgaagttgcaagcattctccaagctgatcttcagaatggtctaaacaaatgtgaagttagtcataggcgagcctttcatggctggaatgagtttgatattagtgaagatgagccactgtggaagaagtatatttctcagtttaaaaatccccttattatgctgcttctggcttctgcagtcatcagtgttttaatgcatcagtttgatgatgccgtcagtatcactgtggcaatacttatcgttgttacagttgcctttgttcaggaatatcgttcagaaaaatctcttgaagaattgagtaaacttgtgccaccagaatgccattgtgtgcgtgaaggaaaattggagcatacacttgcccgagacttggttccaggtgatacagtttgcctttctgttggggatagagttcctgctgacttacgcttgtttgaggctgtggatctttccattgatgagtccagcttgacaggtgagacaacgccttgttctaaggtgacagctcctcagccagctgcaactaatggagatcttgcatcgagaagtaacattgcctttatgggaacactggtcagatgtggcaaagcaaagggtgttgtcattggaacaggagaaaattctgaatttggggaggtttttaaaatgatgcaagcagaagaggcaccaaaaacccctctgcagaagagcatggacctcttaggaaaacaactttccttttactcctttggtataataggaatcatcatgttggttggctggttactgggaaaagatatcctggaaatgtttactattagtgtaagtttggctgtagcagcaattcctgaaggtctccccattgtggtcacagtgacgctagctcttggtgttatgagaatggtgaagaaaagggccattgtgaaaaagctgcctattgttgaaactctgggctgctgtaatgtgatttgttcagataaaactggaacactgacgaagaatgaaatgactgttactcacatatttacttcagatggtctgcatgctgaggttactggagttggctataatcaatttggggaagtgattgttgatggtgatgttgttcatggattctataacccagctgttagcagaattgttgaggcgggctgtgtgtgcaatgatgctgtaattagaaacaatactctaatggggaagccaacagaaggggccttaattgctcttgcaatgaagatgggtcttgatggacttcaacaagactacatcagaaaagctgaatacccttttagctctgagcaaaagtggatggctgttaagtgtgtacaccgaacacagcaggacagaccagagatttgttttatgaaaggtgcttacgaacaagtaattaagtactgtactacataccagagcaaagggcagaccttgacacttactcagcagcagagagatgtgtaccaacaagagaaggcacgcatgggctcagcgggactcagagttcttgctttggcttctggtcctgaactgggacagctgacatttcttggcttggtgggaatcattgatccacctagaactggtgtgaaagaagctgttacaacactcattgcctcaggagtatcaataaaaatgattactggagattcacaggagactgcagttgcaatcgccagtcgtctgggattgtattccaaaacttcccagtcagtctcaggagaagaaatagatgcaatggatgttcagcagctttcacaaatagtaccaaaggttgcagtattttacagagctagcccaaggcacaagatgaaaattattaagtcgctacagaagaacggttcagttgtagccatgacaggagatggagtaaatgatgcagttgctctgaaggctgcagacattggagttgcgatgggccagactggtacagatgtttgcaaagaggcagcagacatgatcctagtggatgatgattttcaaaccataatgtctgcaatcgaagagggtaaagggatttataataacattaaaaatttcgttagattccagctgagcacgagtatagcagcattaactttaatctcattggctacattaatgaactttcctaatcctctcaatgccatgcagattttgtggatcaatattattatggatggacccccagctcagagccttggagtagaaccagtggataaagatgtcattcgtaaacctcctcgcaactggaaagacagcattttgactaaaaacttgatacttaaaatacttgtttcatcaataatcattgtttgtgggactttgtttgtcttctggcgtgagctacgagacaatgtgattacacctcgagacacaacaatgaccttcacatgctttgtgttttttgacatgttcaatgcactaagttccagatcccagaccaagtctgtgtttgagattggactctgcagtaatagaatgttttgctatgcagttcttggatccatcatgggacaattactagttatttactttcctccgcttcagaaggtttttcagactgagagcctaagcatactggatctgttgtttcttttgggtctcacctcatcagtgtgcatagtggcagaaattataaagaaggttgaaaggagcagggaaaagatccagaagcatgtctggctctgggagaggagtggacagcagctggttgagatacatccccatctggagacaggactgccactgacagaagatgtgagctgtgtctaagtccagtcttgtgcccagccgtgtctgcgccttcactctttggaactctgcatacaacatcttagcaccatcttcctgcagctcttccttacctaaataaagaaacagcccaagggcagtatttctaaaagcactgtaacagcttttcattttctccacatatactacaaattctataaagaaagaaattaatttaaaaaaactaagatgtttttctcttctggcttcataaatgccttgctgtataaattgaaatattgatactgaactgtctttttaatgatgacctaactttattcaacccatcggaatttactttttccctgaaataagatcttttccactggtctactacctgaccataaacatgtctgcatttgaattctctaaaccctaaatctgtgtctatgaaaaatacaaatgactattaaatatta

SEQ ID NO: 18552 - DNA, 2820 bp, Artificial Sequence
  derived and/or modified sequence
atgaaggtggccagattccagaagatccccaacggcgagaacgagaccatgatccccgtgctgaccagcaagaaggccagcgagctgcccgtgagcgaggtggccagcatcctgcaggccgacctgcagaacggcctgaacaagtgcgaggtgagccacagaagagccttccacggctggaacgagttcgacatcagcgaggacgagcccctgtggaagaagtacatcagccagttcaagaaccccctgatcatgctgctgctggccagcgccgtgatcagcgtgctgatgcaccagttcgacgacgccgtgagcatcaccgtggccatcctgatcgtggtgaccgtggccttcgtgcaggagtacagaagcgagaagagcctggaggagctgagcaagctggtgccccccgagtgccactgcgtgagagagggcaagctggagcacaccctggccagagacctggtgcccggcgacaccgtgtgcctgagcgtgggcgacagagtgcccgccgacctgagactgttcgaggccgtggacctgagcatcgacgagagcagcctgaccggcgagaccaccccctgcagcaaggtgaccgccccccagcccgccgccaccaacggcgacctggccagcagaagcaacatcgccttcatgggcaccctggtgagatgcggcaaggccaagggcgtggtgatcggcaccggcgagaacagcgagttcggcgaggtgttcaagatgatgcaggccgaggaggcccccaagacccccctgcagaagagcatggacctgctgggcaagcagctgagcttctacagcttcggcatcatcggcatcatcatgctggtgggctggctgctgggcaaggacatcctggagatgttcaccatcagcgtgagcctggccgtggccgccatccccgagggcctgcccatcgtggtgaccgtgaccctggccctgggcgtgatgagaatggtgaagaagagagccatcgtgaagaagctgcccatcgtggagaccctgggctgctgcaacgtgatctgcagcgacaagaccggcaccctgaccaagaacgagatgaccgtgacccacatcttcaccagcgacggcctgcacgccgaggtgaccggcgtgggctacaaccagttcggcgaggtgatcgtggacggcgacgtggtgcacggcttctacaaccccgccgtgagcagaatcgtggaggccggctgcgtgtgcaacgacgccgtgatcagaaacaacaccctgatgggcaagcccaccgagggcgccctgatcgccctggccatgaagatgggcctggacggcctgcagcaggactacatcagaaaggccgagtaccccttcagcagcgagcagaagtggatggccgtgaagtgcgtgcacagaacccagcaggacagacccgagatctgcttcatgaagggcgcctacgagcaggtgatcaagtactgcaccacctaccagagcaagggccagaccctgaccctgacccagcagcagagagacgtgtaccagcaggagaaggccagaatgggcagcgccggcctgagagtgctggccctggccagcggccccgagctgggccagctgaccttcctgggcctggtgggcatcatcgacccccccagaaccggcgtgaaggaggccgtgaccaccctgatcgccagcggcgtgagcatcaagatgatcaccggcgacagccaggagaccgccgtggccatcgccagcagactgggcctgtacagcaagaccagccagagcgtgagcggcgaggagatcgacgccatggacgtgcagcagctgagccagatcgtgcccaaggtggccgtgttctacagagccagccccagacacaagatgaagatcatcaagagcctgcagaagaacggcagcgtggtggccatgaccggcgacggcgtgaacgacgccgtggccctgaaggccgccgacatcggcgtggccatgggccagaccggcaccgacgtgtgcaaggaggccgccgacatgatcctggtggacgacgacttccagaccatcatgagcgccatcgaggagggcaagggcatctacaacaacatcaagaacttcgtgagattccagctgagcaccagcatcgccgccctgaccctgatcagcctggccaccctgatgaacttccccaaccccctgaacgccatgcagatcctgtggatcaacatcatcatggacggcccccccgcccagagcctgggcgtggagcccgtggacaaggacgtgatcagaaagccccccagaaactggaaggacagcatcctgaccaagaacctgatcctgaagatcctggtgagcagcatcatcatcgtgtgcggcaccctgttcgtgttctggagagagctgagagacaacgtgatcacccccagagacaccaccatgaccttcacctgcttcgtgttcttcgacatgttcaacgccctgagcagcagaagccagaccaagagcgtgttcgagatcggcctgtgcagcaacagaatgttctgctacgccgtgctgggcagcatcatgggccagctgctggtgatctacttcccccccctgcagaaggtgttccagaccgagagcctgagcatcctggacctgctgttcctgctgggcctgaccagcagcgtgtgcatcgtggccgagatcatcaagaaggtggagagaagcagagagaagatccagaagcacgtgtggctgtgggagagaagcggccagcagctggtggagatccacccccacctggagaccggcctgcccctgaccgaggacgtgagctgcgtgtag

SEQ ID NO: 18553 - protein, 108 aa, Artificial Sequence
  derived and/or modified sequence
MAAPCLLRQGRAGALKTMLQEAQVFRGLASTVSLSAESGKSEKGQPQNSKKQSPPKKPAPVPAEPFDNTTYKNLQHHDYSTYTFLDLNLELSKFRMPQPSSGRESPRH

SEQ ID NO: 18554 - DNA, 327 bp, Artificial Sequence
  derived and/or modified sequence
atggcggccccatgtcttctccgccaagggcgagcaggcgctctgaagactatgctgcaggaagcccaggtcttccgcgggctcgcttcaacagtgtcactgtccgctgaaagcgggaaatcggagaaaggtcaaccacaaaacagtaaaaagcagtctccacccaagaaacccgcacccgtccctgcggagcccttcgacaataccacctacaaaaacctacagcaccatgactatagcacatatacttttctggaccttaatctggagctttccaaatttcggatgccccagccttcatctggcagagagagccccagacattag

SEQ ID NO: 18555 - DNA, 339 bp, Artificial Sequence
  derived and/or modified sequence
atgctccaagaggctcaggtgttccgtgggcttgcgagcacggtgtcactgagtgcagaaagtggaaagagcgaaaaaggtcaacctcagaactcaaagaaacagagccctcctaaatccgtgcccaccccgcatagacggtactcaccctgtggagattggaaagatgctagttctttgaagccagctccagtcccagccgagcctttcgataatactacctataagaaccttcagcatcatgattattctacttacactttcctggacctcaacttggagttatctaaattccggatgcctcagccatccagtggacgcgagagcccgcgtcattag

SEQ ID NO: 18556 - DNA, 327 bp, Artificial Sequence
  derived and/or modified sequence
atggccgccccctgcctgctgcggcagggccgggccggggccctgaagaccatgctgcaggaggcccaggtgttccggggcctggccagcacagtgtccctgtctgctgagagcggcaagtctgagaagggccagccccagaacagcaagaagcagagcccccccaagaagccagcccctgtgcctgctgagccctttgacaacaccacctacaagaacctgcagcaccacgactacagcacctacaccttcctggacctgaacctggagctgagcaagttcaggatgccccagcccagcagcggccgggagagccccaggcactag

SEQ ID NO: 18557 - DNA, 339 bp, Artificial Sequence
  derived and/or modified sequence
atgctgcaggaggcccaggtgttccggggcctggccagcacagtgtccctgtctgctgagagcggcaagtctgagaagggccagccccagaacagcaagaagcagagcccccccaagtctgtgcccaccccccaccggcgctacagcccctgtggggactggaaggatgccagcagcctgaagccagcccctgtgcctgctgagccctttgacaacaccacctacaagaacctgcagcaccacgactacagcacctacaccttcctggacctgaacctggagctgagcaagttcaggatgccccagcccagcagcggccgggagagccccaggcactag

SEQ ID NO: 18558 - DNA, 1045 bp, Artificial Sequence
  derived and/or modified sequence
ggctgttcaggcgcgggtgcgcgcgcagctgctgtggccctgcttggtgcgcccgctgtcaccgccatggctgccccgtgtttgctgcggcaaggacgagccggggcgctgaagactatgctccaggaagcccaggtgtttcgaggacttgcttctacggtttctttgtctgcggaatcagggaagagtgaaaagggtcagccacagaattccaagaagcaaagtccaccaaaaaagccagccccagtgcctgctgagccgtttgacaacactacctacaagaacctgcagcatcatgactacagcacgtacaccttcttagacctcaacctcgaactctcaaaattcaggatgcctcagccctcctcaggccgggagtcacctcgacactgagggccctcggtgtgaagatgaaccttccaccgtcttcactgcatcctggagtgcaaaaataaaatccactcaagagtcacaaggcccgctgtgcataatcggtttcacttttacctttttttttttttttttttttttgagacagggtctcactctgtcacccaggctggagtgcagtggcacattctcggctcactgcaacttccgcctcctgggttcaagtgattctcccacctcagcctcccaagtaggtgggattacaggtactcaccaccaggtccagctaacttttgtatttttagtagagacagggtttcaccatgttggccaggctggtctcgaactcctgacctcagatggtctgcccacctccgcctcccaaagtgctgggattacaggcgtgagccactgcgcccggccactttcacactttttacagtgagtggtgaattagcaacagtaacactgattatccaacatatattttggaatatctactatgtgcaaggaatttttcttaaactctaaggttatgaatcactgggcaaatccatataattagagaattttaagtgctttagagcggtgtgattctactgtgctcagcctagtcaatttcgcattaaactgattatcagctgagtatcaataa

SEQ ID NO: 18559 - DNA, 985 bp, Artificial Sequence
  derived and/or modified sequence
agactatgctccaggaagcccaggtgtttcgaggacttgcttctacggtttctttgtctgcggaatcagggaagagtgaaaagggtcagccacagaattccaagaagcaaagtccaccaaaaagtgtccctacaccacaccgaagatactcaccttgtggagattggaaggatgccagctctttaaagccagccccagtgcctgctgagccgtttgacaacactacctacaagaacctgcagcatcatgactacagcacgtacaccttcttagacctcaacctcgaactctcaaaattcaggatgcctcagccctcctcaggccgggagtcacctcgacactgagggccctcggtgtgaagatgaaccttccaccgtcttcactgcatcctggagtgcaaaaataaaatccactcaagagtcacaaggcccgctgtgcataatcggtttcacttttacctttttttttttttttttttttttgagacagggtctcactctgtcacccaggctggagtgcagtggcacattctcggctcactgcaacttccgcctcctgggttcaagtgattctcccacctcagcctcccaagtaggtgggattacaggtactcaccaccaggtccagctaacttttgtatttttagtagagacagggtttcaccatgttggccaggctggtctcgaactcctgacctcagatggtctgcccacctccgcctcccaaagtgctgggattacaggcgtgagccactgcgcccggccactttcacactttttacagtgagtggtgaattagcaacagtaacactgattatccaacatatattttggaatatctactatgtgcaaggaatttttcttaaactctaaggttatgaatcactgggcaaatccatataattagagaattttaagtgctttagagcggtgtgattctactgtgctcagcctagtcaatttcgcattaaactgattatcagctg

SEQ ID NO: 18560 - DNA, 327 bp, Artificial Sequence
  derived and/or modified sequence
atggccgccccctgcctgctgcggcagggccgggccggcgccctgaaaactatgctgcaagaggcccaggtgttcagggggctggcctctacggtcagcctttcagccgaatccggcaagagcgagaaaggtcagccacagaattcgaagaaacagtcacccccgaaaaagcctgcgcccgtgcccgccgaaccttttgacaatacaacatacaagaatctccaacatcatgactactcgacctatacctttcttgacctcaatctggagctcagcaaatttaggatgcctcagccatcctccgggcgagagtcacctcggcattag

SEQ ID NO: 18561 - DNA, 339 bp, Artificial Sequence
  derived and/or modified sequence
atgctgcaggaggcccaggtgttccggggcctggccagcaccgtgtccctgagcgccgagagcggcaaaagcgagaaaggacagccacagaacagtaaaaaacagagtccaccgaagtccgtgccaactccgcacaggaggtattcaccttgcggcgactggaaagacgcatcgagccttaagccagcgcctgttccagcagaaccattcgacaacactacgtacaagaacctgcagcaccatgattactcgacgtacacattcttggatctaaatctcgaattgagcaagttccgcatgccccagccctcatctggcagagagagcccgagacactag

SEQ ID NO: 18562 - DNA, 327 bp, Artificial Sequence
  derived and/or modified sequence
atggccgctccctgcctgctccgccaaggacgcgctggtgccctgaagacaatgctacaggaggctcaggtctttcgcggattggcctctaccgtctccttgtcagcggaatccggcaagtctgaaaaggggcagccccagaattccaagaaacaatctccgcctaagaaacccgcaccagtgcccgctgaaccctttgacaacacaacttacaagaatctgcagcatcatgactattcaacctatacctttctagatctgaatctggaattgagtaagttccgcatgccccagccttcctctgggagagagagccccagacattag

SEQ ID NO: 18563 - DNA, 339 bp, Artificial Sequence
  derived and/or modified sequence
atgcttcaggaagcccaggtgttcagaggcctcgcttccactgtatcgctgtctgccgagagtggcaaaagcgagaaaggccagccccagaactccaaaaagcaaagtcccccaaagtccgtaccaacaccacataggcgttacagcccctgcggagactggaaggatgcctcgtctctgaagcctgcacctgtgcccgctgagccttttgataacaccacttataaaaatctgcagcatcatgactatagcacctacaccttcttggatctgaatctcgaactgtccaagttccggatgccccagccttcttcaggaagagagtcacctcgccactag

SEQ ID NO: 18564 - DNA, 327 bp, Artificial Sequence
  derived and/or modified sequence
atggccgccccctgcctgctgagacagggcagagccggcgccctgaagaccatgctgcaggaggcccaggtgttcagaggcctggccagcaccgtgagcctgagcgccgagagcggcaagagcgagaagggccagccccagaacagcaagaagcagagcccccccaagaagcccgcccccgtgcccgccgagcccttcgacaacaccacctacaagaacctgcagcaccacgactacagcacctacaccttcctggacctgaacctggagctgagcaagttcagaatgccccagcccagcagcggcagagagagccccagacactag

SEQ ID NO: 18565 - DNA, 339 bp, Artificial Sequence
  derived and/or modified sequence
atgctgcaggaggcccaggtgttcagaggcctggccagcaccgtgagcctgagcgccgagagcggcaagagcgagaagggccagccccagaacagcaagaagcagagcccccccaagagcgtgcccaccccccacagaagatacagcccctgcggcgactggaaggacgccagcagcctgaagcccgcccccgtgcccgccgagcccttcgacaacaccacctacaagaacctgcagcaccacgactacagcacctacaccttcctggacctgaacctggagctgagcaagttcagaatgccccagcccagcagcggcagagagagccccagacactag

SEQ ID NO: 18566 - protein, 201 aa, Artificial Sequence
  derived and/or modified sequence
MANKGPSYGMSREVQSKIEKKYDEELEERLVEWIIVQCGPDVGRPDRGRLGFQVWLKNGVILSKLVNSLYPDGSKPVKVPENPPSMVFKQMEQVAQFLKAAEDYGVIKTDMFQTVDLFEGKDMAAVQRTLMALGSLAVTKNDGHYRGDPNWFMKKAQEHKREFTESQLQEGKHVIGLQMGSNRGASQAGMTGYGRPRQIIS

SEQ ID NO: 18567 - protein, 35 aa, Artificial Sequence
  derived and/or modified sequence
MANKGPSYGMSREVQPSRLACLTHTRVVPSALAKL

SEQ ID NO: 18568 - protein, 91 aa, Artificial Sequence
  derived and/or modified sequence
MANKGPSYGMSREVQSKIEKKYDEELEERLVEWIIVQCGPDVGRPDRGRLGFQVWLKNGVILSKLVNSLYPDGSKPVKVPENPPSMVFKQM

SEQ ID NO: 18569 - DNA, 606 bp, Artificial Sequence
  derived and/or modified sequence
atggccaacaagggccccagctacggcatgagcagagaggtgcagagcaagatcgagaagaagtacgacgaggagctggaggagagactggtggagtggatcatcgtgcagtgcggccccgacgtgggcagacccgacagaggcagactgggcttccaggtgtggctgaagaacggcgtgatcctgagcaagctggtgaacagcctgtaccccgacggcagcaagcccgtgaaggtgcccgagaacccccccagcatggtgttcaagcagatggagcaggtggcccagttcctgaaggccgccgaggactacggcgtgatcaagaccgacatgttccagaccgtggacctgttcgagggcaaggacatggccgccgtgcagagaaccctgatggccctgggcagcctggccgtgaccaagaacgacggccactacagaggcgaccccaactggttcatgaagaaggcccaggagcacaagagagagttcaccgagagccagctgcaggagggcaagcacgtgatcggcctgcagatgggcagcaacagaggcgccagccaggccggcatgaccggctacggcagacccagacagatcatcagctag

SEQ ID NO: 18570 - DNA, 108 bp, Artificial Sequence
  derived and/or modified sequence
atggccaacaagggccccagctacggcatgagcagagaggtgcagcccagcagactggcctgcctgacccacaccagagtggtgcccagcgccctggccaagctgtag

SEQ ID NO: 18571 - DNA, 276 bp, Artificial Sequence
  derived and/or modified sequence
atggccaacaagggccccagctacggcatgagcagagaggtgcagagcaagatcgagaagaagtacgacgaggagctggaggagagactggtggagtggatcatcgtgcagtgcggccccgacgtgggcagacccgacagaggcagactgggcttccaggtgtggctgaagaacggcgtgatcctgagcaagctggtgaacagcctgtaccccgacggcagcaagcccgtgaaggtgcccgagaacccccccagcatggtgttcaagcagatgtag

SEQ ID NO: 18572 - DNA, 606 bp, Artificial Sequence
  derived and/or modified sequence
atggcaaacaagggtcccagctacggcatgtcgagagaagtccagagcaaaatcgagaaaaaatacgacgaagagctggaagagcgtctggtggagtggatcattgtgcagtgtggaccggacgttggcaggccggataggggtcggttggggttccaggtctggctgaagaacggcgtgatcctgagcaaactagtgaatagtctgtatcctgatggctccaagcctgtcaaggtgcctgagaaccctcctagcatggtgtttaaacaaatggagcaggtcgcacagtttctgaaagccgccgaggattatggagtcattaagacagatatgttccagacagtggacctgtttgaaggaaaggatatggccgcggtgcagcgcaccctgatggcgctggggtctcttgctgtgactaaaaatgacggtcattaccggggagatcccaactggttcatgaagaaagcccaagagcacaaaagggaatttacagaatcacagctgcaggagggtaagcatgtaattgggctgcagatgggatcgaacagaggagcttctcaggctggcatgacaggatacgggagacctcggcagattatttcgtag

SEQ ID NO: 18573 - DNA, 108 bp, Artificial Sequence
  derived and/or modified sequence
atggccaataagggcccgtcttatggaatgagccgcgaggtccagccctccagactagcatgtctgacacatacccgtgtggtcccatcggccctagctaaattgtag

SEQ ID NO: 18574 - DNA, 606 bp, Artificial Sequence
  derived and/or modified sequence
atggccaacaaaggcccttcttacggcatgagtagagaggtacaaagtaagattgaaaagaagtatgacgaggaattggaagaacggcttgttgagtggataatcgttcagtgtggtccggacgtcggccgaccagacagaggcagactcggttttcaagtgtggctaaagaatggcgttatcctcagcaaactggtgaattcgttatatcctgacggcagcaaacctgtcaaggtgcccgagaatccccccagtatggtctttaaacagatggagcaggtggctcagtttctgaaggccgctgaggactacggggtcattaaaactgatatgtttcagaccgtggatctatttgaaggtaaagatatggccgccgtgcagagaactctcatggccttggggtccctagcagtgaccaaaaacgatggtcactacaggggcgatccaaattggtttatgaagaaggctcaagaacacaaaagagaattcactgaatctcagctgcaggaggggaagcacgtcattggactccagatgggctccaaccgtggtgcttctcaggccggcatgaccggctacggtcgaccacggcagatcattagttag

SEQ ID NO: 18575 - DNA, 606 bp, Artificial Sequence
  derived and/or modified sequence
atggctaacaaggggccatcctacgggatgtcgcgcgaggtccagtcgaaaatcgagaagaaatacgacgaggaactggaagaaaggttagtggaatggattattgtccagtgcggtcctgacgttggccgacctgatcgtggccgccttggctttcaggtgtggctgaagaacggtgtaattcttagcaagctagtgaatagcctgtacccagatggatcaaaacccgtgaaggtgcccgagaaccctccttctatggtgttcaagcagatggaacaggtggcacagttcctaaaggcagccgaggactacggcgtgattaaaactgatatgttccagactgtcgatctgtttgaagggaaggatatggccgctgttcagcggaccttaatggcccttggttctctggccgtcacaaagaacgacgggcactataggggtgatcctaactggtttatgaagaaagcgcaggagcacaaacgggagtttactgaatctcagctccaggagggaaagcacgttatcggcctgcaaatgggcagcaacagaggcgcaagccaggctgggatgactggctatggacgccctcggcagattatctcctag

SEQ ID NO: 18576 - DNA, 276 bp, Artificial Sequence
  derived and/or modified sequence
atggcaaacaagggcccatcttacggcatgtcacgcgaggtgcagtctaaaatcgaaaagaagtatgacgaggagctggaggaacgccttgtggagtggataatcgtccagtgcgggccagacgtgggccggccagaccgcggacggctcgggtttcaagtttggcttaagaatggcgttatcctgagtaaactggtgaatagcctatacccagatgggtctaaaccagtgaaagtgccagagaacccgccatctatggtttttaagcaaatgtag

SEQ ID NO: 18577 - DNA, 606 bp, Artificial Sequence
  derived and/or modified sequence
atggctaacaaagggccctcatacggtatgagcagggaagtgcagtctaagatagaaaaaaagtatgatgaggaactcgaggagcgcctcgtggagtggattatagtgcagtgtggtcctgacgttggcagaccggaccggggaaggctcggtttccaggtttggctgaagaatggagtcattctgtcaaagctcgtgaactcgctgtatcccgatggaagtaaaccagtaaaggtgccggaaaacccaccctctatggtgtttaagcagatggagcaggttgcccagttcctcaaggcagcagaggactacggggtgatcaaaaccgacatgtttcagactgtggacctgttcgaaggaaaggatatggcagcagtacaacgcacgctaatggctctgggctcactggcggttaccaaaaatgacggccactatcggggggaccctaactggttcatgaagaaggcacaggagcataagagggaatttaccgagagtcagttgcaggaggggaagcatgtgatcgggctgcagatggggtccaatcgcggcgcttctcaagcaggcatgacaggctatggcagaccacgccagattattagctag

SEQ ID NO: 18578 - DNA, 606 bp, Artificial Sequence
  derived and/or modified sequence
atggccaataaggggcccagttacggcatgtcccgggaggtccagtctaaaatcgagaagaagtacgacgaggaactcgaggaaagactagtcgaatggatcattgtccaatgtggacctgacgtgggtaggccagatcggggccggctggggtttcaagtatggttaaagaatggagtcattttatccaaattggtgaacagtttgtaccccgacggctctaagcccgtgaaggtccccgagaacccaccatctatggtgttcaaacagatggaacaggtggcacagttcctgaaggcagccgaggactatggcgttatcaagaccgacatgtttcagaccgtagacttgtttgagggcaaggatatggctgccgtccagcggactcttatggctcttgggtctctcgctgtgaccaaaaacgatggtcactaccgcggggaccccaattggttcatgaagaaggcgcaggagcataaaagagagttcaccgaatctcagctgcaggaaggaaagcacgttatcggtctgcagatgggaagtaaccgaggcgcctcccaggccggaatgaccggctacggcaggcctagacagataatttcctag

SEQ ID NO: 18579 - DNA, 606 bp, Artificial Sequence
  derived and/or modified sequence
atggccaacaagggccccagctatggcatgagccgggaggtgcagagcaagattgagaagaagtatgatgaggagctggaggagcggctggtggagtggatcatcgtgcagtgtggcccagatgtgggccgcccagaccggggccgcctgggcttccaggtgtggctgaagaatggagtcatcctgagcaagctggtgaacagcctgtacccagatggcagcaagcctgtgaaggtgcctgaaaatcctccttccatggtgttcaagcagatggagcaggtggcccagttcctgaaggctgctgaggactatggagtcatcaagacagacatgttccagacagtggacctgtttgagggcaaggacatggctgctgtgcagaggaccctgatggccctgggcagcctggccgtgaccaagaatgatggccactacagaggagaccccaactggttcatgaagaaggcccaggagcacaagcgggagttcacagagagccagctgcaggagggcaagcacgtgattggcctgcagatgggcagcaacagaggagccagccaggccggcatgacaggctacggccggccccggcagatcatctcctag

SEQ ID NO: 18580 - DNA, 108 bp, Artificial Sequence
  derived and/or modified sequence
atggccaacaagggccccagctatggcatgagccgggaggtgcagcccagccggctggcctgcctgacccacaccagggtggtgcccagcgccctggccaagctgtag

SEQ ID NO: 18581 - DNA, 276 bp, Artificial Sequence
  derived and/or modified sequence
atggccaacaagggccccagctatggcatgagccgggaggtgcagagcaagattgagaagaagtatgatgaggagctggaggagcggctggtggagtggatcatcgtgcagtgtggcccagatgtgggccgcccagaccggggccgcctgggcttccaggtgtggctgaagaatggagtcatcctgagcaagctggtgaacagcctgtacccagatggcagcaagcctgtgaaggtgcctgaaaatcctccttccatggtgttcaagcagatgtag

SEQ ID NO: 18582 - DNA, 606 bp, Artificial Sequence
  derived and/or modified sequence
atggccaacaagggccccagctacggcatgagccgggaggtgcagagtaagatcgagaagaaatatgatgaagaactggaggagcgcctggttgagtggattattgtccagtgtggacctgatgttggccggccagaccgcggccgtctgggttttcaggtatggctcaaaaatggggttattctgagcaaacttgtcaatagcctgtaccccgacggatcgaagccggttaaagtccccgaaaacccaccaagtatggtctttaagcaaatggaacaggtagctcagttcctgaaggctgccgaagactatggcgtgattaagactgatatgttccaaaccgttgacctgttcgagggtaaagatatggcagcagtgcagcggacactcatggcattggggtctttggccgtgaccaagaatgacggtcattacagaggcgaccccaactggttcatgaaaaaggcgcaggagcataagcgtgagtttacagaaagtcaactgcaggagggtaaacatgttattgggctccaaatgggaagtaacaggggggccagccaagccgggatgacggggtacggccggccacggcaaatcattagctag

SEQ ID NO: 18583 - DNA, 108 bp, Artificial Sequence
  derived and/or modified sequence
atggccaacaagggccccagctacggcatgagccgggaggtgcagccatcacggcttgcatgcttaactcacacaagagtagtcccgtcagctttagccaagttatag

SEQ ID NO: 18584 - DNA, 606 bp, Artificial Sequence
  derived and/or modified sequence
atggccaacaagggccccagctacggcatgagccgggaggtgcagtccaagatcgaaaaaaagtatgatgaggagcttgaggagaggcttgtcgagtggatcatagttcaatgtggccctgatgtaggcagacctgatagaggccggctgggtttccaggtctggctcaagaatggcgtcatactgtccaaactggtgaattctttgtatccggacggctctaagcccgtcaaagtccctgagaatccaccttccatggtgtttaaacagatggagcaggtggcacagtttttgaaagcagccgaggattacggcgtaattaagacagacatgttccagacggtcgatctgttcgaagggaaagacatggctgcagtccagcgaacactgatggccctgggctcattggcggttactaagaatgatgggcactaccggggagatcctaactggtttatgaagaaagcccaagaacataagcgagaatttaccgagtctcaactgcaagagggcaagcacgtgattggactgcagatgggcagtaacaggggagcctcccaggcaggcatgactggctacgggcggccgcggcagatcattagctag

SEQ ID NO: 18585 - DNA, 606 bp, Artificial Sequence
  derived and/or modified sequence
atggccaacaagggccccagctacggcatgagccgggaggtgcagagcaagatcgagaagaaatacgatgaggaacttgaagaacggttggtggagtggataatagtgcagtgcgggcctgatgtgggccggccagatagaggtcgcctggggtttcaggtttggttaaagaacggtgtcatcctgagtaagctagtcaattctctgtaccctgatggctctaaacccgtgaaggtcccagaaaatcccccgtctatggtgttcaagcaaatggagcaggttgcacagtttctgaaagctgccgaagattacggcgtgatcaaaacagatatgttccaaaccgtggacctgttcgagggcaaggacatggccgcagtgcagcggaccctcatggctctaggaagtctggcggtgacgaaaaatgacggccactatagaggagatcctaactggtttatgaaaaaagcgcaggagcacaagagagagtttactgaatcccagcttcaggagggaaagcacgtaattgggctgcaaatggggtccaataggggcgcttcacaagctggcatgacagggtacggccgaccgcggcaaattatatcctag

SEQ ID NO: 18586 - DNA, 276 bp, Artificial Sequence
  derived and/or modified sequence
atggccaacaagggccccagctacggcatgagccgggaggtgcagagcaaaatcgagaaaaagtacgacgaagaattagaggaaaggctggttgaatggatcattgttcaatgtggacctgacgtgggacgacccgaccgcgggagattggggttccaggtgtggttgaagaatggtgtcatcctgagtaagttagttaattcactttatccagatgggtccaagcccgtgaaagtgccggaaaacccaccatcaatggtttttaaacagatgtag

SEQ ID NO: 18587 - DNA, 606 bp, Artificial Sequence
  derived and/or modified sequence
atggccaacaagggccccagctacggcatgagccgggaggtgcagtcaaagattgagaagaaatacgacgaggagttggaagagagactcgtggaatggatcattgtccagtgtggaccggatgtgggcaggccagataggggtcggctcgggttccaggtctggctcaagaatggagtgatcctctctaaacttgttaattccctataccccgatggaagtaaaccggtaaaggtcccggagaacccacctagcatggtctttaagcagatggagcaggtggctcagtttctgaaggccgccgaagactatggagtgatcaagacagacatgttccaaaccgtcgatctcttcgagggaaaagacatggcagctgtccagagaacactgatggccctgggctccctggcggtgacaaaaaacgacgggcattaccggggtgaccctaactggttcatgaaaaaagcccaggaacataaacgcgagttcactgagagccagctacaggagggcaaacacgtgattggactgcagatggggtccaatagaggcgcttcgcaggctggaatgacaggatatgggaggccccgtcagataatctcctag

SEQ ID NO: 18588 - DNA, 606 bp, Artificial Sequence
  derived and/or modified sequence
atggccaacaagggccccagctacggcatgagccgggaggtgcagtccaaaatcgagaagaagtatgatgaagagctggaagagcggctggtagaatggatcatcgtgcagtgtggacccgacgttggaaggcccgataggggacgcctcggctttcaggtttggttgaagaacggcgtgattctaagtaagctggtgaactccctgtaccctgacggatcgaaaccagtgaaagtgccagagaatccaccttcaatggtcttcaaacaaatggagcaggtggcccagtttctgaaagcagccgaggactacggagtcataaaaaccgatatgtttcagactgtagatctgttcgaaggaaaagacatggccgccgtacaacgcaccctaatggcactgggcagcctcgcagttaccaaaaatgatggtcattatagaggagaccccaactggtttatgaagaaagcccaagagcacaagagagaatttaccgaaagtcagctgcaagagggcaaacatgtgatcgggctccagatgggaagcaaccgaggcgcttcccaggcagggatgacaggctacgggaggccacgacagatcattagctag

SEQ ID NO: 18589 - DNA, 606 bp, Artificial Sequence
  derived and/or modified sequence
atggcgaacaagggaccttcttacggcatgagccgggaggtacagtcaaaaattgagaagaaatatgatgaagagctggaggagcgcctcgtggaatggattattgttcagtgcggccctgatgtagggcgtccagatagagggaggcttggcttccaggtatggctcaagaacggtgtcattctctcgaaacttgtcaacagcctttatccagatgggtccaagccagtgaaagtacctgagaaccctccttccatggtgttcaaacaaatggagcaggtagcccagttcctgaaggctgccgaagactacggagtaatcaaaactgacatgtttcaaaccgtggacctcttcgaggggaaagacatggccgcagtgcaacgcaccctcatggcgctcggcagccttgcagtgactaagaatgacggtcactacagaggcgaccctaactggttcatgaaaaaagcccaagaacacaaacgcgagttcacagaatctcagcttcaagagggaaagcacgtgatcggacttcagatgggctctaataggggcgcaagtcaagcaggtatgaccggctacggcaggcccaggcagattataagctag

SEQ ID NO: 18590 - DNA, 108 bp, Artificial Sequence
  derived and/or modified sequence
atggccaataaaggcccaagctatgggatgagccgcgaggtccagcccagtaggctggcttgcctgacccatacccgggtagtccctagtgcactggcaaagctgtag

SEQ ID NO: 18591 - DNA, 606 bp, Artificial Sequence
  derived and/or modified sequence
atggcgaataaagggccttcttacgggatgagccgggaagtgcagagcaaaatcgagaagaagtatgacgaggagttagaagaacgactggtggagtggattatagtccagtgtggacccgatgtgggtcgccctgatcggggaaggcttggttttcaggtatggctcaagaatggcgtcattctgagcaaactcgtcaattctctctaccccgatggttccaagcccgtgaaggtgccagaaaatccccctagtatggtgttcaagcagatggaacaggttgcccagtttctgaaggccgctgaagactacggggtaatcaaaacagatatgttccaaaccgtggatctctttgagggcaaagacatggcagcggtgcagaggactctgatggccctgggatcactggcagtgactaaaaatgatggccactacaggggagaccctaattggttcatgaagaaagctcaggaacataagcgagagttcacggagagccagcttcaggaaggtaaacacgtgataggcttgcagatggggtcaaatcggggtgctagccaggcgggtatgacagggtacgggagacccaggcaaatcattagttag

SEQ ID NO: 18592 - DNA, 606 bp, Artificial Sequence
  derived and/or modified sequence
atggcgaataaaggccctagttatgggatgagccgcgaggtccagagcaagatcgagaaaaaatatgatgaagagcttgaagagagactggtggagtggattattgttcagtgcggacctgatgtaggcagacccgatcgcggtcggctcgggtttcaggtgtggttgaaaaatggggtgatccttagcaagcttgtgaatagtctgtacccagatgggagcaaacctgtgaaagtgccagagaatcctccctcgatggtttttaaacagatggaacaggtagctcagtttctcaaggccgctgaagattatggcgtaatcaaaaccgacatgtttcagactgtagacttgttcgaggggaaagacatggccgctgtccaacggaccttaatggctctcggcagcctggccgtgacaaagaatgacggccactacaggggagacccaaattggttcatgaagaaggcacaggagcataaacgagagttcacagagtctcaactgcaggagggtaaacacgtgatcggcctgcagatgggctccaatagaggtgccagccaggccggtatgacaggctacgggagaccgcgacaaatcatttcttag

SEQ ID NO: 18593 - DNA, 276 bp, Artificial Sequence
  derived and/or modified sequence
atggccaacaaagggccttcatatggcatgagtagggaggttcagtccaagattgagaaaaagtatgacgaggagctggaggaacggctggtggagtggattatcgtgcaatgcgggcctgacgtgggcaggccagacagaggaagattagggttccaggtttggctgaaaaacggtgttatcctcagcaagctggtcaattctctttaccccgatggtagcaagcctgtcaaggttcccgagaatcctccctccatggtatttaagcaaatgtag

SEQ ID NO: 18594 - DNA, 606 bp, Artificial Sequence
  derived and/or modified sequence
atggcgaacaaagggccaagttatgggatgagcagagaggtgcagtccaagatcgaaaagaaatatgatgaggaactggaagagcgcctggtagagtggattatcgtgcagtgtggtccagacgtgggaaggcctgaccggggacgcctggggttccaggtctggcttaaaaatggcgtgattctgtctaaactagtcaacagcctttaccctgatggcagcaaaccagtcaaagtgccggagaaccctccctctatggtctttaagcaaatggagcaagtggctcaatttctcaaagccgcagaggattacggtgtgataaagactgatatgttccagacggtggacctattcgagggcaaggatatggccgctgtccagcgtaccttgatggctctgggcagtcttgctgttaccaaaaacgacggacactacagaggcgacccgaactggttcatgaagaaagctcaggagcataaacgcgaattcactgagtctcagttgcaggaagggaagcacgttatcggcctccagatggggagtaaccgtggagcatcacaggcagggatgactgggtatggtaggcctaggcagatcatttcatag

SEQ ID NO: 18595 - DNA, 606 bp, Artificial Sequence
  derived and/or modified sequence
atggcaaataagggtcctagttatggcatgagccgggaagtccagtccaaaattgagaaaaaatatgacgaagagctggaagagagattggtagaatggatcatcgtccagtgtggcccagatgtcggcagaccggatcgcggacgactggggttccaggtctggcttaagaacggcgtgatactttcaaaactcgtcaactcactgtatcctgacggcagtaaacctgtgaaagtcccagagaacccccctagtatggtgttcaagcagatggagcaggtggcacagttcttgaaggcagccgaggactatggagtgataaaaacggacatgttccagaccgtggatctttttgagggcaaggatatggcagccgtgcagcggacactgatggccctaggctccctcgccgtaactaaaaacgatggacactaccggggtgatcccaattggttcatgaaaaaagcccaggagcacaaacgagaattcacagaaagtcaactgcaggaaggcaagcacgttatcggattgcagatgggttcgaatcggggagcttcccaggcagggatgactggatacgggaggcctcgccagataatttcgtag

SEQ ID NO: 18596 - DNA, 1477 bp, Artificial Sequence
  derived and/or modified sequence
caagtcttcactccttcctgcgagccctgaggaagccttgtgagtgcattggctggggcttggagggaagttgggctggagctggacaggagcagtgggtgcatttcaggcaggctctcctgaggtcccaggcgccagctccagctccctggctagggaaacccaccctctcagtcagcatgggggcccaagctccaggcagggtgggctggatcactagcgtcctggatctctctcagactgggcagccccgggctcattgaaatgccccggatgacttggctagtgcagaggaattgatggaaaccaccggggtgagagggaggctccccatctcagccagccacatccacaaggtgtgtgtaagggtgcaggcgccggccggttaggccaaggctctactgtctgttgcccctccaggagaacttccaaggagctttccccagacatggccaacaagggtccttcctatggcatgagccgcgaagtgcagtccaaaatcgagaagaagtatgacgaggagctggaggagcggctggtggagtggatcatagtgcagtgtggccctgatgtgggccgcccagaccgtgggcgcttgggcttccaggtctggctgaagaatggcgtgattctgagcaagctggtgaacagcctgtaccctgatggctccaagccggtgaaggtgcccgagaacccaccctccatggtcttcaagcagatggagcaggtggctcagttcctgaaggcggctgaggactatggggtcatcaagactgacatgttccagactgttgacctctttgaaggcaaagacatggcagcagtgcagaggaccctgatggctttgggcagcttggcagtgaccaagaatgatgggcactaccgtggagatcccaactggtttatgaagaaagcgcaggagcataagagggaattcacagagagccagctgcaggagggaaagcatgtcattggccttcagatgggcagcaacagaggggcctcccaggccggcatgacaggctacggacgacctcggcagatcatcagttagagcggagagggctagccctgagcccggccctcccccagctccttggctgcagccatcccgcttagcctgcctcacccacacccgtgtggtaccttcagccctggccaagctttgaggctctgtcactgagcaatggtaactgcacctgggcagctcctccctgtgcccccagcctcagcccaacttcttacccgaaagcatcactgccttggcccctccctcccggctgcccccatcacctctactgtctcctccctgggctaagcaggggagaagcgggctgggggtagcctggatgtgggccaagtccactgtcctccttggcggcaaaagcccattgaagaagaaccagcccagcctgccccctatcttgtcctggaatatttttggggttggaactcaaaaaaaaaaaaaaaaaatcaa

SEQ ID NO: 18597 - DNA, 928 bp, Artificial Sequence
  derived and/or modified sequence
acatcaccacggcggcagccctttaaacccctcacccagccagcgccccatcctgtctgtccgaacccagacacaagtcttcactccttcctgcgagccctgaggaagccttctttccccagacatggccaacaagggtccttcctatggcatgagccgcgaagtgcagtccaaaatcgagaagaagtatgacgaggagctggaggagcggctggtggagtggatcatagtgcagtgtggccctgatgtgggccgcccagaccgtgggcgcttgggcttccaggtctggctgaagaatggcgtgattctgagcaagctggtgaacagcctgtaccctgatggctccaagccggtgaaggtgcccgagaacccaccctccatggtcttcaagcagatggagcaggtggctcagttcctgaaggcggctgaggactatggggtcatcaagactgacatgttccagactgttgacctctttgaaggcaaagacatggcagcagtgcagaggaccctgatggctttgggcagcttggcagtgaccaagaatgatgggcactaccgtggagatcccaactggtttatgaagaaagcgcaggagcataagagggaattcacagagagccagctgcaggagggaaagcatgtcattggccttcagatgggcagcaacagaggggcctcccaggccggcatgacaggctacggacgacctcggcagatcatcagttagagcggagagggctagccctgagcccggccctcccccagctccttggctgcagccatcccgcttagcctgcctcacccacacccgtgtggtaccttcagccctggccaagctttgaggctctgtcactgagcaatggtaactgcacctgggcagctcctccctgtgcccccagcctcagcccaacttcttacccgaaag

SEQ ID NO: 18598 - DNA, 1048 bp, Artificial Sequence
  derived and/or modified sequence
cgaacccagacacaagtcttcactccttcctgcgagccctgaggaagccttactgggcagccccgggctcattgaaatgccccggatgacttggctagtgcagaggaattgatggaaaccaccggggtgagagggaggctccccatctcagccagccacatccacaaggtgtgtgtaagggtgcaggcgccggccggttaggccaaggctctactgtctgttgcccctccaggagaacttccaaggagctttccccagacatggccaacaagggtccttcctatggcatgagccgcgaagtgcagtccaaaatcgagaagaagtatgacgaggagctggaggagcggctggtggagtggatcatagtgcagtgtggccctgatgtgggccgcccagaccgtgggcgcttgggcttccaggtctggctgaagaatggcgtgattctgagcaagctggtgaacagcctgtaccctgatggctccaagccggtgaaggtgcccgagaacccaccctccatggtcttcaagcagatggagcaggtggctcagttcctgaaggcggctgaggactatggggtcatcaagactgacatgttccagactgttgacctctttgaaggcaaagacatggcagcagtgcagaggaccctgatggctttgggcagcttggcagtgaccaagaatgatgggcactaccgtggagatcccaactggtttatgaagaaagcgcaggagcataagagggaattcacagagagccagctgcaggagggaaagcatgtcattggccttcagatgggcagcaacagaggggcctcccaggccggcatgacaggctacggacgacctcggcagatcatcagttagagcggagagggctagccctgagcccggccctcccccagctccttggctgcagccatcccgcttagcctgcctcacccacacccgtgtggtaccttcagccctggccaagctttgaggctctgtcactgagcaatggtaactgcacctgggcagctcctccctgtgcccccagcctcagccca

SEQ ID NO: 18599 - DNA, 375 bp, Artificial Sequence
  derived and/or modified sequence
gtgtgctcactcctatttgggaagagagaaggggcacagcagccctgcaggggcccctggctctgctcgtgtttctgggcttctgctgctttccccagacatggccaacaagggtccttcctatggcatgagccgcgaagtgcagtccaaaatcgagaagaagtatgacgaggagctggaggagcggctggtggagtggatcatagtgcagtgtggccctgatgtgggccgcccagaccgtgggcgcttgggcttccaggtctggctgaagaatggcgtgattctgagcaagctggtgaacagcctgtaccctgatggctccaagccggtgaaggtgcccgagaacccaccctccatggtcttcaagcagatgga

SEQ ID NO: 18600 - DNA, 1227 bp, Artificial Sequence
  derived and/or modified sequence
aggggtctcaccagagagggagccgggggagtgcgctcctgcgtccatcctcagaccagcgtgtccctcccaacctctgacccctctgaggccaggggatgggttcggcttcctttggtacctcttttggaagtctcttcagacaaacactggagagaaggcacagcaccctagggtgacatcagtggacagctttccccagacatggccaacaagggtccttcctatggcatgagccgcgaagtgcagtccaaaatcgagaagaagtatgacgaggagctggaggagcggctggtggagtggatcatagtgcagtgtggccctgatgtgggccgcccagaccgtgggcgcttgggcttccaggtctggctgaagaatggcgtgattctgagcaagctggtgaacagcctgtaccctgatggctccaagccggtgaaggtgcccgagaacccaccctccatggtcttcaagcagatggagcaggtggctcagttcctgaaggcggctgaggactatggggtcatcaagactgacatgttccagactgttgacctctttgaaggcaaagacatggcagcagtgcagaggaccctgatggctttgggcagcttggcagtgaccaagaatgatgggcactaccgtggagatcccaactggtttatgaagaaagcgcaggagcataagagggaattcacagagagccagctgcaggagggaaagcatgtcattggccttcagatgggcagcaacagaggggcctcccaggccggcatgacaggctacggacgacctcggcagatcatcagttagagcggagagggctagccctgagcccggccctcccccagctccttggctgcagccatcccgcttagcctgcctcacccacacccgtgtggtaccttcagccctggccaagctttgaggctctgtcactgagcaatggtaactgcacctgggcagctcctccctgtgcccccagcctcagcccaacttcttacccgaaagcatcactgccttggcccctccctcccggctgcccccatcacctctactgtctcctccctgggctaagcaggggagaagcgggctgggggtagcctggatgtgggccaagtccactgtcctccttggcggcaaaagcccattgaagaagaaccagcccagcctgccccctatcttgtcctggaatatttttggggttggaactcaaaaaaaaaaaaaaaa

SEQ ID NO: 18601 - DNA, 2166 bp, Artificial Sequence
  derived and/or modified sequence
cttttggaagtctcttcagacaaacactggagagaaggcacagcaccctagggtgacatcagtggacaggtcagtttcctgttcctgttcccagccacccctgtctgtctgcccagggacctacctgcctggcccactcctgctgccacccctctccatgagtgggactcctgagcagtgccaggcccaggccctcagggtggcagttgctggatggggccaggcttcccattccctggcaggcagactcttggctctggaagatccctgggggactctgacttcttggttactcaggctactccgtaagggtagccttacgagagcgtaagggcatgaggggaagtcgatgggtagaccaggtgtctctgatttctctgaggaaatgcagcttctttgccaagaactcttgggctttggtggcttcgtcgcccttgcctggggtgggcgagttttagtctcttcagctgcagaccagaagctgagctgacctgaaaagagctggagttctggagttcgggcttccaggccagggcctgcttctgggtgagagtgggaggtaatggttgcttgaggcagaggcagtaaaccctcacacccgcagctggacaaaggcaccagctggctgtattctgtgggggcaatgtggcttctggaaggtctctccagtggctctgtagctggtcttggcaaagaatgttctagaccaagggttgtcaaactacagctcatgggccaaatccagcctgctgtctgcttttgtaagtaaagttttattggaacaaagccatgttcatttgttacatattgtctatggctgctttcacactgcaacagcagagaccatgtgtcctgcaaagcctaaaatatgttctgtcttatcctttacaaaaacagtttactgacccctgctctagacctccaaagacctggtatcctctttcctggtgttcaagttcagagaggtgtctggagtaggggctgagcctggcctggatgggcagtgctgtgacaagtgtctaggatggccgggtatcctgcacagagctagaaggctgcctggcacgggtgaaagcagagctgctccctgaccctctgcccctccctcctccaccctggcctgctttagctttccccagacatggccaacaagggtccttcctatggcatgagccgcgaagtgcagtccaaaatcgagaagaagtatgacgaggagctggaggagcggctggtggagtggatcatagtgcagtgtggccctgatgtgggccgcccagaccgtgggcgcttgggcttccaggtctggctgaagaatggcgtgattctgagcaagctggtgaacagcctgtaccctgatggctccaagccggtgaaggtgcccgagaacccaccctccatggtcttcaagcagatggagcaggtggctcagttcctgaaggcggctgaggactatggggtcatcaagactgacatgttccagactgttgacctctttgaaggcaaagacatggcagcagtgcagaggaccctgatggctttgggcagcttggcagtgaccaagaatgatgggcactaccgtggagatcccaactggtttatgaagaaagcgcaggagcataagagggaattcacagagagccagctgcaggagggaaagcatgtcattggccttcagatgggcagcaacagaggggcctcccaggccggcatgacaggctacggacgacctcggcagatcatcagttagagcggagagggctagccctgagcccggccctcccccagctccttggctgcagccatcccgcttagcctgcctcacccacacccgtgtggtaccttcagccctggccaagctttgaggctctgtcactgagcaatggtaactgcacctgggcagctcctccctgtgcccccagcctcagcccaacttcttacccgaaagcatcactgccttggcccctccctcccggctgcccccatcacctctactgtctcctccctgggctaagcaggggagaagcgggctgggggtagcctggatgtgggccaagtccactgtcctccttggcggcaaaagcccattgaagaagaaccagcccagcctgccccctatcttgtcctggaatatttttggggttggaactcaaaaaaaaaaaaaaaaaa

SEQ ID NO: 18602 - protein, 497 aa, Artificial Sequence
  derived and/or modified sequence
MRTQIEVIPCKICGDKSSGIHYGVITCEGCKGFFRRSQRCNAAYSCTRQQNCPIDRTSRNRCQHCRLQKCLALGMSRDAVKFGRMSKKQRDSLHAEVQKQLQQRQQQQQEPVVKTPPAGAQGADTLTYTLGLPDGQLPLGSSPDLPEASACPPGLLKASGSGPSYSNNLAKAGLNGASCHLEYSPERGKAEGRESFYSTGSQLTPDRCGLRFEEHRHPGLGELGQGPDSYGSPSFRSTPEAPYASLTEIEHLVQSVCKSYRETCQLRLEDLLRQRSNIFSREEVTGYQRKSMWEMWERCAHHLTEAIQYVVEFAKRLSGFMELCQNDQIVLLKAGAMEVVLVRMCRAYNADNRTVFFEGKYGGMELFRALGCSELISSIFDFSHSLSALHFSEDEIALYTALVLINAHRPGLQEKRKVEQLQYNLELAFHHHLCKTHRQSILAKLPPKGKLRSLCSQHVERLQIFQHLHPIVVQAAFPPLYKELFSTETESPVGLSK

SEQ ID NO: 18603 - DNA, 3054 bp, Artificial Sequence
  derived and/or modified sequence
agagagctaggtgcagagcttcaggctgaggcgctgctgagagggcctcgccccgcctctgccgccagctgcaccccactcctggaccaccccctgctgagaaggacagggagccaaggccggcagagccaaggctcagtcatgagaacacaaattgaagtgatcccttgcaaaatctgtggggacaagtcgtctgggatccactacggggttatcacctgtgaggggtgcaagggcttcttccgccggagccagcgctgtaacgcggcctactcctgcacccgtcagcagaactgccccatcgaccgcaccagccgaaaccgatgccagcactgccgcctgcagaaatgcctggcgctgggcatgtcccgagatgctgtcaagttcggccgcatgtccaagaagcagagggacagcctgcatgcagaagtgcagaaacagctgcagcagcggcaacagcagcaacaggaaccagtggtcaagacccctccagcaggggcccaaggagcagataccctcacctacaccttggggctcccagacgggcagctgcccctgggctcctcgcctgacctgcctgaggcttctgcctgtccccctggcctcctgaaagcctcaggctctgggccctcatattccaacaacttggccaaggcagggctcaatggggcctcatgccaccttgaatacagccctgagcggggcaaggctgagggcagagagagcttctatagcacaggcagccagctgacccctgaccgatgtggacttcgttttgaggaacacaggcatcctgggcttggggaactgggacagggcccagacagctacggcagccccagtttccgcagcacaccggaggcaccctatgcctccctgacagagatagagcacctggtgcagagcgtctgcaagtcctacagggagacatgccagctgcggctggaggacctgctgcggcagcgctccaacatcttctcccgggaggaagtgactggctaccagaggaagtccatgtgggagatgtgggaacggtgtgcccaccacctcaccgaggccattcagtacgtggtggagttcgccaagaggctctcaggctttatggagctctgccagaatgaccagattgtgcttctcaaagcaggagcaatggaagtggtgctggttaggatgtgccgggcctacaatgctgacaaccgcacggtcttttttgaaggcaaatacggtggcatggagctgttccgagccttgggctgcagcgagctcatcagctccatctttgacttctcccactccctaagtgccttgcacttttccgaggatgagattgccctctacacagcccttgttctcatcaatgcccatcggccagggctccaagagaaaaggaaagtagaacagctgcagtacaatctggagctggcctttcatcatcatctctgcaagactcatcgccaaagcatcctggcaaagctgccacccaaggggaagcttcggagcctgtgtagccagcatgtggaaaggctgcagatcttccagcacctccaccccatcgtggtccaagccgctttccctccactctacaaggagctcttcagcactgaaaccgagtcacctgtggggctgtccaagtgacctggaagagggactccttgcctctccctatggcctgctggcccacctccctggaccccgttccaccctcacccttttcctttcccatgaaccctggagggtggtccccaccagctctttggaagtgagcagatgctgcggctggctttctgtcagcaggccggcctggcagtgggacaatcgccagagggtggggctggcagaacaccatctccagcctcagctttgacctgtctcatttcccatattccttcacacccagcttctggaaggcatggggtggctgggatttaaggacttctgggggaccaagacatcctcaagaaaacaggggcatccagggctccctggatgaatagaatgcaattcattcagaagctcagaagctaagaataagcctttgaaatacctcattgcatttccctttgggcttcggcttggggagatggatcaagctcagagactggcagtgagagcccagaaggacctgtataaaatgaatctggagctttacattttctgcctctgccttcctcccagctcagcaaggaagtatttgggcaccctaccctttacctggggtctaaccaaaaatggatgggatgaggatgagaggctggagataattgttttatgggatttgggtgtgggactagggtacaatgaaggccaagagcatctcagacatagagttaaaactcaaacctcttatgtgcactttaaagatagactttaggggctggcacaaatctgatcagagacacatatccatacacaggtgaaacacatacagactcaacagcaatcatgcagttccagagacacatgaacctgacacaatctctcttatccttgaggccacagcttggaggagcctagaggcctcaggggaaagtcccaatcctgagggaccctcccaaacatttccatggtgctccagtccactgatcttgggtctggggtgatccaaataccaccccagctccagctgtcttctaccactagaagacccaagagaagcagaagtcgctcgcactggtcagtcggaaggcaagatcagatcctggaggactttcctggcctgcccgccagccctgctcttgttgtggagaaggaagcagatgtgatcacatcaccccgtcattgggcaccgctgactccagcatggaggacaccagggagcagggcctgggcctgtttccccagctgtgatcttgcccagaacctctcttggcttcataaacagctgtgaaccctcccctgagggattaacagcaatgatgggcagtcgtggagttgggggggttgggggtgggattgtgtcctctaaggggacgggttcatctgagtaaacataaaccccaacttgtgccattctttataaaatgattttaaaggcaaaaaaaaaaaaaaaaaaaa

SEQ ID NO: 18604 - DNA, 1494 bp, Artificial Sequence
  derived and/or modified sequence
atgcggacacagattgaagtgatcccttgtaaaatctgcggggataagagcagcggtatacattacggcgtgattacgtgtgaagggtgcaaggggttcttcagacgttcccaaaggtgtaatgccgcgtacagctgtacccgccagcagaactgtcctatcgatcggaccagcagaaaccggtgccaacactgtagattacagaagtgcctcgctttgggtatgagtcgtgacgccgtgaagttcggtagaatgtctaaaaagcagcgcgatagtctccacgccgaagtccagaagcagctgcagcagcggcagcaacaacagcaggaacccgtggtgaagacccccccggctggagcccagggggcagacactcttacatatacactggggctgccagatggacagctgcctttaggcagctcccctgacctcccggaggcctccgcctgtccccctggattgcttaaggcttctggttctggtccatcctacagcaacaacctagccaaggctggactgaatggagcaagctgccatttggaatacagtccagagagggggaaggccgaagggagagaaagcttttatagtactgggagccagcttacgccggataggtgtggcctgcgctttgaagaacaccgccaccctggtctaggggagttgggacaaggtcccgacagctacggtagcccttccttcagaagcaccccagaggcaccatatgcttctttgacagaaattgagcacctagttcaatccgtctgtaaatcctaccgggagacatgtcagttgaggctagaagacctattgagacagcgtagcaatatattctctagggaagaagtcactggttaccaacggaagagcatgtgggaaatgtgggaaagatgcgcccatcacttgacagaggctattcaatatgttgtcgagtttgcaaaaaggctgtctggcttcatggaactttgccaaaatgaccaaattgtgcttcttaaggcaggtgcaatggaggttgtcttagtgagaatgtgcagagcatataacgccgataatcgcaccgttttcttcgagggcaaatatggcgggatggaactttttcgggcactcggctgctctgagctaatttcctccatatttgacttttcccacagtctgtccgcgctacatttcagtgaggacgagatcgctctgtataccgccctggtactgatcaatgcccaccgcccgggcctgcaagaaaagcgcaaggtcgagcagctgcagtataatctggaactggcctttcaccaccacttatgtaaaactcatagacagtctattctcgccaagttgccccccaaagggaaactgaggtctttgtgctcacagcacgtggagcggctgcaaattttccagcacctgcaccctatcgtggttcaggccgcctttcccccattgtacaaagagctgttctctacggaaaccgagagtccagtcgggttgtctaaatag

SEQ ID NO: 18605 - DNA, 1494 bp, Artificial Sequence
  derived and/or modified sequence
atgaggacccagattgaagtcatcccctgcaagatctgtggggacaagagcagcggcatccactacggcgtcatcacctgtgagggctgcaagggcttcttcagaagaagccagcgctgcaatgctgcctacagctgcacccggcagcagaactgccccatcgacaggaccagcaggaaccgctgccagcactgccgcctgcagaagtgcctggccctgggcatgagcagagatgctgtgaagtttggccgcatgagcaagaagcagagggacagcctgcatgctgaggtgcagaagcagctgcagcagaggcagcagcagcagcaggagcctgtggtgaagaccccacctgctggggcccagggcgctgacaccctgacctacaccctgggcctgcctgatggccagctgcccctgggcagcagcccagacctgcctgaggccagcgcctgccccccaggcctgctgaaggccagcggcagcggccccagctacagcaacaacctggccaaggccggcctgaatggagccagctgccacctggagtacagccctgagcggggcaaggccgagggccgggagagcttctacagcacaggcagccagctgaccccagacagatgtggcctgcgctttgaggagcaccgccaccctggcctgggggagctgggccagggccctgacagctatggcagccccagcttccgcagcaccccagaggccccctatgccagcctgacagaaattgagcacctggtgcagagcgtgtgcaagagctaccgggagacctgccagctgcggctggaggacctgctgcggcagaggagcaacatcttcagccgggaggaggtgacaggctaccagaggaagtccatgtgggagatgtgggagcgctgtgcccaccacctgacagaggccatccagtatgtggtggagtttgccaagaggctgagcggcttcatggagctgtgccagaatgaccagatcgtgctgctgaaggccggggccatggaggtggtgctggtgaggatgtgccgggcctacaatgctgacaacagaacagtgttctttgagggcaagtatggaggcatggagctgttccgggccctgggctgcagcgagctgatcagcagcatctttgacttcagccacagcctgagcgccctgcacttctctgaagatgagatcgccctgtacacagccctggtgctgatcaatgcccaccggcccggcctgcaggagaagaggaaggtggagcagctgcagtacaacctggagctggccttccaccaccacctgtgcaagacccaccggcagagcatcctggccaagctgccccccaagggcaagctgcggagcctgtgcagccagcacgtggagcggctgcagatcttccagcacctgcaccccatcgtggtgcaggccgccttcccccccctgtacaaggagctgttcagcacagaaacagagagccctgtgggcctgagcaagtag

SEQ ID NO: 18606 - DNA, 1494 bp, Artificial Sequence
  derived and/or modified sequence
atgcggacccagatcgaggtgatcccctgcaagatctgcggcgacaagtctagtggaattcattacggcgtgattacctgcgagggatgcaaaggattctttagaagatcccagagatgcaatgctgcttattcttgtacaagacagcaaaattgcccaatcgaccgcacttcgcgtaatcggtgccagcactgccggctacagaaatgtctagccctgggcatgagcagagacgctgtcaagttcggcagaatgagtaagaagcagagggactccctgcacgcagaggtccagaagcagctgcagcagagacagcagcagcagcaggaacctgtggtcaagacacccccggccggtgcccaaggggctgatacactcacatatacgctcggccttcctgacggtcagctgccattgggctccagcccagatctccccgaggcctctgcatgtcccccgggtttgctaaaggccagtgggagcggtccatcctatagcaataatcttgccaaggccggtctgaacggggcaagttgccatctggagtacagtcccgagagaggcaaagcagaaggtagagaatctttttactccacaggcagtcagctgactccggacagatgcggactcaggttcgaggagcaccggcacccagggctgggagagctgggccagggtcctgattcctacggctcccctagcttccggagcacccccgaggccccttatgcaagtctgaccgagattgaacatctggttcaatccgtgtgcaagtcttaccgggagacgtgtcagctgaggcttgaggacttgctacggcaacgctccaacatattttctagggaagaagtgacggggtaccagaggaaatcgatgtgggaaatgtgggaacggtgcgctcatcacctgacagaggccatccaatacgtggtcgaatttgctaagagattgtcaggattcatggagctgtgccagaatgatcagatagtgctgcttaaagcgggcgctatggaagttgtgttggtcagaatgtgcagggcctataacgcggacaataggacagtattcttcgagggcaagtatgggggtatggagttattccgcgccctcgggtgcagcgagctgattagctctatctttgatttttcccactcattatcggccctgcacttctcggaggacgagatcgccctatacaccgccctggtgcttatcaacgcgcatagaccaggcctacaagaaaaaagaaaggttgaacagctacagtacaacctggagcttgcttttcatcaccatctctgcaagactcatcgccagtccatcctggctaagcttcccccgaaagggaaactcagaagcctctgcagtcagcacgttgaaagacttcagattttccagcatctgcatcctatcgttgtgcaagctgcatttccgcctctatataaggaacttttcagtaccgagaccgaatcacccgtaggcctatcaaaatag

SEQ ID NO: 18607 - DNA, 1494 bp, Artificial Sequence
  derived and/or modified sequence
atgcgaacccagattgaggttataccgtgcaagatatgtggagataagtccagcggaatccattacggtgtgatcacatgcgaaggttgtaaagggttctttcgcagaagccagcggtgcaatgctgcttattcatgtactcgtcagcaaaattgcccaatcgatagaacctccagaaataggtgtcagcactgccgtctgcagaagtgtctggccctggggatgtcgagggacgcggtgaaattcggacgcatgagcaagaaacagagggacagcctgcacgccgaagtccagaaacagctgcagcagcgccaacagcagcagcaagagccagtagtcaagacacccccagccggagctcagggggcagatacactcacctataccctcgggctccccgacgggcaactcccactgggttcctctccggacctgcctgaagcttcggcttgtcccccaggcctgttgaaggcttccgggtccgggccttcctacagcaacaaccttgccaaggcaggcctcaacggagcttcatgccatctagagtacagtcccgagagaggcaaggctgaagggcgagagagcttctatagcactgggagccagctgaccccagatagatgtggtcttcgattcgaggagcaccgccaccctggattaggagagctgggccaaggcccagatagctatggctctcccagcttccgctccacaccagaagccccatatgcgtcactgacagaaatcgaacacctggttcaatctgtgtgtaaatcctatagagagacatgccaactgaggctggaagacctgttgcgtcagagatccaacattttctcccgggaggaagtgacgggatatcagaggaaatcgatgtgggagatgtgggaaaggtgcgcacatcatctgaccgaggccatccagtatgtcgtggagtttgcgaaacggttgtctggtttcatggaactatgtcagaacgaccagatcgtgctcctgaaggctggagctatggaggtggttctggtgcggatgtgccgggcatataacgccgacaacagaactgtcttcttcgaggggaaatatggtggcatggaactgttccgcgcacttggttgctccgagctcattagctccatcttcgacttttcccacagcctgagcgctctacacttcagtgaggatgagatcgccctctataccgccctggtcctgattaatgcccatcgccctgggttgcaggaaaagcggaaagtggagcagcttcagtacaacctggagcttgcttttcatcatcacctgtgtaagacacatcgacaatctattttagctaagctccccccaaagggtaagcttcgttctctttgtagtcaacatgtagagcgtttacagatttttcagcacctccacccaattgtcgtgcaggcagcctttccaccgctgtacaaagagctgttcagtacagagaccgaaagtcctgtgggtctctccaagtag

SEQ ID NO: 18608 - DNA, 3050 bp, Artificial Sequence
  derived and/or modified sequence
agaagcactgggggagagagctaggtgcagagcttcaggctgaggcgctgctgagagggcctcgccccgcctctgccgccagctgcaccccactcctggaccaccccctgctgagaaggacagggagccaaggccggcagagccaaggctcagtcatgagaacacaaattgaagtgatcccttgcaaaatctgtggggacaagtcgtctgggatccactacggggttatcacctgtgaggggtgcaagggcttcttccgccggagccagcgctgtaacgcggcctactcctgcacccgtcagcagaactgccccatcgaccgcaccagccgaaaccgatgccagcactgccgcctgcagaaatgcctggcgctgggcatgtcccgagatgctgtcaagttcggccgcatgtccaagaagcagagggacagcctgcatgcagaagtgcagaaacagctgcagcagcggcaacagcagcaacaggaaccagtggtcaagacccctccagcaggggcccaaggagcagataccctcacctacaccttggggctcccagacgggcagctgcccctgggctcctcgcctgacctgcctgaggcttctgcctgtccccctggcctcctgaaagcctcaggctctgggccctcatattccaacaacttggccaaggcagggctcaatggggcctcatgccaccttgaatacagccctgagcggggcaaggctgagggcagagagagcttctatagcacaggcagccagctgacccctgaccgatgtggacttcgttttgaggaacacaggcatcctgggcttggggaactgggacagggcccagacagctacggcagccccagtttccgcagcacaccggaggcaccctatgcctccctgacagagatagagcacctggtgcagagcgtctgcaagtcctacagggagacatgccagctgcggctggaggacctgctgcggcagcgctccaacatcttctcccgggaggaagtgactggctaccagaggaagtccatgtgggagatgtgggaacggtgtgcccaccacctcaccgaggccattcagtacgtggtggagttcgccaagaggctctcaggctttatggagctctgccagaatgaccagattgtgcttctcaaagcaggagcaatggaagtggtgctggttaggatgtgccgggcctacaatgctgacaaccgcacggtcttttttgaaggcaaatacggtggcatggagctgttccgagccttgggctgcagcgagctcatcagctccatctttgacttctcccactccctaagtgccttgcacttttccgaggatgagattgccctctacacagcccttgttctcatcaatgcccatcggccagggctccaagagaaaaggaaagtagaacagctgcagtacaatctggagctggcctttcatcatcatctctgcaagactcatcgccaaagcatcctggcaaagctgccacccaaggggaagcttcggagcctgtgtagccagcatgtggaaaggctgcagatcttccagcacctccaccccatcgtggtccaagccgctttccctccactctacaaggagctcttcagcactgaaaccgagtcacctgtggggctgtccaagtgacctggaagagggactccttgcctctccctatggcctgctggcccacctccctggaccccgttccaccctcacccttttcctttcccatgaaccctggagggtggtccccaccagctctttggaagtgagcagatgctgcggctggctttctgtcagcaggccggcctggcagtgggacaatcgccagagggtggggctggcagaacaccatctccagcctcagctttgacctgtctcatttcccatattccttcacacccagcttctggaaggcatggggtggctgggatttaaggacttctgggggaccaagacatcctcaagaaaacaggggcatccagggctccctggatgaatagaatgcaattcattcagaagctcagaagctaagaataagcctttgaaatacctcattgcatttccctttgggcttcggcttggggagatggatcaagctcagagactggcagtgagagcccagaaggacctgtataaaatgaatctggagctttacattttctgcctctgccttcctcccagctcagcaaggaagtatttgggcaccctaccctttacctggggtctaaccaaaaatggatgggatgaggatgagaggctggagataattgttttatgggatttgggtgtgggactagggtacaatgaaggccaagagcatctcagacatagagttaaaactcaaacctcttatgtgcactttaaagatagactttaggggctggcacaaatctgatcagagacacatatccatacacaggtgaaacacatacagactcaacagcaatcatgcagttccagagacacatgaacctgacacaatctctcttatccttgaggccacagcttggaggagcctagaggcctcaggggaaagtcccaatcctgagggaccctcccaaacatttccatggtgctccagtccactgatcttgggtctggggtgatccaaataccaccccagctccagctgtcttctaccactagaagacccaagagaagcagaagtcgctcgcactggtcagtcggaaggcaagatcagatcctggaggactttcctggcctgcccgccagccctgctcttgttgtggagaaggaagcagatgtgatcacatcaccccgtcattgggcaccgctgactccagcatggaggacaccagggagcagggcctgggcctgtttccccagctgtgatcttgcccagaacctctcttggcttcataaacagctgtgaaccctcccctgagggattaacagcaatgatgggcagtcgtggagttgggggggttgggggtgggattgtgtcctctaaggggacgggttcatctgagtaaacataaaccccaacttgtgccattctttataaaatgattttaaaggcaa

SEQ ID NO: 18609 - DNA, 1494 bp, Artificial Sequence
  derived and/or modified sequence
atgagaacccagatcgaggtgatcccctgcaagatctgcggcgacaagagcagcggcatccactacggcgtgatcacctgcgagggctgcaagggcttcttcagaagaagccagagatgcaacgccgcctacagctgcaccagacagcagaactgccccatcgacagaaccagcagaaacagatgccagcactgcagactgcagaagtgcctggccctgggcatgagcagagacgccgtgaagttcggcagaatgagcaagaagcagagagacagcctgcacgccgaggtgcagaagcagctgcagcagagacagcagcagcagcaggagcccgtggtgaagaccccccccgccggcgcccagggcgccgacaccctgacctacaccctgggcctgcccgacggccagctgcccctgggcagcagccccgacctgcccgaggccagcgcctgcccccccggcctgctgaaggccagcggcagcggccccagctacagcaacaacctggccaaggccggcctgaacggcgccagctgccacctggagtacagccccgagagaggcaaggccgagggcagagagagcttctacagcaccggcagccagctgacccccgacagatgcggcctgagattcgaggagcacagacaccccggcctgggcgagctgggccagggccccgacagctacggcagccccagcttcagaagcacccccgaggccccctacgccagcctgaccgagatcgagcacctggtgcagagcgtgtgcaagagctacagagagacctgccagctgagactggaggacctgctgagacagagaagcaacatcttcagcagagaggaggtgaccggctaccagagaaagagcatgtgggagatgtgggagagatgcgcccaccacctgaccgaggccatccagtacgtggtggagttcgccaagagactgagcggcttcatggagctgtgccagaacgaccagatcgtgctgctgaaggccggcgccatggaggtggtgctggtgagaatgtgcagagcctacaacgccgacaacagaaccgtgttcttcgagggcaagtacggcggcatggagctgttcagagccctgggctgcagcgagctgatcagcagcatcttcgacttcagccacagcctgagcgccctgcacttcagcgaggacgagatcgccctgtacaccgccctggtgctgatcaacgcccacagacccggcctgcaggagaagagaaaggtggagcagctgcagtacaacctggagctggccttccaccaccacctgtgcaagacccacagacagagcatcctggccaagctgccccccaagggcaagctgagaagcctgtgcagccagcacgtggagagactgcagatcttccagcacctgcaccccatcgtggtgcaggccgccttcccccccctgtacaaggagctgttcagcaccgagaccgagagccccgtgggcctgagcaagtag

SEQ ID NO: 18610 - protein, 351 aa, Artificial Sequence
  derived and/or modified sequence
MDIPPLAGKIAALSLSALPVSYALNHVSALSHPLWVALMSALILGLLFVAVYSLSHGEVSYDPLYAVFAVFAFTSVVDLIIALQEDSYVVGFMEFYTKEGEPYLRTAHGVFICYWDGTVHYLLYLAMAGAICRRKRYRNFGLYWLGSFAMSILVFLTGNILGKYSSEIRPAFFLTIPYLLVPCWAGMKVFSQPRALTRCTANMVQEEQRKGLLQRPADLALVIYLILAGFFTLFRGLVVLDCPTDACFVYIYQYEPYLRDPVAYPKVQMLMYMFYVLPFCGLAAYALTFPGCSWLPDWALVFAGGIGQAQFSHMGASMHLRTPFTYRCLQWPAFFHQPPPSDPLALHKKQH

SEQ ID NO: 18611 - protein, 377 aa, Artificial Sequence
  derived and/or modified sequence
MDIPPLAGKIAALSLSALPVSYALNHVSALSHPLWVALMSALILGLLFVAVYSLSHGEVSYDPLYAVFAVFAFTSVVDLIIALQEDSYVVGFMEFYTKEGEPYLRTAHGVFICYWDGTVHYLLYLAMAGAICRRKRYRNFGLYWLGSFAMSILVFLTGNILGKYSSEIRPAFFLTIPYLLVPCWAGMKVFSQPRALTRCTANMVQEEQRKGLLQRPADLALVIYLILAGFFTLFRGLVVLDCPTDACFVYIYQYEPYLRDPVAYPKVQMLMYMFYVLPFCGLAAYALTFPGCSWLPDWALVFAGGIGQAQFSHMGASMHLRTPFTYRVPEDTWGCFFVCNLLYALGPHLLAYRCLQWPAFFHQPPPSDPLALHKKQH

SEQ ID NO: 18612 - protein, 213 aa, Artificial Sequence
  derived and/or modified sequence
MDIPPLAGKIAALSLSALPVSYALNHVSALSHPLWVALMSALILGLLFVAVYSLSHGEVSYDPLYAVFAVFAFTSVVDLIIALQEDSYVVGFMEFYTKEVLGGRPGSPLPHCPSESPTCPHRESHTCAQRTESSSATGMALFTTSSTWPWPAPSAEGAGGRERVAPDPGREVASSDGVPGQGGARSVCRRNQDASLGLQPGVARRRFQGTSQV

SEQ ID NO: 18613 - DNA, 1056 bp, Artificial Sequence
  derived and/or modified sequence
atggacatcccccccctggccggcaagatcgccgccctgagcctgagcgccctgcccgtgagctacgccctgaaccacgtgagcgccctgagccaccccctgtgggtggccctgatgagcgccctgatcctgggcctgctgttcgtggccgtgtacagcctgagccacggcgaggtgagctacgaccccctgtacgccgtgttcgccgtgttcgccttcaccagcgtggtggacctgatcatcgccctgcaggaggacagctacgtggtgggcttcatggagttctacaccaaggagggcgagccctacctgagaaccgcccacggcgtgttcatctgctactgggacggcaccgtgcactacctgctgtacctggccatggccggcgccatctgcagaagaaagagatacagaaacttcggcctgtactggctgggcagcttcgccatgagcatcctggtgttcctgaccggcaacatcctgggcaagtacagcagcgagatcagacccgccttcttcctgaccatcccctacctgctggtgccctgctgggccggcatgaaggtgttcagccagcccagagccctgaccagatgcaccgccaacatggtgcaggaggagcagagaaagggcctgctgcagagacccgccgacctggccctggtgatctacctgatcctggccggcttcttcaccctgttcagaggcctggtggtgctggactgccccaccgacgcctgcttcgtgtacatctaccagtacgagccctacctgagagaccccgtggcctaccccaaggtgcagatgctgatgtacatgttctacgtgctgcccttctgcggcctggccgcctacgccctgaccttccccggctgcagctggctgcccgactgggccctggtgttcgccggcggcatcggccaggcccagttcagccacatgggcgccagcatgcacctgagaacccccttcacctacagatgcctgcagtggcccgccttcttccaccagcccccccccagcgaccccctggccctgcacaagaagcagcactag

SEQ ID NO: 18614 - DNA, 1134 bp, Artificial Sequence
  derived and/or modified sequence
atggacatcccccccctggccggcaagatcgccgccctgagcctgagcgccctgcccgtgagctacgccctgaaccacgtgagcgccctgagccaccccctgtgggtggccctgatgagcgccctgatcctgggcctgctgttcgtggccgtgtacagcctgagccacggcgaggtgagctacgaccccctgtacgccgtgttcgccgtgttcgccttcaccagcgtggtggacctgatcatcgccctgcaggaggacagctacgtggtgggcttcatggagttctacaccaaggagggcgagccctacctgagaaccgcccacggcgtgttcatctgctactgggacggcaccgtgcactacctgctgtacctggccatggccggcgccatctgcagaagaaagagatacagaaacttcggcctgtactggctgggcagcttcgccatgagcatcctggtgttcctgaccggcaacatcctgggcaagtacagcagcgagatcagacccgccttcttcctgaccatcccctacctgctggtgccctgctgggccggcatgaaggtgttcagccagcccagagccctgaccagatgcaccgccaacatggtgcaggaggagcagagaaagggcctgctgcagagacccgccgacctggccctggtgatctacctgatcctggccggcttcttcaccctgttcagaggcctggtggtgctggactgccccaccgacgcctgcttcgtgtacatctaccagtacgagccctacctgagagaccccgtggcctaccccaaggtgcagatgctgatgtacatgttctacgtgctgcccttctgcggcctggccgcctacgccctgaccttccccggctgcagctggctgcccgactgggccctggtgttcgccggcggcatcggccaggcccagttcagccacatgggcgccagcatgcacctgagaacccccttcacctacagagtgcccgaggacacctggggctgcttcttcgtgtgcaacctgctgtacgccctgggcccccacctgctggcctacagatgcctgcagtggcccgccttcttccaccagcccccccccagcgaccccctggccctgcacaagaagcagcactag

SEQ ID NO: 18615 - DNA, 642 bp, Artificial Sequence
  derived and/or modified sequence
atggacatcccccccctggccggcaagatcgccgccctgagcctgagcgccctgcccgtgagctacgccctgaaccacgtgagcgccctgagccaccccctgtgggtggccctgatgagcgccctgatcctgggcctgctgttcgtggccgtgtacagcctgagccacggcgaggtgagctacgaccccctgtacgccgtgttcgccgtgttcgccttcaccagcgtggtggacctgatcatcgccctgcaggaggacagctacgtggtgggcttcatggagttctacaccaaggaggtgctgggcggcagacccggcagccccctgccccactgccccagcgagagccccacctgcccccacagagagagccacacctgcgcccagagaaccgagagcagcagcgccaccggcatggccctgttcaccaccagcagcacctggccctggcccgcccccagcgccgagggcgccggcggcagagagagagtggcccccgaccccggcagagaggtggccagcagcgacggcgtgcccggccagggcggcgccagaagcgtgtgcagaagaaaccaggacgccagcctgggcctgcagcccggcgtggccagaagaagattccagggcaccagccaggtgtag

SEQ ID NO: 18616 - DNA, 1056 bp, Artificial Sequence
  derived and/or modified sequence
atggacataccccccctagccgggaaaattgcggcccttagcttgagcgccctccccgtctcgtatgcactcaaccacgtcagtgcactttcccatcccttgtgggtcgccctgatgagcgctcttattttgggcttactttttgtggccgtgtacagtctgtctcacggggaggtatcctatgatcccctgtacgccgtgtttgcggtgttcgccttcacgtcagtggtggatctcatcattgctctccaagaagattcctacgtagtgggctttatggaattttacacaaaggaaggcgaaccctacctgagaaccgcccatggggtctttatttgctactgggacggaactgtccactacctgctctaccttgcaatggcgggagccatctgccgccgcaaaagataccgaaacttcgggctgtattggctgggatcttttgcaatgtccattctcgtatttctgaccggcaacatcctagggaaatacagtagcgaaatccggcccgctttcttcctgaccattccctacctgctggtgccttgttgggcaggaatgaaagtgttttcccagccacgtgccctgaccagatgtacagccaatatggtacaggaagagcagcggaaaggtctgttgcagagaccagccgatttggccctggtcatctatctgatacttgctggcttctttaccctattcagaggtttggtggtccttgactgcccaaccgacgcttgcttcgtctacatataccaatacgagccatacctgcgcgatcccgtggcatatcccaaagtccaaatgctaatgtatatgttctacgtattacctttctgtggactggctgcctacgccctcacgttccccggctgcagttggctgccagattgggcactggttttcgcaggaggtataggacaggctcagttttcgcatatgggtgcctctatgcatctgcgtactcccttcacctaccgctgtctgcagtggcccgccttctttcaccagcccccccctagtgatccactggcactccacaaaaagcagcactag

SEQ ID NO: 18617 - DNA, 1134 bp, Artificial Sequence
  derived and/or modified sequence
atggacatcccgcccctcgcaggtaaaatcgctgccctgtcactgtctgctctgcccgtgtcttatgctttgaaccatgtgtcagcattgtcacacccgctctgggtcgcgcttatgagcgctctgatccttggtttgttatttgtggccgtgtattccttgtctcacggagaggtgtcgtatgacccactatacgccgtattcgcagtattcgcatttacatcagtagtggatcttataatcgcccttcaggaggactcctacgtcgtgggatttatggagttttataccaaagaaggggaaccatacctgcgcaccgcccacggagtgttcatttgctattgggacggaacagtgcattatctgctctatcttgccatggctggtgcaatatgtcgtagaaaaagatacaggaacttcgggctgtattggttaggcagtttcgccatgagcatattggtgttcctgaccgggaacatactcggaaagtacagttcagagatcagaccggccttttttctcactatcccctacctcctcgttccttgttgggccgggatgaaggtgttttcccagccccgggcactgacaaggtgtacagctaacatggtgcaggaagaacaacggaaaggcctattgcagcgcccagctgatctcgccttggtgatctatcttatcttggccggattcttcaccttgttccgtggtctggtggtgctggattgccctactgacgcttgttttgtgtacatctatcagtacgaaccttacctcagggacccagttgcttacccgaaagtccagatgttgatgtatatgttttatgtgctgccattctgtggcctggcagcctacgcattgacatttcctggatgcagttggcttcccgattgggctcttgtttttgccggaggaatcggccaggcccagttctcccatatgggtgcatccatgcacttacgcacacctttcacttatagggtgcctgaggacacttgggggtgtttcttcgtgtgcaacctcctctatgcgcttggaccccacttgctcgcttaccggtgtctccagtggcctgccttctttcatcaacctccaccatcggatccgctggctctccataaaaagcaacactag

SEQ ID NO: 18618 - DNA, 642 bp, Artificial Sequence
  derived and/or modified sequence
atggatatcccccccctggcaggaaagatcgcagccctgagcttgagtgccctcccagtttcatacgctcttaaccacgtgtctgctctgtcacacccactttgggtggccttgatgtctgctctcattttgggcttgctatttgttgctgtctactctctcagtcatggcgaggtctcttacgacccgctgtacgcggtgtttgcagtttttgcgttcacaagcgtggtagacttgataattgcccttcaagaggacagttatgttgtagggtttatggaattctataccaaggaagtgctggggggtaggccagggtctcctcttccgcactgcccatccgagtctccgacctgtcctcacagggaatcacacacctgtgcccagcggaccgagagctctagtgccaccgggatggccttgttcaccaccagttcgacctggccttggcctgccccttcggccgagggcgccggggggcgggagcgggtggcccctgaccctggcagggaggtcgcgtcatctgacggtgtccccggccaagggggagcccgaagcgtatgcagacgcaaccaggacgcatctctggggctgcaaccaggagtggcccggcgtcgttttcaggggacctcacaggtttag

SEQ ID NO: 18619 - DNA, 1056 bp, Artificial Sequence
  derived and/or modified sequence
atggacatcccccccctggccggcaagattgctgccctgagcctgagcgccctgcctgtgtcctatgccctgaaccacgtgtctgccctgagccaccccctgtgggtggccctgatgtctgccctgatcctgggcctgctgtttgtggccgtgtacagcctgagccacggggaggtgtcctatgaccccctgtatgctgtgtttgctgtgtttgccttcacctctgtggtggacctgatcatcgccctgcaggaggacagctatgtggtgggcttcatggagttctacaccaaggagggggagccctacctgaggacagcccacggcgtcttcatctgctactgggatggcaccgtgcactacctgctgtacctggccatggccggggccatctgcaggaggaagcgctacagaaactttggcctgtactggctgggcagctttgccatgagcatcctggtgttcctgactggaaacatcctgggcaagtacagcagcgagatccggcctgccttcttcctgaccatcccctacctgctggtgccctgctgggccggcatgaaggtgttcagccagccccgggccctgacccgctgcacagccaacatggtgcaggaggagcagaggaagggcctgctgcagaggcctgctgacctggccctggtgatctacctgatcctggccggcttcttcaccctcttccggggcctggtggtgctggactgccccacagatgcctgctttgtgtacatctaccagtatgagccctacctgcgggaccctgtggcctaccccaaggtgcagatgctgatgtacatgttttatgtgctgcccttctgtggcctggccgcctatgccctgaccttccctggctgctcctggctgcctgactgggccctggtgtttgctgggggcatcggccaggcccagttcagccacatgggcgcctccatgcacctgcggacccccttcacctaccgctgcctgcagtggccagccttcttccaccagcccccacccagcgaccccctggccctgcacaagaagcagcactag

SEQ ID NO: 18620 - DNA, 1134 bp, Artificial Sequence
  derived and/or modified sequence
atggacatcccccccctggccggcaagattgctgccctgagcctgagcgccctgcctgtgtcctatgccctgaaccacgtgtctgccctgagccaccccctgtgggtggccctgatgtctgccctgatcctgggcctgctgtttgtggccgtgtacagcctgagccacggggaggtgtcctatgaccccctgtatgctgtgtttgctgtgtttgccttcacctctgtggtggacctgatcatcgccctgcaggaggacagctatgtggtgggcttcatggagttctacaccaaggagggggagccctacctgaggacagcccacggcgtcttcatctgctactgggatggcaccgtgcactacctgctgtacctggccatggccggggccatctgcaggaggaagcgctacagaaactttggcctgtactggctgggcagctttgccatgagcatcctggtgttcctgactggaaacatcctgggcaagtacagcagcgagatccggcctgccttcttcctgaccatcccctacctgctggtgccctgctgggccggcatgaaggtgttcagccagccccgggccctgacccgctgcacagccaacatggtgcaggaggagcagaggaagggcctgctgcagaggcctgctgacctggccctggtgatctacctgatcctggccggcttcttcaccctcttccggggcctggtggtgctggactgccccacagatgcctgctttgtgtacatctaccagtatgagccctacctgcgggaccctgtggcctaccccaaggtgcagatgctgatgtacatgttttatgtgctgcccttctgtggcctggccgcctatgccctgaccttccctggctgctcctggctgcctgactgggccctggtgtttgctgggggcatcggccaggcccagttcagccacatgggcgcctccatgcacctgcggacccccttcacctacagagtgcctgaggacacctggggctgcttctttgtgtgcaacctgctgtatgccctgggcccccacctgctggcctaccgctgcctgcagtggccagccttcttccaccagcccccacccagcgaccccctggccctgcacaagaagcagcactag

SEQ ID NO: 18621 - DNA, 642 bp, Artificial Sequence
  derived and/or modified sequence
atggacatcccccccctggccggcaagattgctgccctgagcctgagcgccctgcctgtgtcctatgccctgaaccacgtgtctgccctgagccaccccctgtgggtggccctgatgtctgccctgatcctgggcctgctgtttgtggccgtgtacagcctgagccacggggaggtgtcctatgaccccctgtatgctgtgtttgctgtgtttgccttcacctctgtggtggacctgatcatcgccctgcaggaggacagctatgtggtgggcttcatggagttctacaccaaggaggtgctgggcggccggcccggcagccccctgccccactgccccagcgagagccccacctgcccccaccgggagagccacacctgtgcccagaggacagagagcagcagcgccaccggcatggccctcttcaccaccagcagcacctggccctggccagcccccagcgctgagggcgctgggggccgggagcgggtggccccagaccccggccgggaggtggccagcagtgatggagtgcccggccagggcggggcccggtctgtgtgcagaagaaaccaggatgccagcctgggcctgcagcccggggtggcccggcggcgcttccagggcaccagccaggtgtag

SEQ ID NO: 18622 - DNA, 1056 bp, Artificial Sequence
  derived and/or modified sequence
atggacatcccccccctggccggcaagatcgccgccctgagcctgagcgctctgcctgtgagctacgccttaaaccacgtttctgccctgtcccacccgctgtgggtggccctgatgtccgccctgatcctcggcctcctctttgtcgctgtgtattcactaagtcatggcgaggtaagctacgaccccctctatgcagtgttcgccgtttttgcattcaccagcgtggtcgaccttataatcgccctccaggaggactcttacgttgtgggctttatggagttttataccaaggagggcgaaccatacttacgaacagcacacggcgtgttcatctgttactgggacggtacagtccattacttgctgtatctggctatggccggcgccatctgtcggaggaagcgctacagaaatttcggcctctactggttgggtagcttcgccatgagcatccttgtatttctgacgggcaatatactggggaagtattcctcggagatccgtcctgcattctttcttactatcccgtatctcctagtgccgtgttgggccggaatgaaagtgttctctcagcctagggcattgacaaggtgcaccgccaatatggtgcaggaggaacagcgtaaaggcctcctccagcgacctgcagatttggctcttgtaatctacttgattcttgctggcttctttaccttgtttcgtggtctcgtggtactggactgtcccaccgacgcttgcttcgtgtacatataccaatacgaaccctatcttcgagacccggttgcgtaccccaaggtccagatgcttatgtatatgttctacgtcttgcccttttgcggccttgcagcgtacgcattgaccttcccgggctgcagctggcttcccgactgggcgctagtgttcgcgggcggcatcgggcaagctcaattttcgcatatgggcgccagcatgcatctccgcacgccttttacctaccggtgtctgcagtggcccgcctttttccatcagccaccgcccagcgatccactcgccctgcacaagaagcagcattag

SEQ ID NO: 18623 - DNA, 1134 bp, Artificial Sequence
  derived and/or modified sequence
atggacatcccccccctggccggcaagatcgccgccctgagcctgtccgcccttccggtgtcgtacgcgctgaaccatgtgagtgcgttatcacatcctctgtgggtggccctgatgtctgccctgatactgggacttctttttgtcgcagtttatagcctgtctcacggggaggtgagctacgatccgctctatgcagtattcgccgtgttcgccttcaccagcgtcgtggatctgattatcgctctgcaggaggactcttacgtcgtgggctttatggagttttacactaaagagggagagccctacctcagaactgcccatggcgtttttatatgctactgggacggtacagttcactatctgttatatctggcaatggcgggggcgatatgcaggcgcaagaggtaccggaactttggcctgtactggctcggatcattcgccatgtcaatcctggtcttccttacaggaaatattttgggcaagtacagtagcgagatcagacctgcattctttctgacaatcccttacctgctggtgccatgctgggcagggatgaaggtgttcagtcaacctcgcgcactgaccaggtgcaccgccaacatggtacaggaagagcagagaaaagggcttctccaacggcccgctgacctcgcactcgttatttatttaatcctcgccgggttttttactctgtttagaggcctcgttgtcctggattgcccaacagatgcctgcttcgtgtatatctaccagtacgagccatatcttagggatccggtggcctacccgaaagttcaaatgctgatgtacatgttttacgttctacctttctgcggactggcagcttacgcactgacctttcctggctgcagctggctacccgactgggccctggtatttgccgggggaataggccaagcccagttctctcacatgggagcctcaatgcaccttcgaacgccctttacataccgggtacccgaggacacatgggggtgcttcttcgtctgtaacctgctatacgcccttggcccacacctactggcctatcggtgtcttcagtggcccgccttttttcatcagcctccgccgagcgatcccctggcactgcataagaaacagcactag

SEQ ID NO: 18624 - DNA, 642 bp, Artificial Sequence
  derived and/or modified sequence
atggacatcccccccctggccggcaagatcgccgccctgagcctgtctgctcttcccgtgtcgtacgctctgaatcacgtgagcgccctgtcacaccccctctgggtggcactgatgtccgccttgattctcgggctgctgttcgtggcagtgtattctttgtcccacggagaagtcagctatgacccactgtacgcagtctttgccgtgtttgctttcacctccgtggtcgatctcattatagctctgcaggaggatagttacgtagtcggcttcatggagttctataccaaggaggtgctggggggccgcccgggctctccactgccacactgtccttccgaatcccctacatgcccccacagagagtctcatacatgcgcccagcgtactgagtctagctcggccactggtatggctctgtttaccaccagtagcacttggccctggcccgccccatcagctgagggcgccggcggcagagagcgcgtggctcccgatccaggtagggaagtcgctagttccgatggcgtccccggccagggcggagcaaggtctgtatgccgcagaaatcaggacgcatcactcggactgcagccgggcgttgcccgccggagatttcagggtactagccaggtctag

SEQ ID NO: 18625 - DNA, 1056 bp, Artificial Sequence
  derived and/or modified sequence
atggatatcccccctctggccggaaagatcgcagctctcagcctgtccgccctgcctgtttcttacgctctaaatcacgtttctgcgctctctcatcccctgtgggtggccctaatgagtgctcttattctgggccttctgttcgttgccgtttactctctttcccatggagaggtatcttacgacccgctgtacgctgtattcgcagtgtttgcgttcacaagcgtagtggaccttatcatcgctctgcaggaggattcctacgtggttggcttcatggagttctataccaaagagggcgagccttacctcagaaccgcacatggagtctttatttgttactgggatggcacagtgcactatttattgtatctggccatggcaggcgctatttgtaggcgcaaacggtaccggaactttggcctgtattggctgggctctttcgctatgtcgatactcgtgttcttaaccggtaatatcttgggtaaatattcgagcgagatcaggcctgcttttttcctcaccattccctaccttctggtaccctgctgggccggtatgaaggtgttcagccagccccgtgccctcacacggtgcaccgcaaatatggttcaagaggaacagcgcaagggcctcctccagcggccagcagatttagcactggttatctacttgattctagcgggattttttacactgttccgagggctcgttgtgcttgattgtcctaccgacgcctgttttgtttacatctatcagtacgagccatacctgagggaccctgtggcttatcccaaagtgcagatgttgatgtacatgttctacgtgctgcctttttgtggccttgcggcttacgcactgacgtttcccggttgctcttggctgccagattgggctttggtgtttgccggaggcatcggccaagcacagtttagtcacatgggcgcttcaatgcacctccgaacaccatttacttatcgatgtcttcaatggcctgcattcttccatcagcccccaccttccgacccactcgcgctccataagaagcagcattag

SEQ ID NO: 18626 - DNA, 1134 bp, Artificial Sequence
  derived and/or modified sequence
atggacattcccccactcgctgggaagatcgcggctctcagcttgtccgcactgcctgtgtcctacgcactgaatcacgtctcagccctgagccacccactgtgggtggccttgatgtccgcactgatcctgggcttgttgttcgttgcagtgtattctttaagccatggagaggtgtcttacgatcccctatatgccgtgttcgcagtctttgccttcacaagcgtagttgacctcatcatagctctccaagaggacagttacgttgtcggttttatggagttttatacgaaggaaggggaaccctacttgcggaccgcacacggtgtgtttatatgttactgggatgggacagtacactatctgttgtatctggccatggccggagccatctgtagaagaaagaggtaccgaaatttcggcctgtactggctaggaagctttgcaatgtctattctggtattcctgaccggaaacatcctcggaaaatactcttccgaaatacgtccagccttttttttaaccatcccctatctgttagtgccatgttgggcaggcatgaaagtctttagtcagccgagggccctgacgcgatgcacagctaacatggttcaggaggagcaacggaagggcctcctgcagagacccgctgacctggcacttgtcatctacctcatcctggccggttttttcaccctgtttcggggactggtagtgttggactgcccaacagacgcatgctttgtgtatatctaccagtacgaaccatacctgagagaccctgtggcctacccaaaagttcagatgttgatgtacatgttctatgtgcttcccttctgcggcctagccgcatatgccctgacctttcccggttgtagctggctgccagactgggcgctcgtgttcgccggtggaatcggacaggcacagttctctcacatgggcgcatccatgcaccttcggacccctttcacctatcgagttccggaagatacttgggggtgtttcttcgtgtgcaatctgctgtatgcccttgggccacacctattggcatatcgatgcctccagtggccggcattcttccaccagcctccaccctctgacccgctggctctccacaaaaaacagcactag

SEQ ID NO: 18627 - DNA, 642 bp, Artificial Sequence
  derived and/or modified sequence
atggacatacctccactggcgggtaaaatagcggcattatctttgtcagcactgcctgtttcgtatgcccttaatcacgtgtctgctctgtcacacccactctgggttgccctcatgtctgctctgatcctcggtctgttgttcgttgctgtgtactccttaagtcatggagaggttagctacgacccgctctacgcagtgttcgccgtctttgcatttacatctgtagtggatctaattattgcgctgcaggaagactcttacgtcgttggctttatggagttctataccaaggaagtgttgggcggacgcccagggagccctctgccacattgcccatctgagtcccccacttgcccacacagagagagtcacacatgtgcacagagaacagaaagcagcagtgcaaccgggatggcactgttcacaacatcttccacttggccctggcccgctccaagcgccgaaggcgcaggaggtcgcgagcgggtggctcctgaccccggtagagaggtggcatctagtgatggtgttcccggacaaggtggagctcgttccgtgtgcagacgaaaccaagatgctagcctgggcctccagcccggagttgcacgaaggcggttccagggtaccagccaggtgtag

SEQ ID NO: 18628 - DNA, 1106 bp, Artificial Sequence
  derived and/or modified sequence
gcgccctggagaacgcgtcggggctgagccggggtccagcagccgccgctatggacatcccgccgctggccggcaagatcgcggcgctgtcgctgagcgccctcccggtgtcctacgcgctcaaccacgtctcggcgctctcgcaccccctgtgggtggcattgatgagcgccctaatcctgggtctgcttttcgtggcggtctacagcttgtcccatggcgaggtctcctatgacccactctatgctgtcttcgctgtcttcgccttcacctcggttgtggacctcatcatcgctcttcaggaagacagctatgtggtgggcttcatggagttctacaccaaggagggagagccatacctgcgcacagcgcacggagtcttcatctgctactgggatggcactgttcactacctcctctacctggccatggccggcgccatctgcagaaggaagagataccggaattttggactctactggctgggttccttcgccatgagcatcctggtgttccttacaggaaacattcttggcaaatacagctccgagatcaggcctgccttcttcctcaccatcccctacctgctggtgccatgctgggctggcatgaaggtcttcagccagccccgggcgctaacccgctgcaccgccaacatggtgcaagaggaacaaagaaagggactcctgcagcgtccggctgacctggcccttgtcatatatctcatccttgctggcttcttcactctgttccggggcctggtggtgcttgattgccccacagatgcctgctttgtctatatctaccagtatgagccatacctgcgggaccctgtggcctaccctaaggtgcagatgctgatgtacatgttttatgtcctgcctttctgcggcctggctgcctatgctctcaccttccctggttgctcctggcttccagactgggccttggtgtttgctggaggcatcggccaggcacagttctcgcacatgggggcttccatgcacctgcgcacacccttcacctaccgttgccttcagtggcccgcattcttccaccagccaccaccctccgaccccctagccctccacaagaagcagcattga

SEQ ID NO: 18629 - DNA, 1483 bp, Artificial Sequence
  derived and/or modified sequence
gcgccctggagaacgcgtcggggctgagccggggtccagcagccgccgctatggacatcccgccgctggccggcaagatcgcggcgctgtcgctgagcgccctcccggtgtcctacgcgctcaaccacgtctcggcgctctcgcaccccctgtgggtggcattgatgagcgccctaatcctgggtctgcttttcgtggcggtctacagcttgtcccatggcgaggtctcctatgacccactctatgctgtcttcgctgtcttcgccttcacctcggttgtggacctcatcatcgctcttcaggaagacagctatgtggtgggcttcatggagttctacaccaaggagggagagccatacctgcgcacagcgcacggagtcttcatctgctactgggatggcactgttcactacctcctctacctggccatggccggcgccatctgcagaaggaagagataccggaattttggactctactggctgggttccttcgccatgagcatcctggtgttccttacaggaaacattcttggcaaatacagctccgagatcaggcctgccttcttcctcaccatcccctacctgctggtgccatgctgggctggcatgaaggtcttcagccagccccgggcgctaacccgctgcaccgccaacatggtgcaagaggaacaaagaaagggactcctgcagcgtccggctgacctggcccttgtcatatatctcatccttgctggcttcttcactctgttccggggcctggtggtgcttgattgccccacagatgcctgctttgtctatatctaccagtatgagccatacctgcgggaccctgtggcctaccctaaggtgcagatgctgatgtacatgttttatgtcctgcctttctgcggcctggctgcctatgctctcaccttccctggttgctcctggcttccagactgggccttggtgtttgctggaggcatcggccaggcacagttctcgcacatgggggcttccatgcacctgcgcacacccttcacctaccgtgtgcctgaggacacctggggctgcttcttcgtgtgcaatctgctgtatgcgctgggcccccacctgctggcctaccgttgccttcagtggcccgcattcttccaccagccaccaccctccgaccccctagccctccacaagaagcagcattgagagagctgtggactcaggacccaggactctgtttacgtgcccagtcagccctacctggggaagcgggggttgggtgttttagagacaggagggacatctccgggtgtctttagtcttggctatggtagtttcagtccagtgggtgggatggagaccaacgaccaagtgttcctgcaaggagagcctcccacagctgtcaccatgctccaactcccacacaaacgcttctaccccttccagaacttacccatcatccccccatggatcctttcagtaaaaaccctttcaatttccaaaat
